United States Patent Application Publication US 2006/0134663 A1 - sequence listing, part 84

SEQ ID NO: 236288 - DNA, 679 bp, Homo Sapiens
tttttttttttttttaatattatctttgttaagttcgggtatcaaggtcatactaattttatacatgatgtaagaattccctttttcaataatctgatcagtttaataaaattagaatgttctctcttatttgcaatatttggtagaagtcacctgtaaaactgacagacctgctcttttattagtactgtaggtagtttttaactcattttttccatttctttaatggctgtggcagaggtgatattcagaatatttaaataacaagcaccgcatgaacacttgccagtcagaatagatgcagatggctgtgctggaacagggtcctggaatcgccatattgtgtaagggggacttttgctgctgaatcatgggaaggttttgtgggaggtatctctagaagaggggcctgggtagtcagagggtgtcagagggtaactcagggcagtgcctatttacgaattggtatggaagaagttcaatcttttaacagcacttcagctgaaccagtacatattggctaaatattagtcctagtaataggtctatttcaggttttctatttcttccttggccagttttgctaaggtgtatttttttagtaaactggctatttcatcaaagttttcaagtatatagggataaagctcatctatcatcttcttctatattgttgtct

SEQ ID NO: 236289 - DNA, 719 bp, Homo Sapiens
  misc_feature (17)..(17): n is a, c, g, or t
tttttttttttttttancaaaaaaggggcccatgtctgataagtcaagaccacttgtcctctctgagcttcttgagtaatgggagataattccaacgtcacaaggttgatgaaaaaaagcaccattcatgtgcctggcatctatttattccacttcagttttcttcctatctggttgtctacttttgctctcctacaccttgctcaggggatatccccagtactggcaatatgagtgtgtttaataaaggagcaaaggaaagcattttctggtgacaagtctcatctggctgttcggtgacaccaaggcacatgcccaggaaactggtagtttccagtctggcaccacagcctctagagaaacagaaccagggcacctttcccagcaagtttatggagaaaaaacagggatgggcaggtatcatcaggaagcagggtcccaggctgagggcagagatgtggcttgtttccctatctagggatgcctggggggaattagggtaaaaaggcaaacagcaggtcaaggtagcttatttgggccaaggttgaagactgcagcctgagacacttccaggttgccttggagagtattccaaaggacaggctcaactttttacagaaaaaaggatgaatcagaagacgggtgattacaaaagttgttcgtcaggaattctcattggtttacagaaataacacggttagtatggctatccactgttg

SEQ ID NO: 236290 - DNA, 420 bp, Homo Sapiens
tttttttttttttttcatcttttttaaaaagccgtgccttccttcattcaaccaatattcacagaatacttctttgtcattctgtggatgagtccaagaaaggctggaggaggaaagagtttcagtctgtgtgcctgccatgcaaaggtcgggctttacatgcaaggcaaacagaagtgctgagggattatcaggtggggagacacacaggtgtgaactacagaaagacgtggctactccctgtctttctgcaggcttgcaggctctgcggcaggcaccacgaagaatgggctggatcttccactccaatcagctaaacttacctctcccgcaggatcccagtgtgacaaaaaacaccatgacctagcacctgcactgagctttacactttgaaaactgtgttccctgcaaacctgcctg

SEQ ID NO: 236291 - DNA, 630 bp, Homo Sapiens
ccacccacgggagactcagggccacctgccaccctccctcgctgccttctgcccttgggatggggcgctcctgatgtacgtgggccccggtgtttacaaggaggtgatcatctacaacctctgccagaagcaggtggtggagaagataccactgcccttttttgccatgtccctgagcctgtcccccgggacccacctcctggctgttggctttgctgagtgcatgctgaggctggtagactgtgccatggggactgcccaagactttgccggccacgacaacgcagtgcacctgtgcaggtttacaccgtccgccaggctgctcttcacagccgcccgcaacgagatccttgtgtgggaggtccccggcctctgagatgcagcagggactgtggtggtgggcatcacgcctggtcatgccaggcacctggacacaggcttggcagaggcgccaggttgtcaatggcctcatgctgggacaggccaggattcacgtaaatcgcctggagcaagctgttgtaaatttggcgccctgtgaatactttcatacctgttgcccttttgcctaagaaatctttaatgtttctatcttgtaataaacatgggcatttattgcaaaaaaaaaaaaaa

SEQ ID NO: 236292 - DNA, 438 bp, Homo Sapiens
  misc_feature (412)..(412): n is a, c, g, or t
taaaggcctagatgagaatgtaatagtaataatgatcctcatttttattctcagctgacagagcaagggaatgtgtgtgaatgctaatccatgcacatacatgtctataaatattctgcatggaaccatctgtgtctatgtcaagctaaactggggttcataccagggtctccaaccatagcccatccccactggggtccttccagctcactcggcttctggatgtacgactcccacaggtggaggaaggcccccagagaagtctgctgaaaattgttattcatgaatggaggttggacttcttcagatacacttcccgagtctgttaacatggtgatgtgacgtttgcccttcatgttactcatagggactattctgttagctaccaattctgctgctttaaataaaaacnccattaaaaaccaaaaaaaaaaaaaa

SEQ ID NO: 236293 - DNA, 615 bp, Homo Sapiens
tgcacatccagaacggcgaaggctgggtgtgtattccactaactgaaatatggcaacttagaggcgctgtttatttactgtatacgtcgacctattttagatgcgcatcagtatgaaattgtctcaatcttggatgtttcattttatgaatggaggcactttactaggtctagaatatttttttaaaagcctctgaactgagcttaaaactggcgattttatgaaatgtcggcaaaatgactattttattgtttgaagcgagttaatattctcagttgtctttaaaaatcagttactctaattccaggtgaagcaagccgctggtagcatcacccttatgagaagtgaaggttttgtaaactttccagtattaatttgggcgggtattccccgcttgtggcttgtttctgtcctagctggaggtgtaaaatgcacaatgtgtagcaggtagaatacagctccttatcgttctatgtaccaggtattttattactgaactagcaactagccttttccacctttaaaagttgtgccaagtcataatcatattgtgtataacttggaaatggtgctgtttaaaaaaattgtgtatttatacagtaaaaaaaaaaaaaa

SEQ ID NO: 236294 - DNA, 497 bp, Homo Sapiens
taaaaagaaactgttatttctaacacttgttatttattctttaacaaaaagggaaactttgaagaggaactttttacttttcacatgcggatccattagtcctcgagaatttaacagtgaacctatatagatgtattttgctgtccttacagaacatgcagtgtaagaagtacctttaatgccaacctacacacttctttcccgaagtacccaattaagtgcaaatgcttaatgtctttagtgttttatagtaaagcaaaaaatccttatttagaattagaagtacaggcctgtgcaacatggcggaaccccatctttaccaaaaaatacaaaaattagctggacatggtggcatgcttatgtagtctcagctacttgggggctgaggtgggaggatcgcttgagtccgggaggccaaggttgcagtgagccattttcgcaccattgcactccagcctgggtgacaaagtgaaacttcaccttaaaaaaaaaaaaaa

SEQ ID NO: 236295 - DNA, 535 bp, Homo Sapiens
  misc_feature (12)..(12): n is a, c, g, or t
tgatgtagctcncagagaagagcaggagcagaattagccctttcttcaggccatcttgcctcaaagggtacacatgtttggcggttaagatgaaactaacccttatgtttcatcctggccccatgatgtacacatcttagccatgtagtggccttggggggccacagagatttcctttgaggagcatggtagagtccacagccatggctgaagtcagtggacaccgaggggacaggactgcaggccaccaggggcctctgcccagagggaggcagagaggatggcggccacgggtgctctcctggcatcctcatggggtgatgccaggccgggcacttcaaaacaggctcagccgactgggagatcctttgtactttgcacagttcacacacacaaacacacacaccctatcccaagtgtttttgttagacacaaatgtcagcgtgtgattttggaagacttgtcagtgatgacaaaccatgatgcctgtgtttctgagtctttaaataaaaattaacaggaaaaaaaaaaaaaa

SEQ ID NO: 236296 - DNA, 470 bp, Homo Sapiens
cttttttttttttggtagagaagagtcccacaatgttgcccaggctggtctgaaactcctgggctcaagcgatcctcctgcttcagtctcacaaagtgctgggattacaggtgtcagccaccgtgcctggccacttaacttttataaggaggcaacagatcctaatacaagtgtccttaaagactaaaatattaaaaaaaaaaaaaaaaattagttgtcaagtagagaataaatgatgaagattttctagatgacttgggaagaataatgccttaacctaaaatattcctactgtactaaaaacactctaaagtttaaacatcagtaggttcagggtttagagtaacaaacatcattacagattttttttatttttagtattttttaatgtaaataattggatttgtagaatattactcaaagattctcaacatcttgttttttactgaatgtcgacgcggccgcgaatt

SEQ ID NO: 236297 - DNA, 769 bp, Homo Sapiens
  misc_feature (759)..(759): n is a, c, g, or t
gtgagtagcacagtaaggagactgcccaggacttgaggtccttggtccctctatagaagtatcaagtgtttgtaaaaggtttagcacccatgtgacagaaagaagccatcatcctcttaatttctcttggttttacttaatatatagaagggcaaactagtgggcctctgagtgcaagatgaggacttcattagaataaagacatattgcctcctggatttctaacccatagctccaagagcctcagtgtcagaacataggtaagggacttgatttactgagagaccctaccctacaacatcctgtggacattagagctctgtgctcctgtcactgagtatcactgtgagcttaaaatatgtcagctgctccatttctctttccttttgtgtattcagagctctgattttaaaacactgaaatctggaagattccagtagctgcactctgtctaaagcatatgaggaatgactgtagaatttgcatgtcctctatagcttttgttcacatgtatgcaggcagggataatgttattgattgttcaacctatttaccttgaccaggggttgttagtaatgcccaatatgaatcaagttggcacaagtgtgatcagatgatcaggtcttgtctctttacactgcaccaccaatgcttcagcactgcctccctttgccttaaggactgggagtgcgatgctgtgaatggaaggaaggggttattcacatgtgcttcattactctcgtgccgaaaactgggccncgagggccaa

SEQ ID NO: 236298 - DNA, 799 bp, Homo Sapiens
aatatttgcttgattacaaaggcagactttttagaagttgctttcttattatctttggagttatagggccacagggttttaaaaggaggttggattgtgccttacatgtgggtttcatacattgtccaaactgagacaccaacagatttgtgaatgagatgtgcatcttattaaatgttaatgtgatttgacaatgagacctttctttgtgtggacagtattatatacaattgatagtgtgtcattcagtctaagctgttagcactttcactaaaatatattcaaattttttttgatgtctagtttttacagtgttgggctttatcaagaatagttgtggattgtggaagagctgatatggaaacagaggaatgtattttgctttttttttaaactctgtccggttccttggacttgtgtgtctcctatcttatcaagaataattgtagattgtggaagagttgatatggaaacatcttagaagaatgttttttgctttttttaaaaaaaaaaacaaaactgtccagttccttggacttgtgtgtctcctatctaccattaaacccttatgacttaaggtatatgtataaatacatatatacatcttggtggcattgatttttctatgttgtgtattaaagctgctaaaaaacattttttctttttttcaatgagaagactagtgattactttgactttaggaattattcttctaaggagtcaagtatttgatctgggcgaggatcacactgaaatataaaacatctgagtaatttgggttcactaaaaaaaaaaaaaa

SEQ ID NO: 236299 - DNA, 775 bp, Homo Sapiens
  misc_feature (756)..(756): n is a, c, g, or t
ctgctggtggtactgtttcaggaccatcatcagcatgcaaaccaggtcgcagcaccacaggagctccatccaccactgcagattccaaattgagtaatcaggtgtcaacaattgtaagtctgctctcaacactttgcagaggctctccggtagtaacacatgatcttctgaggtcggagcttccagattcaattgaaagtgcattgcagggtgatgaaagatgtgtgcttgatactatgcgtttggttgaccttctcttggtgctattatttgaaggacgaaaagctttgccaaagtctagtgctggatctacaggcagaatcccaggactccggagattagatagttctggggagcgctcacatcggcagcttatagattgtattcgaagtaaagataccgatgcacttatagatgcaattgacacaggagcctttgaagtaaattttatggatgatgtaggtcagactctattaaactgggcctctgcttttggaactcaggaaatggtagaatttctttgtgagagaggtgcagatgttaatagaggtcaaaggtcatcatcattacattatgctgcatgttttggaagacctcaagtagcaaagactctgttacggcatggtgcaaatccagatctgagagatgaagatgggaaaactccattagataaagctcgagaaaggggccatagtgaagtggtagctattcttcagtctccaggtgattggatgtgtccagttaataaaggagatnataagaaaaaaaaaaaaaa

SEQ ID NO: 236300 - DNA, 532 bp, Homo Sapiens
atcgcaagactagggactgaatctggaaggtagagtccccgccccagggaggggcccagcgtgttggagatctcaaggttttttcccactgattctctaagtcttggccttatctaacacatgaaaccaaaccccacaactgaggctaagatttaagagctacccagagctaaattttcccctccccaagcctccctgctctagaagtggaagggaaagaaggggagagactatgaacctaaggagagtggagcctccagcaccaccggacagggactgcatagctgtccgacaactgagctcctcctgcctatctgtggccaaatgccctccatgtttgcaggcaggttggccaacaggggacagggagggtggggggaggcagaggggtgccccaaacgccctggagaggccgaagggaggaggggcagcactggaggccccattcggacttgctgccacgggagtcaccactgcagggggccgatgtcagctcccagctcctcttcctttagctgaagggcttcactgg

SEQ ID NO: 236301 - DNA, 429 bp, Homo Sapiens
aaataactaatgagaggcttgattgagaacctacccgactatcagaggacctgtccgggaagagaaatggggctacgtccagacagaatctcgctctgttgcctgggctggagtgcagtggcactgtatccggaattggggggttcttggtctcactgacttcaagaatgaagccacggacccttgcgagatgggggttccaccatgttggcccggctggtctcgaactgctgacctcaagtgacctgcctgtctcggcctcacaaatggctgggattacaggcacgagacaccgtgcctggccctgggaacatgtttacatggactttgttcactttttaaaacaaactgagggtaacttactagatctgtgaactaaagaaagagaaaaaaaagaaagaaaacaaacaagaacaaaaaaaaaaaaaa

SEQ ID NO: 236302 - DNA, 653 bp, Homo Sapiens
tttttttttttttttggttttttttttgatcgagctgtggacatccttcttaattcgattctgaggatttgtttaactaaaaagttcccaaacacagaaagggcctccccacctgctttggggagctgtctgtgctgggagtgccaggcatcccatgggacccatcactgccagtgtctgtgcctcccagaggtcagccgtgtctgccctggctctgtctcctctgtgacagggcagagcatttctggtcagtttctccatggtgcctcccacccctttgtaaagtggatggacatgatggaattcagttgtctcaccctgatagcctgggtgttgatattcactttacccgcactcagacacaggcgaccttgaagcagttctcggtgtgtagagtccacgtgacagtccccacagcctccccagatagctgtgtgcctgtgcgctactgctgtgccattttcccaacttggcgtttcactaaatgcagctgatctctctctctgtgcactcgtgatccatgttgaacaatacatgtaggttctttttccacgcaatgtaagaacatgatatactgtacgttggaaagcatttaccttatttatatacctgaatgttcctactacacaaataaacatatattaaattctaaa

SEQ ID NO: 236303 - DNA, 787 bp, Homo Sapiens
  misc_feature (54)..(54): n is a, c, g, or t
agattttgaaagttctcgaaatcagcttatgtaagagactatttccaataatancagaaggctacaaaaatgtcagaccaaaatagtaggcagaaggtagaaaactaaaccctgagaataatagtcattaagaagaccttgatgtagacattgcatatgagcatggagattcaggaaggaaattctggatgactggtggctgacaactttcaaatataataaatagagataggacttcaaaagaacttcaacaggaatatatgattttatagtagcacctggccttacttagaataaaatcgtttgttacaactaaagccagcatacatgattcgcaataggagtaaacttgctatagacattcctgtcctcaaatgattttaaaaccaaatttttctaagaacctcatagaaacctccagagaacaacttgtattagtttctgtttatatctcatattttagaggctccaacacctgaaaagtctcagggtattgtaaaaactatgaaccttcaagtggtctctggaagattgttttgaaattgattgtatcactttgatcaggctactgtcagttttaaaatacaggaaatcacccaatgggccacaggctgagctgatgtctgcctgacctatggcttcagtttcctaactgacaacatctatacagaggcagatctcataaaaggtcttctcttgattggaacctgacagaggaatgcattcctggtccctgatgaaaccctagaatccctctttcccctttccaatgaaggctccacctcag

SEQ ID NO: 236304 - DNA, 451 bp, Homo Sapiens
gaaccaacaaaggagacattctggggaaaaacttaaattgctcaaatttaaataagggctctcactttatatagtagatttgtcaggatcccatgaacattgcttttcttgatttctcacatatgagggttgggcaaaagggacttctctagcctcttcgataatgtaggtagacttgtacttagtgaatcccattataatgttaggtactatgttctaagactatttctataattggactgaaggctcctgcaaacataaattgctgatatggatatagtaacataagaaataccaaaatagggacatttgcaagaccttttccatttaatcatcagtttaataaaaatcatgcttttggtacagtgttcatgtaccataactgtattggaatatttgtacgatgttaaatatttttaataaaatttaacatgttcaaaaaaaaaaaaaa

SEQ ID NO: 236305 - DNA, 460 bp, Homo Sapiens
taaaagaagacagtaagtcaggttcttaactctcttaaaaatcattttagttaaacataagtttgcatatgttaattgaataaacgttaagtgtgaagtagaatctgcagatcccttaagtcccatataaatgaatgaattttgatacaaagttaatgtttagaatgttgataatggccaggtgtggtggctcacgcctataattccagcactttgggaggccaagacaggcagatcacttgatcaggagttcaagaccagcctggccaacatggtgaaacctcatccatacaaaaattagcagtgtgtagtggcgggcacctgtaatcccagctactcgggaggctgaggcgggatcatcagttgaacttgggaggcggaggttgcgttgagccaagattgcaccactgcactccagcctgggcaacagagcaagactccatctcaaaaaaaaaaaaaa

SEQ ID NO: 236306 - DNA, 466 bp, Homo Sapiens
ggagaactgaatccactttgcaaagaatgtatgttggacaaagacaaagtatctctgttgggagacgttgttcactgaggatttagcaagggagagcgtaacttgagtgtttgaagccgtctcgttcaaccgatgggggttgtgaattttgtgttcagagcgtcagaggacttgcaggtgaaatagcttccttttggattactcccacaaagctcagacactttgagacatattcgggtaattatctgctgataccagtagtaacaggttatactaagatgtcagttcctaagatctgtcacacagcgaggttgtggtgcggatagcataagtgtctcttgacactgtagtttatatgtaatggttgtaattcagttttaatgatgagtgaagctcagacttaattttctctcttattttgaagtgagttttctgcttcaaaggtgttgtgcaaaaaaaaaaaaaa

SEQ ID NO: 236307 - DNA, 508 bp, Homo Sapiens
  misc_feature (460)..(460): n is a, c, g, or t
  misc_feature (482)..(482): n is a, c, g, or t
  misc_feature (487)..(487): n is a, c, g, or t
  misc_feature (500)..(500): n is a, c, g, or t
tgcaattttagaagtaattacactgttgtgtaaatggccacctcttttgaagtctttgctacattgcttataaaacactgagttgaacatgagaaagccttttgtctgcagctgtacttttcaactggacatgaaccatgtacttttatggcacgtagatattcacatcaaatttctgatttgcagaccgattttatttttagttaacaaataagcttatcaaatgtggcttttgaactaaagcgcttttaattaaggagttataacagcatgttattttgagtagctgttactaaaatctgttgtgatggaacaatttggagtgagcatctgatatcagagataaagagagaagcatgcagtgagcatctggaagttcttgtaaaaaaaaaaacaaattaaacattctcatttgaatgcatttaaaatttttttaaattgccaattcctaagctttttncttgttagttgtagtttgcttnctcgnactgtataaaagnaaaaaaaa

SEQ ID NO: 236308 - DNA, 746 bp, Homo Sapiens
  misc_feature (477)..(477): n is a, c, g, or t
tttttttttttttttgctaagcaaaagattttataatgaagaaagatgagtaactagcctctcaatcttccatgactggcaggctgggccaggagagaagatggaacatgcggccaggcaggaattcacatgaccctaaagctgccggtggagctctcaaaagtccctagatccactgcgtccgtctctaggtggagcctggacaagggcatccttcacacacttcccaggggctcatatacaatgaagatgagaactctgctgcccggaaggactgacattcttcggatatcctacaaacccttcctgaagctcacttttggatagatatgggctgtaccaaagacacttattattctaacatgcatcaagtaaagtaaaacaaggagagaggctgcggtgtgtgggtaggggatgcaggagaagctgtgtaaggtagtggacagctgtgtggctctggggatgagacagactagnccaggcaagtgcttcaggcaggtgccccgtcgggaggcctctggagttactcatcttgcagcctcgggctactcaccatcaggaagcagtgggagccacctgtgttttttgttttgtttttatttatttattatttatatttttgagacggagtcttgctctgtcaccaggctgcagtgcagtggcaccatcttggctcactgcaacctccacctcctgggttcaagcgattctcctccctcagcttcccaaaaagctgaggcaggaga

SEQ ID NO: 236309 - DNA, 349 bp, Homo Sapiens
  misc_feature (10)..(10): n is a, c, g, or t
cacttccttncctccccttcccttcctcccttcctctacctttttttttcttataatgtaatatgtagtctggagaaaacatctcccaagttctgttgggccattctccctattggaagtatactaatagtatctgctcactggaacatgccatatatgtcacctgccccacatactgatatcacaataatatgtaaaaccttcatttaaattgtttttgaatgtgtatatcaattgttacagcatatgactgaacttttttcatccttaaaaatttttttaagcaatatgacacaaccactaatgaagaaaaataaagattactgattgacattaaaaaaaaaaaaaa

SEQ ID NO: 236310 - DNA, 720 bp, Homo Sapiens
gcagaatcagctacacttaattatgttgctgatagacaagcatccacgcttcagctggcactaagtgttttcattgtaggatcagcagcaggttaaagactgaacggttagtgaagacaaatgtcttaagaggctgcgatgtctaggttgggcttgtgacttcttagtggcctagccttcttgatggcaccttgaaagtgaacttctagaaatctacatttaaaaggcaaagctttaaaagcagagctagtctattctagttactgatgcaactaaaattctgtatttcttaagatggagccactgacgagatgtcacagtatagagcctgcagtctcaactcattgtgatcctaatggtctgggtgattggatggtttgagttgttagggattttgagtttttcattttattgcatatctgggttggatgttagactaaaggaaacccaggaatatttacctggtgttacatttaatatttaatgtaactggtctagcaacattaagggggatttctgaagccaactccggaggctgtgggctgcacattttgcactgtttttatatacttgtattcatatcctcttatcacctcagactcagacacaaggccttttacatggaaattttacaaattacttccatttatgtaaaataacgtcctgtgaccaagttgtttaaaggaaaataaagtgcttcttaaggaaaaaaaaaaaaaa

SEQ ID NO: 236311 - DNA, 542 bp, Homo Sapiens
ctaacttgtacaaactgacgtgtgtcaactatcatggaaggaaaaaaatgtacagattaaaattattcagtgttatgtactgtaagttaatatttttgtagaatggacatcaatctactttgcaagatttggaggctatttcaacattgcactgtagaaatgtaaagtaatgtatgcaatgtaaaggaaagcccgcggtagctgagcgcttcataacagaatgttctaatcaagtacgtggtatttggggatgtctccaatattgctcttgtattctttctaattgggtttagtgactagttgaaggaaaatgttataacgccatttggttcacatgtgaagtgccctccatagccaaatgttgggattttttttttttttcgtttttggttggactgtttgcagatatttaaattttatgaaatttccaaagattttggttgataacccccttttaccttctaaatgatttgagatgttcttatgttcttactgtgtgttttaaatatatataaaagagccacaagcaaaaaaaaaaaaaa

SEQ ID NO: 236312 - DNA, 452 bp, Homo Sapiens
agaaccctgtcctggcacctaatacatctaaaaaataaaaagagcatttattttaaattgcacccctctgggagtttgggggtgggagtttttctgaggtcatttatttttaaagcacagaaactcttgcatgctgatatgtcttaaaaggaaaactttgacaattagagaggaaatgccagtctgtttactcatctgtttcaggataaggcacatttgtacgtttggttctataaccattgagtattaagaataaaaccatgcggacagtatttactgatctctgtttagatcccactgggtggatttttgaagacaaggatatgctgtcctgttggctaggtttcttgtaccctaggggttagctgctttcttgcctcttagtggtattgtttgagaattaatcatgattgtctgaataaagtttttgaaaattgtaaaaaaaaaaaaaa

SEQ ID NO: 236313 - DNA, 557 bp, Homo Sapiens
tttttttttttttttggtattttttgttttttggtttttttggtagagctggggtcgcccaggctggtctcaaactctggactcaagaggcccacccatttaggcctcccaaagtgctgggattataggcatgagccactgtgtccggcctctcttggtgattttgactggaaatgatgtgggttcacacacatgatccaatctcaagaaaagacagtgtagagggaagggggtaaaaccaccattaagaactgattgggaatatagctcaactctaaaagcactgctcttctctaggttattggcacagacccacttccagtgatagctttaattattggctaaagcttttgctgtgagggcaaaaacttcatctatctaattcacctttatccataatctctaccctagagcctggaactgaatatacagttaataaataagtgcagaatgaactaactaatcacttacagcctgaattttacaaatgcctttgaagacttcatggaaacatttgtattcttggtactgtagggcagtgctgagccctgtcattt

SEQ ID NO: 236314 - DNA, 696 bp, Homo Sapiens
tttttttttttttttgaacttataagtaatagtttataagctttgaaataagaaaattatataattcttctcacatgaataacaggcaagaaaaaaggatttgtacgggataaagtctgaacccagaagacattagatttatcagagaaaaattcagtgtgcaatgaaaagctaatttagctttaagaatttgggaggtttctaatttgagaactgtaataaatcaacagttctccagtttcctgttgtgatccatcattttcttttccatttgaagacaggtacacacacatgcatttctgcctgtatagttctctttcacctttttctttctatcttagtacatctgtatattccatttaatgcaagtgaaagcaaagaaaaatctctaagtgttcaattggactgaaaaagggcatgtgcaaagaaaaatattgaataaaactttataaacaatgattcaggattttaaaagtatggcatttaagtatacccccatataatctttattataactgtcatagtacaccagtagctacaaaaagcaggaaagaatataaaatagtaaccatgagaatattaccaatattattagaagtttaagttctctggaaaattgatataaagtatatttataatctttcagatatgagttttcacttttctctgatatctgtgaagatgtttttattttta

SEQ ID NO: 236315 - DNA, 447 bp, Homo Sapiens
tcctgtattcactggtgtcttaggatcacttaccaaaaatctgtggcatcttagatttggtaacaaagcctaaatatttccatcctacaaacgtggtcatgcttctaaaaaaccacatgaagtagctcaagatgtttggccagccaatgcgcagaagccctaattgaacatgtaaaaggcagatgagatgtgttaaggtattatcttagatacagattatgtggagctcaaagaccttgttgggaacaacattttctaattgcgtttcttctccgtggatctgcgcttttttgaaatcaaaagacactaggggctaggcaaagtggctctcacgcctgtaattccagcactttaggaagccaatgctggaggattgtgtgagcctaggagtttaagaccaaactgggcaacatggtgaaaccccatatctgccaaaaaaaaaaaaaa

SEQ ID NO: 236316 - DNA, 678 bp, Homo Sapiens
tttttttttttttttactgtgaaattctaaaatcatatttattcaccaattcacagaaagtgtcataacgaccaccaacatgaatcagtttgtaggcatttacaagccacagctgaaaataaaaatctgtctgtgttgaataggcatttaacaaattacttgaaaactgcaagaatcataattattataaatttaaagtttgtgattcaaacatgggtaagatcacagtcatggggagaagcccaacagattcctgtgatgatccttattttcttcctatatctttatatacatagagactctcagcgcccctcactctgtgtcagtctgaattggatatgacagctcagttaggcctgagagaggattctatgaaaaggagtggggaggggaaaggacattttctctgaccctctgtggctgggcaaccttgttgactgagaagacagtgcgctcttctgaaattagattcaattttctataaattcatacagtccttctaatgagatactccaaagtctgcattgtttcacactcatacacaatagtatatttatcaaataaacacattttctagactaaaaagattcattctttgaggcagcttgaagagctcagaagtctgatacatgtcaggtacacactggtccaccgctggaggcaaagccatccactggg

SEQ ID NO: 236317 - DNA, 686 bp, Homo Sapiens
tttttttttttttttaaaacaagagttcactgagaatcagcaataatagaatatgctgtataaactattctctacaaaggttgatcagcattatttacaattggtacattgatacaaaagaaggcatacaagttatccaagtcgcttttttttttttttttttttttttttttatggctgacaggtctatgcattgcgttatgcttcacaaccagagctttcgagcctctatggctggcgacaagtcaggagatcttcaggcaaagaggggtgtgtgcagtcaaggggctgggagagaagactgagtgggtgtgcagaacagaaggacccagaggacatcaccctaaaaatgttttataggctgctccagtttaactccattaagacaaacccaaagagaaccttttatttgcattccatttttcaagctgcaagtttttaatacatcattgtaaagtaaacctgtggttgactgccaaggaagaatactgtgggctttccctttttgcccagttttccagaaatatcctcaccttggtcatagccagtcttttgacaaagtaagcagcattcgatgagggtggggggggggtgggggctctttattccagcttccaattcaagatgtagagagctacaatgtctaaacctattgaattgctcctttagtccttgagacattattt

SEQ ID NO: 236318 - DNA, 747 bp, Homo Sapiens
  misc_feature (76)..(76): n is a, c, g, or t
tttttttttttttttgagatagtctcactccgtcacccaggctagagggcagtggtgtggtctcagctcactgcancctcccaagtttaagcgattctcctgcctcagcctctcgagtagttgggattacaggcacccaccaccatgcccagctaatgtttgtatttttagtagagacggggtttcaccatgttgaccaggctgatctcaaactcctgacctcagatgatccacctgcttcagcctcccaaagtgctgggattttaggtgtgagccactgtgcctggtcaaaagatctcatttttaaaaacaggtagaggttttgcagtttcaaaaagcttgacctaccccaattccccatgtttcagatgggagactcaggcccagagggatcaactgcattgttggtgtcctcgtatctgctgggagtgaggagaataaatatctggttttgctgatttcgtgatgtcagagtggagagacaggtgaggcagaaccttgcagctcaggatttcagaaaatactctgagtcttgtttggccagaccatttatagcttctgacaccagagttgctgtgggtctgttgaatgttaattaactaccaaagacctttaggggctagttgaaaaaccttccaccttagataaaaatctcttctctctcaatccacttctttgggcttccacaaaacaaacacaacttgtaggaaaactgactttgctgggaccccaaggactatggattat

SEQ ID NO: 236319 - DNA, 386 bp, Homo Sapiens
  misc_feature (51)..(51): n is a, c, g, or t
  misc_feature (61)..(61): n is a, c, g, or t
  misc_feature (107)..(107): n is a, c, g, or t
  misc_feature (132)..(132): n is a, c, g, or t
  misc_feature (135)..(135): n is a, c, g, or t
  misc_feature (162)..(162): n is a, c, g, or t
  misc_feature (214)..(214): n is a, c, g, or t
  misc_feature (307)..(307): n is a, c, g, or t
  misc_feature (334)..(334): n is a, c, g, or t
  misc_feature (339)..(339): n is a, c, g, or t
tagcatattaccatactgtttactgtaggcaatggtaagtatttgtgtatntaaatgtatntaaaggtatagaaaaggttcaataaaaatatgatataggccagacncggtggctcacgccttgtaatcccnccnctttgggatgccgaggcgggtggatcncaagttcaagagattgagaccatcctggcctacatggtgaaaccttgttctntactaaagatacaaaaattagctggacgtgatggcgcgcgcctgtagtcccagctactcaggaggctgagaatcgcttgaacccaggagtcanaggtggcagtgagccaagatcatgccnctgcnctccagcctggtgacaaagtgagactccgcctcaaaaaaaaaaaaaa

SEQ ID NO: 236320 - DNA, 504 bp, Homo Sapiens
  misc_feature (471)..(471): n is a, c, g, or t
  misc_feature (486)..(486): n is a, c, g, or t
  misc_feature (491)..(491): n is a, c, g, or t
gtccctgagggcggttaggagttctgggtgaccatcctggctcagctcctaactcaccatgtgacatcaggctatccccattccccctcttgggcctcagtttcccgacttgcaaaataagcagaaagaaccagatgctctccagggtctttttctactttgctatctcatgggtcttcattttctcttattttgttttctctggatcttttccatctgagggtacaggaagtaccaggacctgtttcagtttttgaatcctgcaagcacattccaagactggcctgaaactgcatgagcaacatcactcgaaataattttttttttcaaaagcaccttaacaaccaattgcgatgctgtcctgttcctttttactcacacccttctctcctttctcgtccccatgctcccccacctcagtgctccgtgctgtatgcgtgtgctctctgttcttgtatactcaatataagnaaataaatgtgtttnatgcnaaaaaaaaaaaaa

SEQ ID NO: 236321 - DNA, 606 bp, Homo Sapiens
tttttttttttttttgatatttacctttatacaatttattgggtttaatattcataacaataactttttctactgaaatagcagtttgtgtttacctgtcgaaccccaatatgagaaatgtgtacaaaagcaacagactgtgatagaaaaaggtatgtgaaaaaattagcaaaccaaagcatgataaatggatgaagcactataaaattactttgctgtttacgtaactgtatctttaatctgtactgtgctaaacagcctatagccaagttttaaagagttacaggaacaactgctacacattcaaagaacaggcattcactgcagcctcctgatttgacctgatgggagggacaggagaatgagtcactctgccaccacttttcctgccttggatttgtagaggatttgttttgctctaatttgtttttcctatatctgccctactaaggtacctgcttataggccatgaaaataaaacgccattcaactttttttttgtaaagctaaaataatcacatgatacttattctttggaggatttaaaatgtgctaaatggaggactaaagagttaccttataggagaatcatggggaacagagaaa

SEQ ID NO: 236322 - DNA, 462 bp, Homo Sapiens
tgcgagcccccattgtgtcgcctctgaaatcgttttgccgaagaagcatgtgtgcttgcaagtcaagagccaagggagagagtggctgaggtttcctggtgggccaagtgtggggcgtctgctgggaccctgagtgagccgcccggcgatggtgcgtttgagctgtggtgtctgcaccactcacatcacacaggtcaggcttctttgatttatggagataagcccgtgggcagcctttccagaggctggggaggaaaagaggagaccgtgcagtttcgcagagtcctggtccattgctgctcctgtaacaaaataccttagactggagggccgggcacggtggctcacgcctgttatcccagcactttgggaggctgaggtggacggatcacttgaggccagggttcccagaccagcctaggcaacatggagaaacctcatctcaaacaaaaaaaaaaaaaa

SEQ ID NO: 236323 - DNA, 577 bp, Homo Sapiens
ttcagagattgacatagttttatatctacttaaattttttttaggattctaaaatattaacatgcaagaacatactggaatatcacaaaaactagtttgatagaactgatatagtctatcaaacctgaagactttaaacctgaagctccgttgaatcagcaactttaaagtcctagaaacagtggcaatctcctctctcctgagtgagcttaactctaatttcaatgtcatatttgtatggaatcaagaaagcctccaaattagctggtgcatctccaaccacacgaatagtgggagccgcatcttttccaccctcatcacctttgtggcacacagcacagtcccccatgcacatcgtggaccaaaaactaaaggaataaaattctttttaaatactgtactttaaaaaatagggccacagcccgggcaacatagcaagactctgtctctataaacaataaaaaaaaaattggccaggtgtggtggcacgtgtctgtggtcccagctacttgggaggctgagcatgggaggattgcttgagtgcaggtagttgaggctgcggtgagctggatcatca

SEQ ID NO: 236324 - DNA, 725 bp, Homo Sapiens
tttttttttttttttacaaaggactgaagtcaaaccaccaaaagaaaaatgtattgtaccaacaaatagggtacaactttaaggaatgtacttttaaaattactatgagtttatcaataataacctttcatgttaagtcttccaatttttgtacataaaaatgattttcatcaaaccactgaaactatccattgtggatgtaaataaaataaccaagttcaatgtaagaaagcagcataaaacaaagtaaaacttgtgatttgcaaatcagcctgatgtaagtttgttgttgttgttgtttttttttgcctttgtagttgcagaaggtgagctctgttttagaaggagtcatttcattccccaattgaatttttactcatttaggctaaaatcacttcaaaagtttaaaatgagggtagaggaaataaaaaggaaaaaaagtaaacatatagttaagtttatcatcaccagatcactaaatgctagctatagaatatccaaacccaagcaaatgcatagagttcttcatgcccatcctcgcatctgtacatttctcagggagataagaacaagctaaaattaatagagacctcttgcgatttttattagactatcagctcacattttctacccaatatgaaaattagcatccattacagcatcatagtatttccaaaagatgttcctttaagatgttcctttcgtatcactaatatatactaact

SEQ ID NO: 236325 - DNA, 677 bp, Homo Sapiens
gagtgagatggcgtttaatgattgcttcagtttgaactaccctggcaacccctgcccaggggacttgatcgaagtgttccgtcctggctatcagcactgggccctgtacttgggtgatggttacgttatcaacatagcacctgtagatggcattcctgcgtcctttacaagcgccaagtctgtattcagcagtaaggccctggtgaaaatgcagctcttgaaggatgttgtgggaaatgacacatacagaataaacaataaatacgatgaaacgtacccccctctccctgtggaagaaatcataaagcggtcagagtttgtaattggacaggaggtggcctataacttacttgtcaacaactgtgaacattttgtgacattgcttcgctatggagaaggagtttcagagcaggccaaccgagcgataagtaccgttgagtttgtgacagctgctgttggtgtcttctcattcctgggcttgtttccaaaaggacaaagagcaaaatactattaacaatttaccaaagagatattgatattgaaggaatttgggaggaggaaaagaaacctggggtgaatacttattttcagtgcatcattactgttccagattcctatgatggatggcagactctttaataaattgcttactgatattatcttaaaaaaaaaaaaaa

SEQ ID NO: 236326 - DNA, 535 bp, Homo Sapiens
ttgcttttttcctccttgcgaaatcataccttaattttttttttttttttttaccatttatgatttattctcctatgtgtcatatgaaaggccaaggggctttatcttttactagtaggcaagcctgggcatttctgcatttgtgccagctaacactacaaaatagacttaattagagaaatttagacccagaattgcagcttcaacaacacaaaacaggaaagctagaagaggttgctgtgtcaacctacaagatagtgattcttggaagttggtatggaccagaaagcattcccaggacatttaggctatggctgagttctctaagactcagggtgggaattataatccctggtctaagctgatatgaaagtttctatgtgtgaaaatatggagttatatgctttgagattttctgccagttaaactaaaacaagatcatactgtaaatgtttgtaacttgcttccccccactgtatactgtaaacatctttgcatgtcaataaatatgcctctacaacaaaaaaaaaaaaaa

SEQ ID NO: 236327 - DNA, 613 bp, Homo Sapiens
  misc_feature (605)..(605): n is a, c, g, or t
tttttttttttttttggataggtctcattctgtagcccaggctgaagtgcagtggcacaatctcagcctgggcaacaagagcaaaattttgtctccaaaaaaaagtcagagggtatatacaggttggtagctttcactgacttagaagtgctcattccctcacacaaatatctcttgcacatataatctggaagccagtgggatgaggtaatgcacaagttctatattttccaagttgtgaggaggatgccctgagtattatttcatgacctaggacaatgagaatttctttggtctttttgataaaggttacctttcttgttttgtaccaaagacttttcaacaaatacattcctttcagagacctctcgtcacagtaagaactccaaatagatgcaaccagtttacacgctatcaatagtaagttcagctcagctaatcttccatcttaattcatcaaagagtttcatcgttctttaagaagaaatgctaaagcacagacttttacattgtcattggtttcattaaacaaaaaaaaggcgtggccagttgcagtctcatgcctgtaatcccagcactcggaaggctgaggctggggactgctnagtccagg

SEQ ID NO: 236328 - DNA, 697 bp, Homo Sapiens
  misc_feature (692)..(692): n is a, c, g, or t
tttttttttttttttccagtttttattgagtgaaaatgtcaaaccttgcatcagtcatgcaaaaaaaaaaaaaaatcaaataaataaaacacatatattaaatttctaatagcactaaattcaagtggaaaaatattcagttcttaataaccaggtgccgaggagaccagattcaagtaatcagagcacaggctgttcagctcgggtttcacgttctgtattttttttgtctcaaaacctctcctatatatctctatatatctatatatgtatatacatatagatatatacacacacatatgtgcatacatattatttgatatttatatatatacacatacatagttataaaacattaaaaagagcattggtggatcaagcattgtttccccacagaaagaaaataaaacaaaaattacacgttaaaattcaaaatgagctagcaatggcttatagtcctagtgtgcaatatgaagtttacaaaaggctagactccgcactgtcggcatcttcttcttttcttcttttttttttttaagtttgattttgctacattgaaaaaatgtttgtgtgtgtgtgttttttttttcctttctaaaacagcccctaccagagcctcctgaactctgtgggcaccacgtgctgctgtgagcatctgcccagacagtgacccgccacaggccccgggcgtnctggg

SEQ ID NO: 236329 - DNA, 504 bp, Homo Sapiens
ccctcagtgcgatcttgcttgccttcatcatcacttggaccccatacaacatcatggttctggtgaacaccttttgtgacagctgcatacccaaaaccttttggaatctgggctactggctgtgctacatcaacagcaccgtgaaccccgtgtgctatgctctgtgcaacaaaacattcagaaccactttcaagatgctgctgctgtgccagtgtgacaaaaaaaagaggcgcaagcagcagtaccagcagagacagtcggtcatttttcacaagcgcgcacccgagcaggccttgtagaatgaggttgtatcaatagcagtgacaaaacgcacacatcaacccacagaccttaggaggaggaaggcgagggcggggtgacttctggtgatgataaaaatggttttatcacccagatgtgaaagaagctgcctgtttactgatccattgaataaacccattttaatagaaaaagtcaataccaattcagcaaaaaaaaaaaaaa

SEQ ID NO: 236330 - DNA, 422 bp, Homo Sapiens
tttttttttttttttgactatttacatacagtttattaaatgcaattaaaagttcaattccttattgcactggccacatttcaagtgcttagctggcacatgtggctagtgccagtgcctactgtattgaacggtacagacagagcatttcatcactctagaaactggatggcaagtgctacccagcacagcagccgtgaggacctttcttgggctgctgactgttctgtctgtgactgtgtcatatcaactgactttttggagcagcatctgtgtgttagcaggacacatcacctatggcacatgcctcaaaacttaacactccttgggccccaggagcccagaatcaactgacagccctggtgatagtcaaggacaggtgactatgtttatataagcatgttcctatgacaggaatgtcc

SEQ ID NO: 236331 - DNA, 561 bp, Homo Sapiens
  misc_feature (535)..(535): n is a, c, g, or t
aactaaattaatatttgtagattgcaagttttgtttaaaataactttattgagtttttaagtcctgatctgttctaaggtgcctttctcacctcccattgattcagtgattctgaagttcttaatttgcaagtaaaataagtctactagagaggaggaaatcaggcacaaattgaccaattctcatgccatttgcaaagcaaaactgtaaggatgatgaaacctggctaactaaattaatggatcatttcactaaatcagatagaggaaatatcataaatattaacttgtctccctagaagctgagatttttcgccttaaatgacatggttgtgtttttgtaagagaaacttaatctaatctaataatgtgcatttaagtaagcagttctaagtcatgtatgacaatgcaattgtctgtttcctgaaaacaaataaatcgggaacaccatatccatttcaagctatcattaaagtgtaatttcctttgctctcttttactgggattatttgttttaaagtaaaacattaaaaagnatgtctataaagtaaaaaaaaaaaaa

SEQ ID NO: 236332 - DNA, 418 bp, Homo Sapiens
tttttttttttttttgaaacggagtctcactctgtcgcgcaggctggagtgcagtggtgggatctcgattcactgcaacctccgccccccgggttcaagcgattctcctgtctcagcctcccaagtagatgggattacacgcgcctgccacgtttgtatttttagtagagacggggtttcaccaccttggccaggctggtcttgaactcctgacctcaggtgatccaaaatgctgggattatgggtgtgagccactgcacctggccttaaacctgtctttctgaatgaaactactattgctcttttaaattataaaattagtgtgtgagacaaatggattaagacatatcatttttgcttacatcataaatgggtcaaattctgacaaaaacatatttattatactagacaggccaaa

SEQ ID NO: 236333 - DNA, 510 bp, Homo Sapiens
catctggtctgcccatggcttagggctctggagccattggccgtggatatatagtcagccttccatgcctggcttctccggtaggaccacagacctcagatcagcccatttatgatcctgccctgggcggctccccacttacaggaaaccccaccaagaggaatttgggctgcatcatttccggcttcctgcctgggctgctggaggtggctggctggcagccccctgacccagtggtgtttggagtggggagagggaggtctccacacctggggtgcctcactatttgggtaaagccagcccagaagtgcatgctagggctccccctcttggcgaagaaggctggtcccttcctcctgagccctggagtcagccccccaggaaggtgttggcggtcaccttgggcatccctctgttgccctgattgggagggggtcccttaaaaagcctaaacccgctgcactccagcctggacgacagagcgggactccgtctcaaaaaaaaaaaaaa

SEQ ID NO: 236334 - DNA, 524 bp, Homo Sapiens
ggccgcgggcaccgccaggagagcgtgcagctcgaagagaactgcctgtgccgcttccactggtgctgcgtagtacagtgccaccgctgccgtgtgcgcaaggagctcagcctctgcctgtgacccgccgcccggccgctagactgacttcgcgcagcggtggctcgcacctgtgggacctcagggcaccggcaccgggcgcctctcgccgctcgagcccagcctctccctgccaaagcccaactcccagggctctggaaatggtgaggcgaggggcttgagaggaacgcccacccacgaaggcccagggcgccagacggccccgaaaaggcgctcggggagcgtttaaaggacactgtacaggccctccctccccttggcctctaggaggaaacagttttttagactggaaaaaagccagtctaaaggcctctggatactgggctccccagaactgctggccacaggatggtgggtgaggttagtatcaataaagatatttaaaccaccaaaaaaaaaaaaaa

SEQ ID NO: 236335 - DNA, 541 bp, Homo Sapiens
  misc_feature (515)..(515): n is a, c, g, or t
  misc_feature (517)..(517): n is a, c, g, or t
  misc_feature (524)..(524): n is a, c, g, or t
ggcacccctgtgctctcttatggctgcagcacacttcccacttgcccctcagttctggccaagggagcttgttcccactcatatcgtgaatctcagttgagcttctctcaacctgtgattgctgtctgagttagctggctgacttccacaaggtcccctgtgaggtaggatcagcagtggcttccctctgtccttgctggagactgggagtgcactgaaagcatgtccagtgctactccttctcatatactccccacggctcactgaatcagctttagtgctgggtagggttgagggcttcccttgtggcctggattgccaggttccccagtaggagtgcatatcctagaggtagtttatcctcctctcacactctagggacttagagttttccatctgcctcgtagtaagtttctgggttttttcctgaaaaaaaaattcacagtgtgaatctctccacactattttgtctttccaagtggtagaggcatgctcacagtgcctccaatccactntnctggggnattaaaaaaaaaaaaaa

SEQ ID NO: 236336 - DNA, 470 bp, Homo Sapiens
  misc_feature (15)..(15): n is a, c, g, or t
acctgctgtccgctncagcgagctgtgaccccagggacatttcccctctgcagctgcggacagcgtcaggggcagaggggcacacaactttccccagagcaccccaaggacactgtgatcaacccgagaatgttctgggttcaactcaagcatctcccttgcacctccagggtcctgcgtggactctgggttccatcccacctgctacatgctcaccaggtctccattgaggaagaacaggaacgccggttcccccaccagcttttgctgctccccttcctgctggggttccctgttttcgagccatgggaggcaggctgctcacgcctcctcactctctgtctgtccctcaccaacaccaaggcctccatctcactgtaaataagtctctgttctgtaaatagatgtacagaagccatgttatttctttcatataataaacttttatgactctttaaaaaaaaaaaaaa

SEQ ID NO: 236337 - DNA, 499 bp, Homo Sapiens
taagtggctcctttggcaatttctatatttgtggaaatttggaaaggcatagtttcaacgtgcaagaatgtaattatattgcttcatctaataatatctcacatatctgtctatcttcagattttagattttctttattaaaaaaaccatcatggtagctccatctcgtttgtaacttctccctctcaaatactcagaagaatgaagaggccaaattcagaaaatcatggcttcactgggaaatgttttaaatctacatgtagctaggatatgtgatttcatattttttaaaaatgtggtgtaaataagtgtaaaaaattaccacttgcaaagtggttttattacagcgttaaagaaaatgactagaattctgatagattgtgctgatgaacctggttgtgggcaattgaattcttgtcttcccactaccatttcatgactgtcgtctgaacactattcaacaccattaaatataaactctatataaaaaaaaaaaaaa

SEQ ID NO: 236338 - DNA, 468 bp, Homo Sapiens
  misc_feature (449)..(449): n is a, c, g, or t
aaagtggttcttcccttaatatttatctgacggtaatttttgagcagtgaattactttatatatcttaatagtttatttgggaccaaacacttaaacaaaaagttctttaagtcatataagccttttcaggaagcttgtctcatattcactcccgagacattcacctgccaagtggcctgaggatcaatccagtcctaggtttattttgcagacttacattctcccaagttattcagcctcatatgactccacggtcggctttaccaaaacagttcagagtgcactttggcacacaattgggaacagaacaatctaatgtgtggtttggtattccaagtggggtctttttcagaatctctgcactagtgtgagatgcaaacatgtttcctcatctttctggcttatccagtatgtagctatttgtgacataataaatatatacatatanaaaataaaaaaaaaaaaaa

SEQ ID NO: 236339 - DNA, 494 bp, Homo Sapiens
  misc_feature (6)..(6): n is a, c, g, or t
cttccntgcccccgcccccttctcagagcctcctagacaataggccctttggaccgagtttctcagggatgcccaggccacccctcagctcttcttagcgctggtctccagtcctgccctgggagctggagcctgggtatttggggacatcttgcctcagttgtatggttctttcctgtgggctcaattttgccctacatagttggataaaactctgtgctgtcctggagagtaaagctgttcacccacacagctgggcccggcttgtgccccgtggagcctggcacattccaggctcctaggaggaggcatcagagaaagacaccctgagttttactggcctgacacccttctccagagaagacctgtgaacctgagcccaagggcaagtgtacacttgtttactgtgtaagcaagagtagaagaatgtctaatgtacagtggaaccttgtacagaataaataatagctttgagaaatcaaaaaaaaaaaaaa

SEQ ID NO: 236340 - DNA, 491 bp, Homo Sapiens
gggtaaatactgtgtttgaggtacagatgattttcataactacttcctagaacatgtccatttgaagagcagtggggccttagaccccaaagtccatttatgtgtgggcaaataggaaatgttgcaaacaaaacaaagcactagatctaatgtccagtgaaatctggaatgaactagtcattagagccggttctttcatgccaggaaaaagttactcagccaaatctgaactactctcctgcagtttacacaggtggtatttaattgctgtctgtatggaggcaggctaggagcaaggctgtggacttgttgtgattgtcactagttaatcaagattccctttgtggtgcttaagaccctaaaaaggacactaggagctgggcatggtggctgacacctgtaatccaagaacttggggaggctgaagtggaggatcgcttagcccaggtgttcaagaccagtctaggcaagatggcgagatcccatctcta

SEQ ID NO: 236341 - DNA, 533 bp, Homo Sapiens
cagcaagatctgattcagaaatagttgggagcagaaagttaatatgaaggagttgctacttgttaacagcctagagttgagatctagaagaattattacctttttaaatttgtgatgaaagcttaaatccagcatttgggaagttactctattggctgaactattttggagtttgtaagctttgtattagatattcctgatttaactgaaactaatttgccacatagctttaatttcatcccagttttacttgttttactgtcctcaaaaactcaagacatctgaactcaaaggatctaagcagtataaattaaagcacatgttgaatcactgtagctttcgtaggacatctgattataatgcttttctttgtttctttgtccatactgaacttgtctagtttatctttgagaaacatttgctagtatcaaaaatcttctgtaaagatttgaacaatcttgaattctccttgtcactagccatctcttcccctaaagtataataaaactgtcaggtactaaaaaaaaaaaaaa

SEQ ID NO: 236342 - DNA, 544 bp, Homo Sapiens
tttttttttttttttccaggaaaagtaattacaaatgttttgccaagggcacgtctagcatgtctcccagaaatgggcctgccttagtatcccttccatacccaggaactagctagaaggagcctcaaggaatctggtttcagcataaacatgatgatggatttcagtgtcacagctgggagcccatagtcaattctgctttctgtaaatagaggtctgtggggtgccttcttatgcacggatggcattgtgattcccatttaacagagtaagcaaaatttcagaaaaattccagggtctgcctgaagtcaaagccaagaggtggaagagtcaggatgagaatccacacctcttaacattcctcccaagctccttcttaggtgatattgggtcacgatccagaggtggaaagaaatggattcttaggacttttttttttcttattttcattcatttattgaggcaccactgcacttggactctaagggcatttggatttaacatcccaggataggaaagcagggctgtgtgcttcaaggtcaag

SEQ ID NO: 236343 - DNA, 533 bp, Homo Sapiens
gcttctttctcatttccattgtttttataaaaatattttggtattgttgcctgcattttagccacttctaactttttgtattatgaatttggagaggataacaagccaactttagaccctctgccagtggcgatggtgtttttcttccatgggtaagccattgtgaatggaggctggtggagcagcacactgtgtgaacctggcagcgctcatcttggcttgtttagcagtgcctctgtttacaccataagatgttccgcatgtgtccaaaatttcgcctgctctgaaaaacatgcccccgaggctctgtgcagtttggggccttggttcccacctgcagatgcggtcagttgcctggctcctggggccagagtttcctctgttacttgttgagtctcttgtcttcactgtcagaagctgaactgacttgggggctttgctgttgatccactttagcaaaccctgctgcagaggactgtaaaaacaaataactaaaaataaacttagaaaatacaactcaaaaaaaaaaaaaa

SEQ ID NO: 236344 - DNA, 528 bp, Homo Sapiens
gttgtcttttattagtaaatcaaggcctcatagcacattgttaaataaagtggttgactagtctatgtaacagctcaccaagctactatctcttttaactccttataatgttgcgtcattaaaggtcaaggggtcatgctattaatctcattgctatagaccattaacatgactgaacttttccacaaagtacttatgtttacaatgctataaccctttgactgctgcggcaacctttaaccacacaaatgtcacaagctagaatcatcagcatggttcttgccatggcaatcaaagagttaagggctgtgcagtgatttgttttgtatttattaatttatatttattttgtttccattcaaggaggggattaggggtggggcagtttttgtctgctgtaagtgtcttaacctagggaagggttaaatggctttttatactattgcatcttctgtatttaccatcaattcattgtgttgtaattaaaagaaactgtcaataaataagagaacagaaaaaaaaaaaaaa

SEQ ID NO: 236345 - DNA, 555 bp, Homo Sapiens
tctcctttttcctcttgtgtctggcctgtgaatacagctgactgtatacagggttactgttggggttattgtggggcagtgtaaggtgatgaagatctcactgacttagtgttgatggcttgagtttgagtcctggtattaccactcgtttgttgataatcttaggtaaataaactggcattgctaagccccagaaaaatgtatttagtggaacagatgaaatatgattcagtggttaggaagttaacttctgaagacagacaaacctaagtttgaatcatggttcaccccttagtggctttgtggccttgggcaagtttctttaattttcttatctatactgtgaacagtacttacatcataggtttggtctgaagattctgtgagataatgcatatcaagtggttagcactttgccaggcacattgttaagtgcccaataaatgtgggccaaatgtgatagctcacccctgtaatgccagagctttgggaggatcctttgagatcaccctgggcaatatagcaaaatcccatctctagcaaaaaaaaaaaaaa

SEQ ID NO: 236346 - DNA, 483 bp, Homo Sapiens
aattaacctcatattaaagggagtctcctgaatgtatcctaaaaggatatctgtggcctggacttgaattgcttcctgatttctgtgtgtctctgtctgttgcctttgcataacaggtcactttaattatcaagtgacccggtggctacaaggcactcatgaatgttgcagtttactgcaaggataggtgacagagatagacagcccaaaagaatggctcaatgttgtggtcagggttcagggcaatagaaatgccatagagccaagaagaagaaagcaggttttactgagagttctacctgttgggcaaacagacaaggaagtaatcatggttaatggtggtaacctttataaatatgttataaaattaattaaattatttcaatcattatgtaacatgtattatgaatcgtaaatgctgggtgcaaaacatggtattaaaataaaaactataaatatatttatttacaaaaaaaaaaaaaa

SEQ ID NO: 236347 - DNA, 522 bp, Homo Sapiens
  misc_feature (474)..(474): n is a, c, g, or t
  misc_feature (502)..(502): n is a, c, g, or t
  misc_feature (509)..(509): n is a, c, g, or t
  misc_feature (522)..(522): n is a, c, g, or t
tatatttctatttattctgtggatggactctggtgacagttgacaagcattcaaccagtttgaataagggcctaatccttttatctagtagcttagcgaccataactgagagtcaccgggtgaacgctggccatgccagaaagactaaccatgtgatctggggtagggcatctgcgtcatacagtatcggtcaacctggagactgagttcaaccacctgggcaatcaatcaatcaatcaatcatgactaggtaatggagccccaataaaactctgaacagtgggacacatgttgatatttcatatccatactggaagggtaacatgtcctgattttataggaaaatggacacttcacatttgggactcttctagactcttccctatgcatctcttcttttgtgagattttaatgtgtatctttagcccataatacactgtaactgtgagtacaatagctttcagtgagtttttngagtcttagcaaattactcgtgccgaantctgggncgcgagggccaan

SEQ ID NO: 236348 - DNA, 684 bp, Homo Sapiens
tttttttttttttttactggcaggtagcctggttttcagaaacaacgatgaatgatgcaaatatctagaattcagtgagtatttatcatagaagcaacagcaagaccactactattgctatatctaagtaatatcccagttaattgtcctagagtggcagatggtctgctagaacaagtattcaatcacaagtgaggagatgcagctcgtttaccagccctttctacctcacagctatggtgagaaaggaatgaagaccatctggactgcaaatgcttggttaaatgtttatcatgcattttgtaaactgttaaagtctacaatgttaattgagtctctaggaaaggaggggaaactaactgaatgacctagaactaaggctaacatttttcacttataataaagagccttatttcactaatttgtaaaaagcacttgtatataatataaactactccaagtatgggtaaaggataaaaagtagctaaaaagggcactcggggtaaaggggaagaaagtttttttctgcatgtatcatataatgtaggatattagcttgggaaacagggcaagactctgtctctacaaaaattcaaaaaattaaccgggtatggtggcatgtgcctgtggtcccatctacttaggatggctgaggcagaatgactgactgagcctgggaggttg

SEQ ID NO: 236349 - DNA, 431 bp, Homo Sapiens
ctacctctcccatagctttcagttctctgagctgtttactttctacaaaaagtgggaaaatgaccccaaagtcctatttctttttctggctggctacactgtgatgctgacaagagacagatcggctcatgactttcacctgagaggactcaacgaggctgggaggatcagagagattttgaagccagacaggtgcacggtgagtgtgagtcttggcatggctggggtgggaggagggaggagagatgtcccgagtcaggagcctgaaccccaggtgcgtctgggctggggccccctctggtgtcagccaacaccgggctctaagacaagagattgctactaaagagttgaagcaaagagaagttgatggaaaatagcccagctctctgaagctgggatccaaagggtaaaaagccctggatttccaaagg

SEQ ID NO: 236350 - DNA, 688 bp, Homo Sapiens
tttttttttttttttacattttaaatagcttttattagagtatattgttacaactctttcatcttattagttctgctgttaagtgccaaattcataaactttatcatagggatatgtatgcataggaaaacaaacagtatatataaggttcagtactatctgcggtttcaggcatccactggggatcttgcaaatgtatccaccacagataagggcgggggtgaggggtggctactgttaagtcacattgtgacattccaggtgtacatgaaatttggagggacactattcactatatcacacaagcaacataatgcctcttttgacacagtaagattttaaaaaaaagactctcaaactttaattcagcttgataaaattagaattcttcttctggggaattttctttttgagacaggatctcattctgtcaggccggagtgcagtggcgtgatcacacctcactgcagcctcaagcaatactcccacctcagcctactgactagctgggactacaggtgcactaccacacctggctaagttttaaaatttttgtagagatagggtcttgccatgttgccaggttggtctcaaactcctagcctcaagcaatactcctatctcaggctcccaaagtgctgggaggccaaggtggacagatcaccagaggtcaggagtttgagatcag

SEQ ID NO: 236351 - DNA, 554 bp, Homo Sapiens
aatactgcatccttttcttccgcagaactagagtcagagttcggcagctgcgtacaaaggcctctgccctcggcttgagcaaaagttgtaaataactagtatttattaagcacttataagcagtttttctcacttagtcctggctccagttctagagttcctctttattgcttttggtgaaagtttggggttgggggtacacctcagaggttcagtaattcacctggagtcccaccctgaacagagctggacccagagccacacacgcccgggaacacacactgtgctggggaggaagtgggcctaggagggcctgcaggtccaggcagctgtagagctgctagaagctggggtgttgctctccccgctttctcatagacacagaggtactgtctgcctgttgtcacacagttcatatgctcgcttgagatggaatctgaaccttggtcccaggatctgtgctttttcccactttgccacactgtctaaggtggctttgaactggaacccaagtgcaaataaaggttggtattcgctcctaaaaaaaaaaaaaa

SEQ ID NO: 236352 - DNA, 371 bp, Homo Sapiens
tttttctttataacagtttattaagccattaaggaaatcctgtgtgcacataggtggtttggcagcaaggatgctgtatgtgctttctgaagctggctagctcccgggaggaacgatgccaggttggtgggaggcggccgagtaggagaaggaaaggtttcacggggtactgccaattgcttgtttaaagatttagagggcaatgcacctcacaccccataattatcccctccctttctaagctctgcattccagcttgaagtcccccggatgacactgggtggggcgccacgtctctaccgagcttggcagccacagcagttctggagacgatccaggaagagaggcaggtaaaagagtccatcaagtca

SEQ ID NO: 236353 - DNA, 670 bp, Homo Sapiens
tttttttttttttttatgccacaggcatgcaataaattcccatttattgacagtctgaccttgctggcaggatggttccaaagttctgttggaagccagctctatatcctcaatctagcaagatgagcagttttccagggcacaccatggtaagggggcccacccaatcctgcccatctgatcccacaggctggcccccggataggtaacttggtggcaactctagtctctcatcatgtacagggggtaaaccagttcatgcgaagatcatgtattaagctgcctaacatatacaaaaacactgctaggtcctgaggaaacagagatgaataaattacagtcttcctctgaggagtttgaaattagcaagggagacagacacataagaagtaaaataacactacagtgagatatgctataaacaaacctgggaggagatgtaagggaaggctttatagagaaggtgacatttgcactgttcaaaaaaaaggataaggccaggtgcagtggctcatgcctgcaatcccagcaccttgggaggtcaaggcgggcggatcacgaagtcaggagttcgagaccagcctggccaacatggcgaaaccccatctccactaaaaaatacaaaaattagccgggcatggtggtgcgcacctgtagtcccagctactcg

SEQ ID NO: 236354 - DNA, 678 bp, Homo Sapiens
tttttttttttttttctgagagaaaaagagcacaagctttctgacgtgaatgtgaaaactccgttctgaagataccctggtgcttttaccccaagtggataagcatgaataaagaagcacaaagaaacactgtcatcaatcagaatgctcttgcctacacttagctacaggtggaaagcaagcaggcacgatttgatttacctagattaaaagagcaattttctatcttccttttttccttttaaaaatagccaatcgattttggcctagctattgctgactgtacaggtccattttaatacaccactgattaaacggtatgttcatggctgaaggcactacagcaggaacaaacagaagcagctgaaggaagggggtgggggacaggcgagagctccaaaaaacactccacgaaggccacaactactcggcacttcccccgtagacagttgatatagcacattttaggcttgaaccagctataattctgggagtttgaagcctggaattcatttagctttttaattctgaccttaagaataaaaaaaaatcaaagctatgttttttaaaaaacacaaatgagggaaatattgtgtcctaaactgcaatgacatctgaaatgaagatgtgcctcagaaagatgcttcttatgaaacacttgaaatttcataagttata

SEQ ID NO: 236355 - DNA, 451 bp, Homo Sapiens
  misc_feature (15)..(15): n is a, c, g, or t
tctcctcccagagcncctggtcaggatatcccagtcatcacctccgggaagatgatgttccctggatagcccatacattttctcacctccatacctagctaacactgctgcatcagtcccaatgaccccacttcccatcctttactctctgagatctggatttgccttcaagatgcaccccccatgccactttcttaaggtagtcttctcaactccccccaaagaatgaactattatttttggggggcttccaaagcaaattgctttgaaattccaaaagatcatacattctgttttaatcatagtgggttgttaagctcctgcactagactataatgctacttgtggatagggactatgatttgtttatatctgtaacttccgtctcttgcctcttttccccagcatagagcagaatgactgccatacagtaaatcaaaaaaaaaaaaaa

SEQ ID NO: 236356 - DNA, 436 bp, Homo Sapiens
actgtcacccaggctggtaggtgggaatcttaacatgttactttcttaggagggaaaagtgacaattgtcggcaacttactcctttcctagacttgatgataaattaaaaaaagaaaaaaagcaagcaaacaaggtccctccagtagtcctcttcactccccacaaaccaaaccaaacatcaatcccccaattttttaacaatgaaagttaattgaaggaatgtatgaatggacagcaaaatttctatcgataattactcaacattttcaaaacaagaagcattttacaactactatcatatatgtttatcgcatgattttagaaagttctgttggggccatcaatacaccatcctaaaaaataagcaggttcaattttcatttgtttccatgctccaaactttgtaaaaaaaaattccaatcaaaaaaaaaaaag

SEQ ID NO: 236357 - DNA, 852 bp, Homo Sapiens
  misc_feature (31)..(31): n is a, c, g, or t
  misc_feature (56)..(56): n is a, c, g, or t
cttaattaaagatcttttttttccattatcnctgtttttattcaatagtggaaccnctagccagcaccaaaaggcaaaaataaataaaaataaaaggtataaaggttacagagaagttaaaccatctttattcgtggattgcaagattttgatcacagaaattccgaaagaatctacagagtattacaaataacaagggaacttagcaagatgcttgcatataaggtcagtatgttaaaatcaatattgtttattcttacgagtagaatataaaaaagtcaaaatgccatttaacattgtatacaaaacactaaatactcaagaataaatctaatgaaagatatatatgatctctatactgcaatctatccaagcacagctgcattaaaatatagatatatgtgcaatctacaaaatattgccaggagaaattaaagaccgcttaaataaatggtgggggaagaatgatattcatggattgaaggacttgttgttaagatactagttttcccaaacagatctatagattcaatgcgagcccaataaaaaatcccccccctttttaacaagctaattccaaaattcacctagaaatacaaaggccgtagaataagccaaaacaatcttgggagaataagttacaggacttaaagatttattataaaactacattaaattaacatagtttggtactggtataaagttagacaaagactactccctcccgctcctcaatctgcccccatccctagaacgtgctggcagctttctccatccgatctgcaagggttaaagggcgctgaggaagggctgaccgactggggtgggaaacaaagcggcactgagataact

SEQ ID NO: 236358 - DNA, 486 bp, Homo Sapiens
ctttaaatagacatcatctcaagtctacaagaattatccaaaatggtatttaatgacatttctaggtcttcagacactattaatgcagattgtagcctctaggtcctgaagattttactagatactggttactgaaactgagctttcttgaattctttttccttccactgtggtttcccgcatttcaacatatcacctatttttgtcctcaaaggttacttaaatgttttccacagaattaaattaaatatgaatcatccctcctctgatttttgaaatgaccctttgcttcctatgataatgattcttctggtccgttttgtagttatatgttagagtttgtaaatagtcacacattttgcaactgcatgtaattttcttattattttttcctcttcctctaaaactgctgttatttcttttaactttttgtgggaaaaattaaacccatctttcactttgttatatacttaaaaaaaaaaaaaa

SEQ ID NO: 236359 - DNA, 510 bp, Homo Sapiens
tttttttttttttttctgaaaaccacttgctgaaatagaatgcctcttctgaatactgatgtcattagactatcaatttaggttatattaaattttttcaggatagctatccttaaatttcaaagcatttattggccaggtttctaaagtgtgatagcatcattcaccaggaagcagggaatttagaatcgaggtgacaccggaccacagagtgagtctctggtgtagaggcaggaatatgctcagtaaggtagctcgtcagccataaggctgcccaggagtgaggcttcctctgcagggtctcacgggtgccttctcatgccttttactggagccatatctaatgactttaaaaggttaaccctggatctgttctggtgaacttcatccatgtttgtaacatcctagaaagtatttattctgagaagctgaaaaacaaaaaaagatcttcccagatttctgaaaatggggtggatactgacctacattcagtgttctagattaaaatca

SEQ ID NO: 236360 - DNA, 474 bp, Homo Sapiens
catgctccatattataaggctggagttgtgtggatgtcttttaaagggaagggaggaggaagaggcaaactctttggttttaggcttcttggcaggtgatttcctatttatccaattgatactcagaactgtgtatcttagtttcatgctccccagcttgagaggagccacaggagaaaccaacatgctgtttccagggcaaccaggcacaggcgagtcctttcctcatggaggaaggcttggtcccatgtggggagcaccacattaaaggcaggccttgacacagctctgccatttctgaattgtgcgaccctggaacctgctatcggctcaccatccttcactgtacaacggggaaaacacaccctcttaggactgctgggagaattataggagacagtgagtatagtctgctcagagcagagcatctgaaccacagcaggcacaaagcaggtatcagttctttccattttg

SEQ ID NO: 236361 - DNA, 497 bp, Homo Sapiens
agctatgggcatggaagttcaatcagtgcattgaagtttttcctttatctctcctatggttaatggtttctgcagaaaaggaccaattgatttctttctaaaacgttgcttcagggtgtagagacctttataggtcatgtttcaacttacagaaaatttttatagttcaaatataaattaagttcaatgtggaatttgtaatagaatttcaggtgaagtaaaatttccactttccttaggctgtttgcagtgcccagcaggccccatgatatcgagatggaagttctgttaaaggaggagattgatcagggatgggcagaataaggaatatgggcagctcaggctaatgatacaatgattgagatgtagaaagagggtcaggcacgggataacgcctgtaatcccactgccttgggaggccaagacaagagaatcgattgaggtcagaccagcctggtcaacagagtgagacctaacctgtacaaaaaaaaaaaaaa

SEQ ID NO: 236362 - DNA, 615 bp, Homo Sapiens
tttttttttttttttaaagaaggaagaggtttatttggccaggagcattggcagacttgcatcttaatagctgagatccctgaaaaagaaattcttggcctttttaaaggcttacaactctaaggggtccacgtgaaagggtcatgatatctcaagcaagcggggaacgtgactgggggctacacgcatcagctaacagagcagaaagttttgcaatgctttttcatacaatgtctggaatttacagataacacaagtagtttaggtcaggggttgatattattattattgttacttttttttaactaccagggccgggtggtgtcgccaaggtcttctggctatttatcttacttctgttttgttttgttttctaactttttgctttctctctttcctcctgtcttgtaaactaggcaaggtggggggaggagggcagcaggagtagtagtggtctccttcttactgtgggactggcccctttggtttagggtatcaccaaaggcagtgtctaggccagcccagtgtctctgcccagcaaacctccatctgctgtgcactcacagccaggccatgctggtgtttggtacaggttgggtgcatgaaggatgaagg

SEQ ID NO: 236363 - DNA, 753 bp, Homo Sapiens
  misc_feature (124)..(124): n is a, c, g, or t
gccagggtggtctcgaactcctgacctcaaatgatctgcctgcctcagcctcccgaaatgttgggattacagatgtgagcctccgcaccctgcccaaacttttaactggaaaagagaaaaaagncaaataatagaaataacttgggaaaagtatattctctttaaagtattactttttggtcagcttgcaatgccctttacttctttcttcctgttacatgcctagctcaataagtaagttaggccccctgctttggaaaactccatgttcacctactctcatgctccagagagccaagtaaacagataaaaggatcaagcgggaagcagacctctcaggagctggaggcctgtaagcccaacaatgctttaggctaaacagactaaactttatgctaaaccgtgtgaaaatggacaagtgagatttcctgaaaacaaaatccacagctttcatcagattctataaggggttcacaaccattcttagaatggtcccctcttggacttccaatccctagaggatgggactagattaatctagactaacactaggtcatctaaaactataattgtattttctctaaacaagtttttaaacagctatctagtttagtccacatcacatacaattcacctcatttaaaatgttgttagtgattttaatctcatttcaaaatgttgttagtgaactatgtttcaactttctcatttatattcatatccacagaacacctgaataaaagtaacacatat

SEQ ID NO: 236364 - DNA, 452 bp, Homo Sapiens
  misc_feature (15)..(15): n is a, c, g, or t
  misc_feature (21)..(21): n is a, c, g, or t
  misc_feature (56)..(56): n is a, c, g, or t
  misc_feature (60)..(60): n is a, c, g, or t
ttgccggctcccctntcaggncaacccagatgtgcaacaaagtgcgatggtaagancagnccagggtgccggggccttcaggtcacttggggagaagcgcgtcacctcctcgcccaggcccgcagcttagtggctcagtttgctggagatgcgcagtgtctgcctcagcagtctcagcagtttctaactaaagctgactttagttagaccgaaaccgaacacatggcatcctgccaggatgacctgaagtcatcctcacctttcctttccacataaagccggcccatacaccttttctttggaactaacccaccagatcttagaagatgtacacgtgcttctttcctttttcctactctacctggctagtctttagatatgtttttcttcgtatgtggtgtttatacatttcacatgaatatatcaaacttttcattcaaaaaaaaaaaaaa

SEQ ID NO: 236365 - DNA, 681 bp, Homo Sapiens
  misc_feature (61)..(61): n is a, c, g, or t
acaaatcattttcttccttttttagatattagctctaactggttccacaaaaagtacttanccaaactggtgctcataatacacaatttcaatatctgcataatgtagaaaaataacatttgcttttatgaatactcatttaacctacctaactaaaaagagagcacggtacccataagtctttaaaatcaacaatctttgttacagtaaataaggtaaaaatgagagatagaaaaggaaactgacatactaggataaaggaatctgcatagatttggtgtgctctctctttatatattttaatccaatacagtaactcagtagctagatgattaataagcaccggccacactactattagaaagaggcttcttctagaaattgatattacggaatgctgtggtactcaaggtgtttatgcagcgcactgtcagacttccaatgataacggaaaagggttaaaagcagatgcatctgaattgtactgtggcaaactgccagaagggtatcatctttagcataaatgatgacaagggttactttaacagggcacccaggatccacaattagtcctacaatactaatgcctctataagctctgtcctctggactcacagaatcctaccaacttctgaagatgacttagtgcacaccaaccgtagctaaaaatcaggatttcct

SEQ ID NO: 236366 - DNA, 699 bp, Homo Sapiens
  misc_feature (9)..(9): n is a, c, g, or t
gccttatgnaaaggctaaggtcttttcctaggtcccctcccccaggaccatcatcacaggtcaaacactgtttctgggaaggccagtgccccttgaaggtgctccctgcttcggaagtgcctaaacacaggaaacatgccctcagacatgggggctgcactttgttataagacagttctcatcctatccagacacaagaacattctaacataatatccctgcagttcttccacaattggtccccagagctttggaggcaaaatgtcatctgggtgatgtcctttctcctacagccatcatcaggcttcagctgcaagctgtgaacatatattaattgctgtcagcagcaggtccctttctttgagaaatcttcaggtcctgaggcttccatctgccagccatgggccatgacttcctctctaggggtcagcaaactttatctgtaaagggccagtaaatattttaggctttgcaggccatatggtcttgagactgttaaattctgctgttgtagcttgaaagcagcctttgacaatatgtaaatgaatgaccatggctgttacccagtaaaactcaatttaaaatacaggtgaggccaggtgtggtggctcaggcctgtaatcccagcactttgggaggccaaggtgggtggatcgcctgaggtcaggagtttgagactagccggccaacatagagaaa

SEQ ID NO: 236367 - DNA, 432 bp, Homo Sapiens
  misc_feature (2)..(2): n is a, c, g, or t
  misc_feature (12)..(12): n is a, c, g, or t
tntttttgcccnagctagagtgcagtgatacaatcatagctccactacaccctggaactcctgggctccagggatcctcccacctgagtagctggcactataggcttaaaccaccacagcctgccttagcaccatccttattcccttgactatcctgtactctaaataatctaccagaaagtggaacttcctagcacctccactagagtctgaacatgcagagtaagaactactacatggagagtaagaaaagataacaaaatgtataagagtcattaagaagataagagaggaagaaggaattaataggcaaatgctaatcacctatacagttgatggtacactggaaacatcacaatgaaataatctaagacttgggctactcagtgccataattacaaagatgccctgcagagtaagtttctagtggtt

SEQ ID NO: 236368 - DNA, 532 bp, Homo Sapiens
tttttttttttttttcaaattttttaataaagcaaatggctgggaaaaaaggtgagaaactgctcgcttggatttaagaactgctgctacttgctgtgtgacctggactagttttttgtttgttagttttatttttatttttgtttttttgctgggctttaccttggttttaattttctgaacttcattctgctcatctgaaaaatgaaatactaatgtcttcatcttagtgtaatagggatgattaggtaaggtcaaatatatggaagcatcttgtaaactgtaaaggtatgtaaaaatgtgagggtttgttttttgtgtgtgtatgtgctcttaatgcccaagatgcagagtagaaattaggcagctgggatgccaaacagccaggatgcaacatattggagagaagagccagatatctgaggaggaagtcacaccatcattgccatccatgttgtgatagtcaacagaaggagtaaaaagagacatcagaggaatgaaagggaggaatgaggattgggaaggaacgaaa

SEQ ID NO: 236369 - DNA, 574 bp, Homo Sapiens
  misc_feature (565)..(565): n is a, c, g, or t
tttttttttttttttgctatcacattcaggctattcttaagcgtttttctgccatgatcacattgtgatgaagaacatgatggtcactagtaggtaactttctgtgtcattgccttactctcagtgaggtgctagtggatttacctacccctgcttttgcatcaccactgtaaatctaatagtgaaaaggcaaatgatgtctcagtatcactgtgaaaacatttttcccttggaccagctgaaagcatcttgaggagcctgaaggcttcaaggtccacacgtcaaaaaaacacagccctagactgatggtggcccattatgggtggggtcagcttccccctagatcacatgggttctgttgggaggggtggcttgtctgcatgaccatcttagtcacctcaaggagggaaggggcaaaggattgccaagcatctactgcgtaagtagatagctgtaacctctgggtaagaaagtgggattgggtgcggcatgagggaaatgtccacatttcattcaatattcaaaacataggattgcttacactttttataacaggaatgccttncttgtttta

SEQ ID NO: 236370 - DNA, 308 bp, Homo Sapiens
tttttttttttttttggtcactgttgcctctgaacagatgggaatttcctcctcttaatctgatggcaaaaacttcaaatgggaagaactttctggcatggatttacgaagagtgcttacatctattccaacaacatggtgtgggagtatttcagcacaggctggaacagtttcaggttcatcattacctcctgagaatacctttgataaataaagactcatagaaaagtaaagctaaagtctcaactcttgaaaaggcagcaatgattttcttggttttaacattccagtcgacgcggccgcgaatt

SEQ ID NO: 236371 - DNA, 527 bp, Homo Sapiens
agctccattgccatcagctacaaaaccttcatgaagactattggagaaattaaaaccatcatccaagtatctttttcatgtttatttaaatgtaataatacagtttatttttcctgaaattatttactttttttttttactgtataaatgtcttttgggatgtttccttaatttatttaaataactaaaaatgcctattacttttgtcaaaactcataatttactactttgtatgtacctttctttctcctgacaaatgaggttattttatatgagtctgtctgagagtacagtaaatgtttttagtacataataatttaactgtttcaggtatttaaaaaattaaagatattatcaagggttttggacaaacatatgagccatttttttgtcattcaaaatagtaagttaaaaacaagagaacaaaagaaaaaaatagttaaaatcattaatttttttatttttcaaactttgtaatgttatgttttcaaataaaaactatctcaaaattttaaaaaaaaaaaaaa

SEQ ID NO: 236372 - DNA, 284 bp, Homo Sapiens
  misc_feature (264)..(264): n is a, c, g, or t
agtctgggattacaggcatgagccatcgcacccagcctatggtacacctttactgaggaaacaattcaggaacatcactcttagtaaggcaattgttgattataagtcaaaaaaacaccatcatgtacaaattcaggggattttgtataccttgtttttttggttacaaatatgcaaaattaaagatgtttgctaatacttgtttccaatttttaaacttttcaagtgttgcactgttaataatgttaaaataaaaggcatttnacttagaaaaaaaaaaaaaa

SEQ ID NO: 236373 - DNA, 685 bp, Homo Sapiens
  misc_feature (49)..(49): n is a, c, g, or t
acacccgtggctctagcaatcctcccaccttagcctccagagtagctgnaactacaggcatgtgccaccgcacccagctaatttttaacttttttttttttgtagagacagggtcttacaatgttgaccaggttggtcttgaacttctggcctcaagtgatgctcctgccttggcgtcccacaggtgtgagccactgcacacagccctttattctttcttagcagtgcataaaacagtggtgtttgctaaccactgatggcatcttagacttaatgaaatactaatagactgatgaaactgtatatttaaataaaaaattatatatatggctataaacatttttcaaattataactactggcccaaatgtttacagcatctttaatcacaggcaaatcccactttggtagaatttgttaacatgtggtttcaaacttaattccttctaaaattatttttcttggttattatactatcaagtaacccaaccagttatttgtcttttctaaattgtaaaatggtctcagattggtataggaagagtgactaaggaggcgactaagaatgaaactatcctcgatctatgaataatattaagccctaacattttataagtgccagggatcacttaatccaaacccttttttatagatacagaaactcaaaccctaagtgtaaagatgtt

SEQ ID NO: 236374 - DNA, 483 bp, Homo Sapiens
aagggaataagcttgcggccgcaaatctttttttttttaaatttgaggtccatacgacagatgaatcagaaagggggaataaccagaggctgaaaggagtgataagtatgacttgaattaagggaaggagagatggggacaagaaagcatcaattcaaaaatatctatgatcaacaaaacctacatgactgagaatacagctaaacactcatttcctcagggagttccctgactttccattccagggaccttgtttttgataagagatgagaatttatctggggagagttagggatgaaattaggaatgtctctagaaaatcaaagaatcagacactcagtcctggttgcaaaccatgaaatcacaccaaaccagttagctgccaaccttgcctctgcttctatcacatcacatttattcttaaaacttgctcctttctgaaatctttgctttgtcatcaaccccaaggcaacctgaggttca

SEQ ID NO: 236375 - DNA, 668 bp, Homo Sapiens
  misc_feature (661)..(661): n is a, c, g, or t
tttttttttttttttactgttttaacaactgtccagctctggttttctttggcagaaccaagtttgtttggaatccatgttaatgctaaaaaaccagtataccaaagaaaagtgaatttcaagtatctggcaaacaaattcaaacctaatacatcaattgagcttaaaaatgacaagatcactcatggaaacaaggtgactgggaaatcatctgtgtgtaaccaaatccctttcttcctggaagagggcagaggttaggaaaggctgtgactgagaaagatgataccctcgaatactaggggccaagaatgaaaagaaaacatggctttctacatcatggctctctactcaaaaaaaagtaacatccatggcttctgtataatagagatctgatttcatcagattctcaggaaatctgatgtctctaagaacctctccaaagaaccttctcttcaccttcatccccttctagctgatcttttcctcacaatgactaagattcttttcatgtaatatggatgattatgaccctaaaggtatcctttgtggggggctgccaggatagagaagtggaagagtgaagggaagcctggccactaattctccaccactttagggtgcttgctgctctgcagccaggccagactcatgtgaaactacnatttctt

SEQ ID NO: 236376 - DNA, 482 bp, Homo Sapiens
ccccctggcccattcccctgcaggctggaagatctttctcctgtctggcttctcttcttttcaattcgctgcaccaagtgcttccagtggcccaaaaatgctttttgaagtgtgttttgaaacagcccccaccaacatacaccccaccaggagtactgatcctgcctcccttcatgtctaggggaagcattcgcctttgagcacttgtttgcaaatctggggagtttgagacctcctagcatctcttcccttctttccctgcagtctattcactcccgcagccaaaaaatctctggcgttcaggttagcagtttctgggttggtttgtgtgggtttttgttgttgtttggggcttatttttttcaaaaagtgataaagacgggtgggttggagggaggggactgatgggctggtgggctttttagttttcctttgagaaaaagactggtttatttaaaacttgtccagaaaaaaaaaaaaaa

SEQ ID NO: 236377 - DNA, 656 bp, Homo Sapiens
  misc_feature (89)..(89): n is a, c, g, or t
  misc_feature (250)..(250): n is a, c, g, or t
  misc_feature (300)..(300): n is a, c, g, or t
  misc_feature (377)..(377): n is a, c, g, or t
  misc_feature (379)..(379): n is a, c, g, or t
  misc_feature (387)..(387): n is a, c, g, or t
  misc_feature (646)..(646): n is a, c, g, or t
ttaccattagaaagtttttaaacggggatacaattgtttaaaatatttacttttcatggtattatgaacacttagaaatccaaaaactncaatggccggaatcataatatgcaaatcataaagcagcctaatttgaaatgtttttctagtcatttcaagccatagtctgattttctatgattagcactgacagtgttttatttttacacactttaaaatgttaaagtctaagggacagaaatataaaaancaaagaatttaaaagcagaataaaatagcagagatagttttctaaactgntaatcattgttttaaatcaaaaatatggcttgatcaaaggaaacttctcaattttctataaatgccaaacaaaatananctgtcccnctgtaccccaacccctcaaaacaacacaaagcaagctgaatgataaaagcctatttctaaagctcatatcttgcctgcaagactgggagggctatgagaactgatggctgaaagagctttggaaaagcccacacattccatggagaataccactacctggtgggggctaggcatagcaaagtgccttcctgccaaagaaagaagaaagaatccgtatttgggatagaacaaaagaccaatattacagtgtgtttcaaancaaatgaagg

SEQ ID NO: 236378 - DNA, 383 bp, Homo Sapiens
cagggctcagccgggacgctgtggcgtgtgacgaggtgcctggccttctgccaaccaactaacccactaaccaggcccgagcatgccctactaaccacccccccgcagccagatcctactaactgtgcagctcatgggcctttcaaggggctgggatatgggggcagccaaggctccagaaggctctgcctatgggctgggatctttgtgcagacccacgttccaggacagagaatgcaaataagactcaccagctctgccacttcctgttgagtgagtttgagtaagtcacctcacttctctcaacctcagtttcctcagtggtagaatgcgagttctgataccttacaggttgcagtgaggattcccgtcaatataagggt

SEQ ID NO: 236379 - DNA, 692 bp, Homo Sapiens
  misc_feature (124)..(124): n is a, c, g, or t
tttttttttttttttaaagcatgtcagacactgctgacaggaaacaaactggtactatctcccatgaaaacaatgtgacaatatgtaccaatagcctgagaaagattcctaatatttgatctancaattatctttttagaaattttagaaaagaatccatgtgttaaagctctcttaaaatgtatctggcagttgtctggtttttactggactccccccagccccctcaaaaagaaaataattcaaaacaactaaaaacatgcaaagatatttcaccaaatcattagttgaaacaatctaaacaccaacattagtgcacaaaagcaaattatacaggcatcaaaagtaatgtgtttaacaaacttaaaaaaaagcaaaactctatgacctagcaattctacttacagaaaaaacactagcacgcatacaccagaaaacatcacaaagaactttcactgttgcaagggttgtaacagtgtaaaattttaaacaacctaacagcccaccaatccaaaaatggttaaatcagctttctcaaactgtggtctcaggacccctggatgtccccaggagcctttcagcaggcttgtaagatcctcgcttttcctgctacgtatctgttcaaggctggtgttttcttcatatgcttcaacctccctacagcccctgcggagctttttgggaactcgaca

SEQ ID NO: 236380 - DNA, 431 bp, Homo Sapiens
tttttttttttttttaaagggccgccacggactgcccggcccgccgatcgtttttattatcgagattattattaaaagggggcggggaccccaggacgcgggggaggggctggatacgcaggtatttttattaaacagattattcctgaaataataatacgcgcaagatggctgaaggtggctgtgatgagagtgttggggttgggatttttttcttcctgttttttcttttttgatctgaggataaagctctgaggcgacagcggctgcggagaccctgcccgaagcgccctcccctcccttgagaagccgcgggcagacagacggacctcggaccgagcaacgggtgcgggcccgccccggacgcgtcgcctgggcagcagccggggaccgcgggctctcgcctttctgccgacttcttccaattctca

SEQ ID NO: 236381 - DNA, 557 bp, Homo Sapiens
  misc_feature (539)..(539): n is a, c, g, or t
tagggatttccccctccaaattattcagaccaatggcttgccaaatggcctctcccaaaattctgtacagttttgctcaggtcacgccaacagggaaacctcaagtgtaggtctaattagtgtttctgggatccaaagttagaggaaaatttagattttattgcctggatctgctttaaagacaattggtgtttacaccctcttgtcagcaaaacagctagttaggtaaggacatatagttccaagtaggtaaagtcacttgattacaaatgttcttaactatcgtctctgtaattcctttatacaggacagtacaaaattgtgggacatgctctggtaacacacagatatgggttgcatatgatccagaattacagctgatattatggatgacaactgctaaggtccataaaatgaagactgtattgtattgagggatagaaattgatcatttaatgggtaacaactgctgagctcaaagatttgtgattgttaaaacttctctggcatttaatcattaataaacatctgtattgtgncagcaaaaaaaaaaaaaa

SEQ ID NO: 236382 - DNA, 384 bp, Homo Sapiens
tatctatcatgtttttttttcattctagtaactacaaataggaaaccagagggggagccccaggctgggacaaacaatggccaccccctccttgacattacagtggaacaacgtggcccctacatcctttatggtcaattcaggccccactccttcctcttcttctgctgcagtgtagggacctcaaactcctcctgctttgtttcctgtaccccaaaggggattgtctgacctagtgcagggactgctactgccaggacagtggaggagggtgtgctaggatgagatggggcttgggctccttttaatctcagtatctctcagatctgtccacctctctctctgttcttgctgccgacggcggcccacaactctggcctgaat

SEQ ID NO: 236383 - DNA, 525 bp, Homo Sapiens
gaatataaactggctcagccactttagtaaacagtctggcagtttttaaaaaagttaaagttaccatttgactcagaaatctcacttctaccatatacacccaagagaactgaaagtgttcacatgcaaacttgtacacagattgttcacagtagtattgttcatagtagccaaaaaaacacccaaatgttgaataaattgctgaataaacaaatcatggcatacccatgcaatggaatatttggccattaaaaggaatgaagcactgacgcatgctacagcatggatgtgtcttgaaaacatcatgctaggtgagagaagtcgaacatgatacagcaactccatttatatcaaatgtccaggacaggcaaatctacagaaacagaaagctgcctacggctggggaaaatggatacactgggagtgagagctaaagatatgacatttattttcagggtgatgaaatggtctaaaattgattgtggtgatcgctgcacaactctgaatatacaaaaaaaaaaaaaa

SEQ ID NO: 236384 - DNA, 458 bp, Homo Sapiens
tccgcctcggctccctaagtgctggaattacaggcgagagccacagcgcctggcctcctcgtccttttcaagtggtcacaccttccaagaaggtcgcctgagaccctcctgaggggcaggtgctcgtcaaaggggcccacgtctaggtagggtctcttgagtcaggaaagcatagtttcacggtgttctgggcctctgaaagaagaatgggctgccacccagaccgctaattcatagatctgctgctgggaattaggggaacaatgcgtccaggttaggattcaggtctcacatcttcctgaaagtgagagccaacctgggtattagaaatctaattcctctcaaatatttgccttgggaatgctcccgggcaggtgcaaccccacccccagctccacacacctggacagaagcacagattaaaccctcttttgtttgtcttttaaaaaaaaaaaaaa

SEQ ID NO: 236385 - DNA, 642 bp, Homo Sapiens
aacttggtgtgggtggaatagcaagtttctgatctaaaacaagtaatgcattgcttctataaaggtgacaacatgtaaggcagttcaaagaatgctgactaaccaaacgaaatgcagttattggattatcttgctattcatatcagcttaacttgttattacgcattgctcttaaatctgtacagcactccatttacacagagtaaccccactcttgattaatctgttctaaagtgccagtattatttacactttttttttttttttagccaaaagtctggccagttgtggcatcaggtgaagatgtcatcccagctctattatcatttacattcaccaagggaaattctgaaaattcagcacttgtccctggtccccgaaggttcacctgtccattggcagtgctaaattgagtagctattccagctcttgatccatgatagggagcacggaagggctgttcaaaggagctcatttggtaagcttggtggacaggctgggcctcagctttcttctgagaagtcacttgatccagaaagtcctgtgttgatgtggcagaagcatggtttgtctcatcacctgaaaagggaaatgagtgctgtgaatcaccaactattagtccaaagtgggacttatctggag

SEQ ID NO: 236386 - DNA, 476 bp, Homo Sapiens
cacttggcagtgtctagtcaaggagtcggctttcaggttcctgacggccaggcagggatgctaaggtgtggctcagccgtcactgtctgtgtcactgcagtggtgcggtcctcaggcttttctgcctgtctttcccccttccttctcacctgacagcgagggagagggaagcctcttagggctggaagccaccacgctggccctctccttccccgaacacagcacacggtcaactccgcgggacacgaggacacgggacggcgtctccagaattgcttgttacgtaggaagcgtgcattgttaaccagagtatttttaaaatctttttatctttttttaaactatgtcacatgaaatgaatgcgtctttgctgtctccaggtgcctttttattaattgttcagctttgtacatgggaaagataaaagcaacagtgtctgcaaataaagcaaaacagctctagaaaaaaaaaaaaaa

SEQ ID NO: 236387 - DNA, 605 bp, Homo Sapiens
ggccgcttaattaatctgaatggagaatttgaaattgtgttcatgactccttgaaaaatagttaatcctataaaatgggatattaggccaatggcatttatatattgaactttgtaattttgtctatttgaaaatgaccataaagatccatgatgtggtaataattagctattttgatgaagttcatattttcctgtgagactataaggctagtgattgagccaggccgaacacctatgtctctctagagattgtgtcattgttctctactcaccatcaatacatgcattaacttacaaagcgaaaggaacttggtttcattatttaaaaatattcctgtccagcatggtggataacacttgtaatcctcccactttgggaggccaaggcaggaggatcacttgagcccaggggttggagaccagcctgagcaacatggtaagatcctgtctctactaaaaggcctagcatggtggtgcatgcctatggctgaggttggaggatcgcttgagccaggaattcaaagctgcagtgagctgtgatggcactgctgcactcctgcctggtgactgagtgagaccctgtctcttcaaaaaaaaaaaaaa

SEQ ID NO: 236388 - DNA, 668 bp, Homo Sapiens
atattctggatgaccacaaaatccaacacctaaggttgcaggggcaaatgccagccttgatgagggtaggaatcttccagtccttccagaagagctcccgagacatacttctctgcacagacatagcctctcggggcctggacagcactggtgtggagctggttgtcaattatgatttccccccaacgctgcaagattacatccacagagcagggagagtgggccgtgtggggagcgaggtgccaggcaccgtcatcagttttgtgacccatccctgggatgtgagcctggttcagaagattgagctggcggctcgccgaaggagaagtcttccaggactagcatcctcggtgaaagagcctttgccccaagcaacctgattttgacaaatctgattaaaatgtgatgctagaacagggatctttcccagtatcttgagtgggtgaccacacttgtcagtgggaggctctgggctgccctgtcggctccttgagggcgggatgaactgctttgtgacttggaaaggtacgctgctggccagcattggagaagaagctgctgagcatggctttctgtagtctttagcaagacacaagtggattttgactttgtatcatgtcatgatttctaacaataaatgatgtttttatgtgcaaaaaaaaaaaaaa

SEQ ID NO: 236389 - DNA, 351 bp, Homo Sapiens
ggccgcgccgctgggccaggcggagagaggcggacggacttcaggggaggcccgggccacgccgcggaaactacccgactccctggaggcggccaggaccgaccctgtcccgacaaaatggagttccccgtgtggcttcagctcgcggcgcgttcccagagctcctcagtgatccggctttcggattgttcgcctttcatctcatttgccgttgtccaaattctaatttaaaactcatgtgttacttgctgtaaggttaacaaacgtacaccgcaaactggataaagggataacttttatgttgtgtatgttttaccacaataaaaataaattttgtaaaaaaaaaaaaaa

SEQ ID NO: 236390 - DNA, 325 bp, Homo Sapiens
tttttttttttttttgttatataggtgctattgtttatttccactttactgatgggtaaactgaggcgcagacaggttcggttacctgcaatagaatgcagccaacccgaatttgagcccctgagttatgtggcctctttgctcaagccccgcccccgccacctggcgccccgcccccgccctcagtcggccgcagcctgctctcaccgtagaccacaagtacgtagagcgccctcgcatggccgtgcttattggacgcctcgcaagtgtaggtgccgttatccgcggataccagacccggcagcgtgagcgtctctcccacggc

SEQ ID NO: 236391 - DNA, 356 bp, Homo Sapiens
tttttttttttttttctctactctttatcttgtcacgtttagttccatggaaactggcagagccagatggatttcagacaactaaaacatacgtggggaaagaaggagaccttccttaaaaatacaaacccttctcttcccttttgcggccatcaccgaagcaggagcagccaaaatgaagttcaatccctttgtgacttccaaccgaggcaagaaacgcaaaaggcgtttcaatgcaatatccaacattagcaggaagattatgtcttcccctctttccaaagagctgagacagaaatacaatgtgtgatccatgcccatccgaaaggttttgatgaaggtcaggttgtatgagg

SEQ ID NO: 236392 - DNA, 580 bp, Homo Sapiens
tttttttttttttttaattcacattgagtatcactcatcccctgcatggaggcttctacagaggctctatgagatgccagcccgttctggccagcagagatgaagcggtggataaaagaggccaagttcttcccataccagggggcagagagtgcacccgagacctaaggaatgagcgagcaacagctgagcggggcagagagaggaggacagcagctctgggtggggcggggcggggcaggtggggagggacggctgtgttcggggagggacggctgtgctcccggagggccgtggcctgggcctggcgagtccagacgacagagctgtggcaggttctgcttggcttctgcctgaaagtgctcctttttctctccacccccttgcctctgaggaaggcacaacttcatggaaaggacacctaatgactttcaggatcagcctttcacgtcatttttacacagagcaaaggacttgctcagtgacctccctccattccctgcagggctgcgcgtgtggaccgcagtgagagaaagcggggctgtattcgctccacactgctcgggccgagtccagcctg

SEQ ID NO: 236393 - DNA, 445 bp, Homo Sapiens
  misc_feature (422)..(422): n is a, c, g, or t
tagatgatgggttgatgggtgcagcaaaccaccatggcacgtgtatacctaagtaaaaaacctgaacattctgcacgtgtaccccagaacttaaagtataataataaaaaaagttttatgtcttcatgatgatgttaacttaccataaattaaattatttatatatatatgcatttgaaaaattaggcataacatcaaattcatctatgtcaaactccttattttacatgttaaaatattttttaaaaatatttaattctcttattcatgaaaaataattacagtttctctccttgaatgcaatgcttcctgtatcttatcctggttaatttttaagtttcctaacgatcaccttccaaaatattcaatattctaacttctaatattaattaatggagtttgaaatttatctaaataaaacnctgtaatataaaaaaaaaaaaaa

SEQ ID NO: 236394 - DNA, 431 bp, Homo Sapiens
atttctcgaatttcacaccactgtccatatgcgatgatgtttgtttgcccttgacgcacttactcatggatggtacttcttcagcctcgttagacagcctggtgatggaggatgaagaaaccatgtgcttttcattcagttctggacttagtctcccttttcttccttcagcaagttatttttgttagttccttatcaaaaagtgtacataaaaattaggcaactccaaacatgcctccagggttaatgtgtgaaataataagataatatatgtaaagtggaattagctcctaggcatagggaaagtgcagaatattgccgtgttgtcatttacagttctgttgatgtcgataacgtttgtgggtgtaattggtagtgttctgtccctccaaggagttaataaaacaaagcaaacataaaaaaaaaaaaaa

SEQ ID NO: 236395 - DNA, 476 bp, Homo Sapiens
agtaaataagtgcatcttttttgagacaaatgcagtaggcaaatgttgacattcaccagggcacagtcaatccctgacaatttcagaagttttgttgccaatactgatttatgtgggcagattctgtagtctgctgctccttctctcatggattaccttcttgttcctacagttgcacctattctacacaagagtggcattcatttgtatccaggaaagctagaacaagtagtcttttaatcttggctatattatcacagattcgacttaggatatgttgcatctgtatttttgttttaaataacaactcaagttccttctcagagttgggcatctatgtattttgtttattatgtacaaatgacctgaagacagcattttacccacttgataagttctcaaatagtctttgtttcttagtgccgtccatatcctgaataaagataccgtgttttctttcctaaaaaaaaaaaaaa

SEQ ID NO: 236396 - DNA, 361 bp, Homo Sapiens
tttttttttttttttggatgggcctcaaaattcagatcaagagaatcatcagttctgctataacgcttgctggaactgtttcaacatgatttgtacgttaaaggaacaatttgagcacaacacaacttggcatttgcttatgcatgattttatctgtgagagactctagatggatgcaaaaaactgcacccaacaaaacccagccatgtaggaatacacaaaatgtatatctgcacacacctcaaacatgtaccagctacttcagttcactgcctgttttatgaaacacacctatcctcatctggtgatacaacttttttttcttttcttttctttttttttttttttgagacagagtttt

SEQ ID NO: 236397 - DNA, 527 bp, Homo Sapiens
tcatgccctgtgtgcttattgtattcttgctactgatgcaaacattatctataattacattttcaagtgactgaaaattgcaggctttgtggaacaaaaatacagccaaagaatggaatgtatattcactccaccctcattataaggctttcagaaatcagactgtaaggcccaataccatggctctcaactacgtgatactaactccattctctgatgtttgaacactttgtcaaaatgctgggtttccaatgatgatcgtataatttgaggaaaatgctattacccttttagcgcttcatttgctccattgttgactcaatcacagtggcacctcctcacacaagtcctctatttccaccctgtgaaacaaacacaatttgatttagatcgaagcatgataggcaaagttgagaaagttggttgaggtgcatgccttcttggggcaggtgcgattgcatccctgggacattatatgtctttacatctcccagctccatatagggcttagccaaaaaaaaaaaaaa

SEQ ID NO: 236398 - DNA, 709 bp, Homo Sapiens
  misc_feature (10)..(10): n is a, c, g, or t
  misc_feature (19)..(19): n is a, c, g, or t
atcttgaaancttttatancgtttctagtcacattcagtattttaaaaataggattgattctaagttttgagtttatggtgtatttgaatattagagatattatctcttatacatttcaaagctttgctgcattctaaactcagtcctgccttagccttagtaacggcaatgaagtgcggggatagaatgttcactatttttttatgtgctgttaaaatttcatacctcctgttctatcttgaagtcttacagttttggaatggtgagtgggggaaacaagcataaaactattacataattcatgcagttttcactgggcaacagtatctatcctctgaatggtgaaatggctacttttcatttatttatttttttctctcctggggtaaagcgcttgaaaactgcaccactgggaaattgcagctatagtccatgtttcaacatagtccatgcttctttgagttggccacttactgtttactctcatctccttaggtttagcagtaaagacctgtaagatttcttctgttaggatcatctagccattccaaacatttctcttagatttgattctttcaagacaaatcaacccaataaaaatctcataaataaaggtgagctagctaccacatttggtgttctcatctgaccaaaccaaattttatgtatacattcaattctcaatccaacccagtctgtttgcctaag

SEQ ID NO: 236399 - DNA, 690 bp, Homo Sapiens
  misc_feature (27)..(27): n is a, c, g, or t
tttttttttttttttcaaaagaaccancacaaaagaacagttaagagctacctctgggaatgaaagaacagggaaaacaaaataactgactttcccccttaaattctatgtcccgtgccagtggcttatacctgtaatcccagcactttgtgaggctgaggtgggaggatcgcttaaggtgaagagttcaagaccaacctaggagacaaaacaagaccctgtctctacaaaacactttgtggggccaggcatggtggctcatgcttgtaatcccagtactttgtgaggctgaggtgggcgaactgctggagcccaggagttcaaggccattctgggcaacatggtgaaatctcgtctttacaaaaaatacaaaaattagccgggcatggtggcacacgcctgtagtcccagctacttgggggactgaggcaggaggatcacttgagcctgggaggcagaggctgcaatgagccgagattgtgctattgcattccagcctgaatgactgagattctgtctcaaaaaaacccattagcgggcttggagggacacacctgtagtcctagctactggcgcagaggtgaggcagaatgatctcttgagcctagcagttcgaggctgcagagagtagtgactgtgccactgtgttcctgctgggtgagagagtgaaaccttgtctaaaaaaaaaat

SEQ ID NO: 236400 - DNA, 639 bp, Homo Sapiens
tttttttttttttttccaaaccacattcctttcttgaatctatttacagtactgtttcaagatgttttctgaagggtgcacaggggctacattgaaaaccttctggttattgtttgctaactgctgggatggttttaatcagagaagaagccaataatttcagcttgggtgttagaaaagctcctgaaatgtctccaaactgatttaggagaaactgcttaacagaagaggacttattcctgtcctgaaacaaactccttagcatggacatatgctgtaatcacagaccaagataaccacattttttgaacatattatactccaaaggcatcttagatttctaaatattatcagtatcagatgacaaaacctgttcaacaaggaccatagcctcaatatgctagttgacagcctccgccgttagaatgttcttggtgtttggtaagttctctaataggacctactttttattacactagtttttcttaaagaaattttttgaaaggggttttattttaatgactcaggtaaaattttctgaggtaaaagacctcacatcagtctcagcagacatctgccccttcccatgatcctgacttgaggcaagtgaagggagtccctttgttgtgaggccaattt

SEQ ID NO: 236401 - DNA, 468 bp, Homo Sapiens
atgactgcactcatttttaaaagttaaccagtttttgttcaattgaaaaagtaatgtacatggaaaaaatttcatgtttacaggatgttcagtgaaaagcaaatctccatttgatttcaactctcagtcttgctcctcagggcaactgctgttactcatttcttgtgtctccttccagaaatcttctctgcatacaaacactaatgagagagctgtccacattgctttttgatttgctttttgactatcttggggattatgtttttatcataatattccattttgggatgcaccatagtttgttcagacccatatggatgaccatttagtttatttatagtcttttgctaataaggacattgctgtaatgaaaaatccctatgtatctttatgaatatgtatgtatgtatttttatgtacatatgtgatctgtaggataaatgttttaaagtacaaaaaaaaaaaaaa

SEQ ID NO: 236402 - DNA, 445 bp, Homo Sapiens
tatgaaatatactggccaggcacggtggctcatgcttgtaatcccagcactttgggaagctgaggcggtggatcacctgagctcaggagttcgagaccagcctggccaacatgttgaaaccatgtctctactaaaaatacaaaaattagccagtcatggtggcaggtgcctgtaaccccagttactccggaggctgaggtgggagaatcgcttgagcccaggaggtggaggttgcagtgagccaagatagcaccactgcactccagcctgggcgacaaagcaagactctttctaaaaaaacaaaaatgaataaacaaaaaaactatgagacagaaaagatgggtttttgttaaaataaaaaataatattgttttagtttgaaaattattcaaaggttgtttcaaaatgaatcaataaaaaacataaaactgaaaaaaaaaaaaaa

SEQ ID NO: 236403 - DNA, 502 bp, Homo Sapiens
aaaagttcaaaataaagcagcatcacttattcagggatattggagaagatattccactagacaaagatttctgaaattgaaatattattcaatcatcctgcaatctaggataagaatgataattgctgttacatcttataaacgatatctttgggctacagttacaattcagaggcattggcgtgcttatttaagaagaaaacaagatcaacaaagatatgaaatgctaaaatcatcaactcttataatccaatctatgttcagaaaatggaagcaacgtaaaatgcaatcacaagtaaaagctacagtaatattgcaaagagcttttagagaatggcatttaagaaaacaagctaaagaagaaaattctgctattatcatacaatcatggtatagaatgcataaagaattacggaaatatatttatattagatcttgtgttgttatcattcagaaaagatttcggtgctttcaagcccaaaagttataaaaaaaaaaaaaa

SEQ ID NO: 236404 - DNA, 478 bp, Homo Sapiens
cctaaccagatactgaacctgttggcaccttgatcttaaacttctcagcctctggaattgtcagaaaaaaatttctgtctttcaggaattacccagtatcaagcatattcttacagcagcacaaactaagacagggaggcttttgctatctctcctctgaattgtcacaattatcttcgaaatggtctttctactttcactttcatggctttccaataattctcaatacaaatgcatgattacataaacatttgctcaagaacctgtataaaaagactggtggatagtgactagatcctcaggatatgcagggctcaagagaaatgaaatatcttggggatatggttacttaagacgtgatactgtcacagtgaatttcacagaagatggtgctgccctaactgaggttcaatccatgtataagccagaccaatctgaagacaaataaagtatttcacagccacaaaaaaaaaaaaaa

SEQ ID NO: 236405 - DNA, 665 bp, Homo Sapiens
ttagatgtttcctcagctgtaaactgggtcagaagcttggagtcactgtccaagctcggctgttcactggctgtgtgttcttggcatgttattcaacctctctgtgctttagtttcctcagctgtaaaatgggggtaataatagcatccatcttacagggttatagtgaagattaaatgagttaagatctgaaaaatgcttagaatagtatggggcatggaggaggcatccaattattgtagctgttgttattattattattatttccacccctccaggctgcctccacaggacagtgttgtgtacttctaggtcgtggtttgtagcacagatctaaacttaagagtatgtgcttatataaatacccagcatattgacccccagcctgtctaaactcagtctcacagctcccttagcttaaaagacaagaaagggttagaaccccggagcagagaccaggcagccactgcttgcagctcatggaacattcactgcctcttcagcttgctcacctgtaaaactgggttgataatactccctctgtttgcactgaattctcaggaatgcacgagctgtttatgcaaaagggcttttggaggaactaatgaatacactgagtgaatattactttaaaaatcatcctagggagggtctgcaggcctcag

SEQ ID NO: 236406 - DNA, 566 bp, Homo Sapiens
tttttttttttttttaaatagaaaagccctttgggcagttaaagaaggaaagggaattaggtccaaaccaatctgtgggctaaccaagtgaatatacagagcggcaacagcagggtcacctagcagcctttgttcagaaagggtgagtatgccccagccagtgtttttaaaacccattaggatataggaagtactatagcttctatagcttctggtcagctcatcactgtcacgtaaaaatgatttctatggactatggaaaaagaatggaagtgacaatagaagggaagaaaagtggagagaggctttgccatgaccagggaatatcaagtaactcggctttgcacctgagctccaaaacagcaaatgagcccacccccataagatcaaagaggctgtgcttcctactgggcatcctgcaggacacaggcccagaagacccatccctgaagaaagcatctatagccaaagtccagggaatgagcttggagtttctctacatcaaacattctcacactttttggtcccttttacacttttaaagattactcattcccccaaatgtg

SEQ ID NO: 236407 - DNA, 518 bp, Homo Sapiens
tttagggtagaattccagcttttccctgtgcaagaccaatatctgaagcttgtgccttttgctgctttttccttccaataacaggatcttatgaattagtgctttcattatatttgtgtctattaagtcagactacagttttcaaggtgcttttctattctagggagatctgcagggcacttaacctacattagacctaagaggtctgagggttcttcagaagacaaagaatttctagatactttccttgaggaggtgtcaagggcaatacagacaaaagactgatgtctcctttaacagcttgataagtatctcaggatattctgcaggaatcagttctgtttctacaaagtcctgtattcccattcagcatgatatggctgaatatgtgtgtgctacgtgtgacaatggtgaagacttatctttgccctgagggctgagtgctataacactgctcaagcaataggcttgatagaagtgatgatttggagagagatctgctttaaaaaaaaaaaaaa

SEQ ID NO: 236408 - DNA, 618 bp, Homo Sapiens
tttttttttttttttaaggtacttagtaaaacactttacttataattacagaattttaacatgcaagtttcatttacattacctttgcagattgaagaaaaacaatattagtagttactattaatcttaggcaaaagccatttctttgcaagtcttaatgtccagcttaaaccaaaattacatgataaattagattacattaggtggggcacatggctacttagcaactgatggatggtggaaatgctttttggtttctttttttttatttcagtgtttctcattgaaatattaagtcacatctacatatatatatatatgatgaacttgacattctcgtcagtgagctccgtgatccacgcggtaggctagttggcatacggcgttgcgcccaggtgccaccagcctccgtgtcagctccgtggtgactcttcttacacattcttaaatacaagtcctttgtttctataggagatattctcaaagtgggatgtgaatctaagttatgaagcataacaattaaataacatccatacacccatcacttcatgcagaatgaaatatttctagtcctgtggaagctacaggactgcggaatttcttctctgatccagtccc

SEQ ID NO: 236409 - DNA, 662 bp, Homo Sapiens
tttttttttttttttcctttataaactacccagtttcgggtatgtgtttattagcagcttgacaacagactaatacaggcaggtttccagaaagcattttacctgagttcccagaattcatgctggggggtgtacggggagagaggtgggagatggtcatgggtggttagatcattgatttgagatcaaatcttttcagtagctaaatgaagacctaagagccagaataacctagattatataaagagattataaaaggaaataggcatttctaaaaatgtattacatttaaaattgaaacccataatgaagaggatgattgttttttacctgtggatagaacacagggttactgatgattacacttggctattgctgtcatttggttcttttgatcttcactttgagtcaatggaactgttcaggcattctgtaaggaggacagacaccagcgtgacactgcctcagcatttctttgttagaagcagtcatgccaggaacacactcataacgtgcagcagctacaggccaggctggctgatgagaggctgaaagcgtctcctctgtgcccttccgggagtggttcccagaaatgtcggtcttagcctctgacccagtgtcagcgtgctgttctcttgctcctccccgatgtcagggattca

SEQ ID NO: 236410 - DNA, 763 bp, Homo Sapiens
cacacacacacacacatccacacacaatatgcaaagcaaaggcatttcacaggtgaagggatagggagtgggggaaggaggccacgagagcagctaggggcttctttgacacaatgaagagaagcctctgatggtgacactccttggaattctcgtctcaaggttacaaggaaaaatctatccgtgtggactcagtcccaggccataaaacacagcaaagatagagaaatctgggtgtggggcctgggaaacgcctgttcctcactgtagaaacctgcatcagctctctctttctttccctgggacccagaaatcacctggtggatgatggggaaggctagcaccacagcaaactgggcaagtggtccgctgcacaagggggaagagagggctagtagggccgagggtagcaatgaacctcacagctagcgggcatgaggcagtctgcctttaggggcagaaccctcagggagacttgcatgtggggcactttcccgtgtaacctagggtcagagcacctctgatggaggaggggaaaggtcccatccccattggagtgtcctatgatctcagtggacatggaggccgcccccagccccagctcgttgccaactgctgcagatccttagcaccattcaggaactgtggagggggcagcgggggtagcaatgctccgccaagattgtgtcactgctccaggaggatacttcacagttggcagaaacctgcgcaactggccatatcggtctaagactcaggaaag

SEQ ID NO: 236411 - DNA, 533 bp, Homo Sapiens
ttttttttttttttaacctgtggagcacgtgtatatctatacatatgactgaagaattcatctagtaattctgacaaaaatgatagacttaaattaagtcagaagaattgggtacaaaattgggatgggtttgggagaaatttaggtaatgtcagaagctggttaacgactgactagttctgagggtcagcagttgtaaaggtctggggaggtggtgcttaagatgacctccaaggtttaggcttggatgacctgggtggatgatgccattagtcagcatagtgaataagaggtgcagggagggcaggcccactagggtagttagacagaagttcagttttggatgtggacaatgttttctcatatgtctttcatcactatattgtcagctacatgactttagcaaatactaacttacttgacttttgagatttttagcctagcctataattctgcagaacactatcacattattatcattatctccagttacttttgtattaatttcattgcattttatacatacataaaag

SEQ ID NO: 236412 - DNA, 456 bp, Homo Sapiens
atcagtgattttatgcaatagctgaagaaaattttctgaagattaagctgtgaaatgtatcaaccctcatctaatttttgtagtacaaaatgacatcctgattccttttaaaaattcacgtttgtaatttatttttctgcatgtattgatcaaataagcctaaaccaaatatgtgcaataaaattgagcctttagatagtatctagtgcattgttaaaaaagattatttctagatatttatgatgtttttgtttacgtagaaatcatgaattcaaatctgtttaaaagatgaccatattttcaattttgagtaatacatattattcctactgttttttttcttttgccatgtttctagaaaacagctgtgtaacttactgagcgttattttggtgttactgtataaaacatgcataataaatattcttatttatctcatgttaaaaaaaaaaaaaa

SEQ ID NO: 236413 - DNA, 885 bp, Homo Sapiens
ggcaagcctgtaaacattggcaggctgcttttgcaaattgtctaatgcaatatgggaggtaaaaaccaccagccaagcttcccaaatgaggaaaatctaaatcccatcgtaccgttaccagaactgaaagttaagccacctcactgaacaaatcgcatacttcatgaatacaagactctcagtacagttgaaggtgtcagtaagaaaatgcatcaccttcagcgcatgttcttacagaattgctgggaaattcctacttatggagcagcatttttcacagtacagatatttacaaaggcaagccccagcaatcataaagtcatccctgtgtatgtaggagtgaatataaaaggacttcatctcctcaacatggaaactaaggctttactcatcagtcttaagtatggttgttttatgtggcaattgggagatactgatacttgttttcagatccatagcatggaaaataaaatgagctttatagtacatacaaaacaggctggtctcgtggtaaaactgttaatgaagctaaatggacagttaatgcccactgaaagaaattcatgaaagagaagtaactgttactcaagccaccacattttgtaatgcagagttttttttccgtgaaagatttcttaaaatattacttttggccgagcatggtggctcacccctgtaattccagcactttgggaggctggggcaggcggatcacctgaagtcagagttcaagaccagcctggccaacatggtgaaaccctgtctctacaaaaatacaaaaattagctgggtgtggtcgcgggcgcctataatcctagctactagggaggccaaggtgggagatcgcttaaacccaggaggtggaggttgtagtgagccaagatt

SEQ ID NO: 236414 - DNA, 448 bp, Homo Sapiens
attttataactcatactgtggctatcaaacagaagttaacacagtaggggtaaagatatacataatgtgtacctataggtgtatttataatgcctgtgtgcagtatacagacataattacaaaatactgcattttattaatgtttattttaatattgagaattggcattcttgtaaattgaactgacaattgcttctattcagtacactttattttgagcagatatttccgaaaagagaaaaaatcactgttgacatgctttttaaaactgttttcacctgtattttgtctttcaaaaagaaaagtgatctaagttggcattgtaaagaaattgttagcaaagaatattttttttttattttttcttttggtagaaagtcatgttaatagtacaacaaagaatcaaagaataaaacataatgtttaagaacattaaaaaaaaaaaaaa

SEQ ID NO: 236415 - DNA, 545 bp, Homo Sapiens
gagactaaacgtttcttaccagacttaaagtgtgtgttcatgttcatgctggagggtagagtgaggaatgtctgacccccactgctcatcatggccagcaccagcctttcaggttaaattttagagtgccctggccgaaggggaggtccattcagatggttgtgggaggacttcaaattttatatttggtttaaaaaggagaaacagggctcagctggcatctgtactgattgatgtgcttacattcttcatgtggatgtggccagtgtcagcctggagaaaaaagaacgcttttagatttcaaaggagcagttgggtaataatgaactttaccatatttgcaaacctatctggtatctctcctcccttttcctttgaccacctattctgtctagggttaagaaaataacaaagccaattctggtttgtttttgtttttgtttttgttttttgagatggagtcttgctctctgtcccctaggctgcagtgcagtggcgcgattgcagtgaaccaagatcatgtcactgattgcattccagcctgg

SEQ ID NO: 236416 - DNA, 463 bp, Homo Sapiens
tttttttttttttttggaagaagtgtttattctacgagcagatgtcatccgcaaagtttatcaatttacaattaggaaggattatgagccaaagagaaagttttacaaaataatacaataagactagcatccaaatcgcatagatttatatgagtgtgaaaaatagggactcactttttcaattatgggaagcgtagtggggggagaaaagcaattgtgttctgtgataaatgagcctttcttagctgagaaatcagttgcttcccattttatgtactcaatttgtgcactttctattctatgctccaaaccatttctttcatcttatgaatagaagaaaattagaattgtactattgaggacatatgaggaatttattcttgaaataaattaactacaatgatgcattgttgcggtactttgatataaaatcagaaagatactgagcttggagaagcataat

SEQ ID NO: 236417 - DNA, 765 bp, Homo Sapiens
ctttaataataattgattcaggaaataattatcaatagatgaaagtttcttaggaaataaaatatgtatacaatttcaaagcatcttctccacagattacttaattacagaaaggaagggggtacttttcaatggagcaagttacggaagttaacatcaccaataatgggacaaacagacatcatgtgtatcgtgataagttgcactaagaagaacctatcataacttctgcaatatccttgccaaaattcataactgaatctaatcataagccaataatctgacaaacccaaattgatggaattctataaaaccaccagctgttctcttaaaaaaagtcaatgttatgaaaagacaaagaaaaattgaaactgaagatacatggcaactaaatccatgtcataatcctagattggctcctgaattggggtgggagggtggggagggaacagtattggaaggataaacaaaattgaaatatgactgtatattagataacagtattaaatcaattaaattttctgaatttgattattgccctaagttatgtaaaaaatatatacttgttcttaagagatatatggtgaagtatttaggataaggtcatggtcatgatgtctgcaacatttaaaattagttcaacaatgatgataatacatattatataacaatgatacatacataaatatagacatattattgtacaattcttgcaattcttctgtagctttaaatttttttcaagctaaaagaaaagtgcaaatt

SEQ ID NO: 236418 - DNA, 477 bp, Homo Sapiens
aggaccagcacggcgggcctggggcactgctctcatccccaaaaaagagacccggtggagcctcccaggggggaacatcagagccacagggcctggacgctgcatcctgggcccagatccaccagaagctccgggacttctcccgcagcacccaggcagagctggaacgggagcgggcacagctgctggtccgggccacgatggctgaagagcaactttctgagctacaggagtacgtggaccagcacctgggcaggtacaagcacgaaatcctgaggctgaggaagctggcaggtgcaggggacccctggaaagtgggggctgtgcctccagccaagccccagcatccaaggaccggcagccactaggccgtctcccaaggagcagagcagagcagagctcctcagccagcacagaaccctcccacccagccccccataaaacatgagtcaggatagaacccaaaaaaaaaaaaaa

SEQ ID NO: 236419 - DNA, 779 bp, Homo Sapiens
ctgtatttctttatggtcaattattggagatttattttgttcattcagtagggtcacatcttgatttttcaaggttgtgcaatatctcccagtctcacagagctgtgccagttgctatacgatgccctgtatttttccttagagctgtgctctgatagcctgggacacgaaatgcatatttcattactctcctttcctccactagtctcacgtattctccttggggagaagtctaaggggtctgtgctttcttccagtctcacagaaccatgggggccaccataaacctccacacaagcctcctaaaaattctctaccttggctcaagagtatgggagtcacgctgcagacaatggaggtataagaaagacatccaaggcccctgtgagcttctcaatctccacaggcatcactaaaggtgggtgctagactgaaaggcatgtccatcctcatgggcaatctcaggattctctaagtcctccaaggaggccagcaatggcttatgtgggcctgggtcacccctgccagcagggactagtactaaggatgagatccaccaatggccacagctgagttatgccaaatgagatgtccagacctcatggtgcctaggaagacagatggcagaagctcagccaggccatggagattaaaacagtgctaggggcttaatgtatgtttttaatgggtctgctacatgtcaagtttggatctggagtccagcctataatcctagcaaaaattaaacaccaaatatgatattcaataaagtgtatgtg

SEQ ID NO: 236420 - DNA, 480 bp, Homo Sapiens
tctatccagcctgtccaaactgtcatctcagcaaagaagtaaggctgaaacctggggttattggaaagtaattctaatctgctttgaccattgacctgggaatgtcctgaaagatttatgtgattttgtggaatgtttcatttacattcagtggaagtagctcttcttcccaaccgtgaatttgggaaataaggtaacagtttgtctactagttgtccttcctctataagtatttctggaatagtgctgaaaagcttaacaaaaatctagttgttaaaaaatgtgattatgttgaaaataccaactttttagaattatttatgacatcatccatatatgatttaaatcgtgaatattacgacatttgtaatgctttaccagttacagagtgctttcatttactgttacataatttgaaatcagctcttggagatgaaatgattctctaagtcattgtggtgtctggaaaaaaaaaaaaaa

SEQ ID NO: 236421 - DNA, 545 bp, Homo Sapiens
ctggcgacacactaacaggaaggcgtgctgtgttaccgggaaggcgcctctggctgtggggtgcgttctgaccaccccgctcagatgccagcattttccatttgcccttaaggaaacttgctatgtgtgttaacccagttatgattagtcaaactggaaaacacttgatcaaacttaaaattgtaaaatctgtctaacttttaaatatactttccacagttgtacttaagttcaattaactacagtatagagaaaaataattattctcttctttgcacccggagttgcaaacaaattaagtttacaaatctcatttaaacatatatctttgtaatgtaatctccgcggttctttctttgttctaccctcctgcacctgttgtcgatgtaatcattttgggaacagaaacgttgtgtctcaaaaagattcgttgtcagttcagccaagatgttctttacctgagattctggaaagatgtttatctatatcggaacacttctacattattaaatgtccttaagcttttcttttaaaaaaaaaaaaaa

SEQ ID NO: 236422 - DNA, 470 bp, Homo Sapiens
cagaatgaagagggggaccaggaacccctgtgggagaggcttagacctgaagcagtgcccactctggctcctcctgccttggctgactgggttcctggaccatgtgcatttcactgggccatgggatctacatctccttgcatccccagctggtctgatccctgccagggccccttccttcctgctcatggtcttcaggtggcctgatcatggaaagtaaggagttaggcattaccttctgggagtgaaccctgactccatccccctattgccaccctaaccaatcatgcaaacttctccctccctggggtaattcaacagttaaaagaagcttatcttaaatgtattgtattggggggtgggcagggcccactctatgttatgttaaggagttggttctggttcttggctgatgttctgtatcttaacatgaccacagtttgtaagtacaaaggtaaaaaaaaaaaaaa

SEQ ID NO: 236423 - DNA, 572 bp, Homo Sapiens
tttttttttttttttccgagttattggtgattggctttgtaaacaaaaaaaaagagaatgcaactatgaatagagagatcgaatgtgtctgatgcaaggttgtcgcagttcctgttttctggttaggcctgcattgccttatgaattacagggaatggagaacttttcttgataataatggtcattctatgtagagcaggacttgagatgttatgataaatgtataatttctcaaaagtggtctacttgagaacacagtttcaaggagttcctctccacatttgttcctgggtaaagcagctgttcataaggtaattcagctttcaatttattttaatcggcacttcagctcaggccagcaatgtcactatgccttacagccaggatggtcccagggtgcctcggacattgagacagagaggggtgtaaaatgactgtcactgaggggtaaagtagaatctgatatgagaaaaaaacagagatatgtagaaatcacaaaagaagcatactatatttccagtgcaatgccattttaggtgaatatagaaaataattgcaaaatttcacatagg

SEQ ID NO: 236424 - DNA, 643 bp, Homo Sapiens
tttttttttttttttgtagatatggggttccgccatatcgcccaggctggtcctaaactcctaggctccagtcatctgccagcctcagcctcccaaagtggtaggatcacaggcatgaaccatgatgaccagctggataaattgtttcaggaagggttgagatgatgttgaacatcatgccctccacatcaatttacggggaaaaaaattcatcttgtttctgccgattcaagaggactgacaagagcagaaacaatagccaacactgtggtcatttcaactggttcagcttacaaaattctgactgaaaaattaaagttgagcaagctttccactcaatggctgttaaaaccctttgcacccagatcagctgtagacaagagcagagctttggatagaaagtctagacaagtacgatcaagatcctgaagcacttattcgaagaactgcaataggaactgaaacatggctttaccagtacaatcccgaagacaaagcacaatcaaagcaatttagctgggcacagtggcgcgtgcctgtagtcccagctaccagggaggttgagcctgcagtgaggcaagaccgcatcattgcactctagcctgggcaagagagccagacactgcctcaaaaaaaaaaaaaa

SEQ ID NO: 236425 - DNA, 658 bp, Homo Sapiens
  misc_feature (640)..(640): n is a, c, g, or t
cttatacataattcaaaatttcaatccatggtatattttatggtacattttgaaaagaaaatttgtaatgctccttagttacaaaaattagaaggaagctacataaaattcaggtgtcctaattaaattcaatttgattcaacacacgtattaggcataactcatacctaacactatttgataagggagacaggctccctgccatccaagaactcaacctagggagcagtgacaacagaaaccgggttgggttaaggcaaagagccatggataatgctgcaacatgagtggcacagaggggagtacacagagagagcaattaatttggtgtggggaaggtggtgatctgaatacagcagcagtttgaaagtgttccgtttttaaataaacagtatgcttattttgatttgtgactaggtgtagaaaaaagcctgcatagtgttacatatttatagtagttctttgtaaaaatgttaagtggatgagctattatgaaagtaaaagtttcattttttctcattaaaattagtactaaattactatggatcagatgataatattaaatagtactctgtagaaaaaaggtttcaagttgaattaatttatgtactgattattaatacagaataaatgttatatnactcaaaaaaaaaaaaaa

SEQ ID NO: 236426 - DNA, 612 bp, Homo Sapiens
tttttttttttttttgagacaagtgtctcactgtgtaacccaggctggagtatagtggtgtgattacagctcactgtaacctcaaattcctgggctcaattgatcctcccccttcagcctcccaaagtgctgggactactggcataagccactgtgcccggcaagattcattttctaaatctgccttatccccattctaatcactgcatttattttctttacctatttttttctgtcccaactatgtcttttccaaaatctttaagatgcatgacttaaccgattccttcaataattatttttcttattttgatattatttttgtacctccctcataaaaagcacagccatatatgtacaacaaactcagctagaagcggaagagcttacctgaaaaacatcatatttacttccaattatgaccagaggtaccggaaatgggtcaattaattcatgatcctgctaataaacatatttccttgagttgttgtaattctttattgctaggtgcttagcaatttctatttacttccaaaaacattccattttcagtctcttcatagatgtttacttaatttgcttgacatagaatttgttctaatatttaacttt

SEQ ID NO: 236427 - DNA, 714 bp, Homo Sapiens
  misc_feature (15)..(15): n is a, c, g, or t
tgctgagttgagcanctctggagatgcccagcccttggatctatcggctatgtgagataacgggttaaagaaaaataaagccactagatgggatttcctgctattagcagcagaacgcatcttcattgaaatattcattccacacattttggttctaccttgaaattccacaccacaagtctcatataaaatgagaaaatcatttcctcaacttaggaaatgaggcctatttgttgcaactctgtgatcaaacagaacagacataattatcagcttaatatatttctataggatttatactcttacaggatttatatgcacttgtactgctacgtatgtacaagtaacataaaactaaaaataagatatgcataaaaacaacttttaatttgattgaaaataaaataacagtcgtctctgacagtggagaaattatgctcaaatgattattaatttgaaatagacctctgaattatgtacttttagatttgacatttcatactgactctcagatagaacataacggagaactctccatcttctaaatgtgtctttctctgaaatctgtacaagtcctttgataacactgtattattgaagtctctggagtgaaacactatacactaatttacagttataaatacaaaatattgtagacgagatgaagaaagagttctgattgacttgctggctggtttctcatctcatgtttgc

SEQ ID NO: 236428 - DNA, 496 bp, Homo Sapiens
ggagcagagagaggggagccagggcatctccaagagctcaggttgtttagccatgaaggtgcggccagctgagctatgtgagaaaagagtgggagaggaattggggtttggcagggcactaatgtttgtgccaagctactggcacttggcactgaccagggctcaagggaatggggttagatatgggcataaggttataataatttttcccccagaaactatttcattatttgtgagattattatttaaatgaatacccaaacctaaagcaaaaactgagaatgtcagcttagtacttcagacaattgactttccgtcagcaaaccggggaagacaggttctcctaagttatccaaatgcaaataggaatttattttatctttttatttttgaggcagagtcttgctctgttgcccaggctgtagtgcagtggtgcaatcttggcttactgcaacctccgcctcccaggttcaaacaattctcctacctcagaatg

SEQ ID NO: 236429 - DNA, 684 bp, Homo Sapiens
  misc_feature (683)..(683): n is a, c, g, or t
tttttttttttttttccaagaggctgagctgtcatttacttggaatggcttaggacagttctgactggaggcaggagtatggactcattaacctcctagccctgtaactctgtcaatctcaattctcaccagtttcaatcagatacagctgcctctagtttcattctggttggtttagtgtggttgtgtgtgctcatgcaattttctgcattgcaggggaaagaaagtatcttcaatatgtgtctatatctgtgcatgaggcagtgtgtatggtcagtctttccttaccgaaagtctcagcataaaatgtattgatagaggtgtacgctggtatataggaaagtaccctgtgacaaatatagttgattctttttatttctctttgcatatagatgaacacacagctacagtgctctcaggaggcctaggagttgacttagtccaaaggaatgactgtgctatttttgcactttccctcacattatttctcaaggcttgagggaatttaaatgtgacttacttggcaatgacaagtgtctgtcccttcagtgcctcctgaatgagatcatttacacaaatcacttcaccatagctcattgtatttttcatagacaaatagtatcacttaaatagaatctagatttcaagaaaggagagggtttttttcttcttcccttaaaaana

SEQ ID NO: 236430 - DNA, 469 bp, Homo Sapiens
tcccaaagggctgggattacaggcgtcagccactatacccagcagtatattcttaaatattactgttgagccatatatacgacaatggtggactttgaatgtccgcacatctgtagtaaaatgcaatgctaccttcattttttgttggtatgctaaagaaattttaagtatctcacttttaaaaaaataggtttgtgtattttatgtgcttacacatttttccatagtactgtagatcattttagtgatgaaatttgatacttttgacagaaaaacaggtcagtgagttccttgggatcaaaaaggggttgattacaagggcaggaaggaattgttagtgtgattctacagttctgcatcttgattatggtatgactgtgcgtttgtcaaaccttaacaggatgaattttgctgaatgtaaaatcatacttcaataaacatgactttaaaaacttaaaaaaaaaaaaaa

SEQ ID NO: 236431 - DNA, 437 bp, Homo Sapiens
  misc_feature (6)..(6): n is a, c, g, or t
tgagcnctgcaatgcccctcgcctgcccagcaaggaagacagacccttgggcttggcctctggtgctgcctggccgggggtctcctccatgctagaaccacaaacgtgcttccctgcttgcctccgcgtgccatgcaaggggcttgctgaccagggtgggagtggcatgggcctgcagccaccacccagcacctcattcattcatttggcaaacatcaatgaggccatgtgccagggaccatgttcccaacaggagaaatcatgagaagaaaacagactcgatcaacgcctgccctcagggagggcatcacttggtgaccgcctagcgggggaaccacatccaagttaggggccttgtgcatggaaaagaacacttcattctttgtgttttcatttataatcgatttattaaagttgttagataaaaaaaaaaaaaa

SEQ ID NO: 236432 - DNA, 445 bp, Homo Sapiens
ttttagaatcaatataagtctgtgcttgtaaatgcagtaagtatctttggaagtatacctaaaaattggtaatagtgtttgactccagggaagaacagatgggtgccagagtgaaaaaaagatagcttttgctttttatgacttttggattctgtaccacgtaataattttgatgtaaattttgctgtgtgtgtttttacttgttcatgtagtgattttataaattactcttttaattttctatcaatgaatatcctgggataaacccctcatgatcataatgaataatgatgtgtggagagtggggagggtttacatatgaaaaatgtagaaaatacaaaaagtgtctatatatacaaaaatgtaagtgttaacatttttatatttgcttcaagcttttttttaaataaaagaaatgcaatattgcaattaaaaaaaaaaaaaa

SEQ ID NO: 236433 - DNA, 621 bp, Homo Sapiens
tttttttttttttttaatggagacagggtcttgctgttgcccaggctggtttctaactcctgggctcaagcagtcctcctcctgccttggcctcccaaagttctgttattacaggaatgagccactgtgcctggcaggaaatgcacattcttaaaaagaaacaaatattatcaccccaaccagtccgaactccatgagacgcttaactaatgttatgtgttgaattgtgtccctcaaaacgatatgaagtcctataccctggtatctgtgaaatatggccttatttggaaacagggtctttgccgaagtaattaagatgaggttatactggattaaggtgggccccaaatccaatgactcaagtcctcataagaagtaaagatcagactgggcacggtggctcacacttataatcccagcacttgggaggccgaggcaggtggatcatgagcccaggagttcgagaccagcctggacaacatgacaaaatcctgtctctacaaaaaatagaaaaattagctgggcatggtgttgcaacacctgtagtcccagctacttaggaggttgtgatggaaagatcacctaagcctgggaggtcaaggctgcagtgagtgtattgtg

SEQ ID NO: 236434 - DNA, 541 bp, Homo Sapiens
  misc_feature (517)..(517): n is a, c, g, or t
gccccaccatgccacctcttctcacgggatgagggctcggggtgtctcaagcattaggcagagaaaactgaggtggcttaaggtcactgtgtttcagcagttgaatgttttcattatttatctgtgtcctttttggtgtgtgtgtgtgtgtggtttttttgtttgtttgtttttggttagtatttggtaccatatagtgttctctcttctcccaaaaggatgtgtatataactaaagagaaatgtaaagtgttgtaaataagatggctcatgaaggtacagtgagactgaccctcctgtgtgcagggctaggccatccctctgcatggtgaagagagacactatttttatactgtaatgccatgcggggctgggacctctctgagcagctggggattgttacctagacccaatattttttattattaaatcttgtggcttgacacatctgctgactgaaatggatgtcttagtctaggttactatttttgtcatatggaattgaataaaatgcaggnatgtaatgttaaaaaaaaaaaaaa

SEQ ID NO: 236435 - DNA, 519 bp, Homo Sapiens
ggccgcttaattaagttaccccacagttgcttctgtcttcctgcagtttgtataaaagataaaacctctcacatggcatatgtatttatactacacatagaaaatataattaggcaataagctaaaatactactttgtaataaactgtgtagcatactgtttaagagtaagtactggtaactttaattttgttgataggtttttgaaataacctgttatagccgggcgcggttgctcacgcttgtaatcccagcattttgggaggccaaggcaggcgaatcacctgaggtcaggagtttgagaccagcctagccaacatggtgaaaccccgtgtctactaaaaatacaaaaaaattagccagacatggtggcacacgtctgtaatcctagctattcaggaggctgaggcaggagaatcgcttggtcaggagggaggtggaggttgcagtgagccaagatctcaccactgtactccagcctgggcaacagagtgagactccatctcaaaaaaaaaaaaaa

SEQ ID NO: 236436 - DNA, 721 bp, Homo Sapiens
agcagtcaaaagtggaagcttgtttaatattgctctaccatcatcctgaaaggcataataatttgagttacacatctgaactgattggagttacagaatcatatctcctttttgcatttaacaatatatacaatataaaataaatacatttacacaaatggacatttgctggagcacacagtatggtacacatcacaaaaatatacaattgattgctttacagatgtgaagcccatctacagctatagacatggttttattattattattattatttttactactggctataatgcaactcctggattattataagcagtttaaattttttgtccttttacgatctttgcacataagactgccataaaatgttttcctaggcaggtaaacagagacgcttaaataattaaaatacaatcaccaacacccattttctcttctataagaaaaatagcagttttaaattttttatatcttttatgttatcatttaaatgcaaaatagtggaataaatacaacaatctgatctgattgaaacacaagtgtaactacaaggagtcacacaatcatattgctttaaataagaacgaacctaaaagaagcaaaattaaaattaaaatcatatggctaaaacatacacctttataactttccaaaacttcacattaagtaaatggtcttgcttgaaacttgagaagacttccctctagtgaggtttaag

SEQ ID NO: 236437 - DNA, 349 bp, Homo Sapiens
  misc_feature (329)..(329): n is a, c, g, or t
tagtcacagtctccttgattgattctagttccttttcaaagtggagagacctgaatatagattgtaacaggatgtccaaccttgccagacaagcaggcatatatgtctctgggatgcagaagcagttacaagttaatatatttaagcataatgttagccaatcctaggtgataccagagatgtgaatatttgatcatatttgagttcattccttgaaagtccaaacctaactggtcttaattgattacttcttagtattccgaattttagaatttaaaaccctatgaattttcagtttgtgcttacattttctaacattggatgtttgncttggcaaaaaaaaaaaaaa

SEQ ID NO: 236438 - DNA, 463 bp, Homo Sapiens
aaaacaaaatgtttaccataacaagaaagatgtgtagacaagaaagatatttatgtagactctttgtttgttaaattttgaagccaggtgatgcattgttagctttgacaactgacttaaatttttgtataattatttatctttgcattttgctcaggtaaattatcttcccagagtctagaaataaagatatccctgatcctgtttaagagcataaataatactctcaatgtaaattgttttgaaataagatcttaaaaatacaaaatgtagacaattaatattcaggtgcttacttttgagccaatatgtagcagagaaaaactaatttctctgtggcagtatttttatttttggcatttcccaggaattaactgaagactaaaactcatatgtgaagtgtaatgatactaatcaaagagtcagtaaaatttccatttggctaccataaaaaaaaaaaaaa

SEQ ID NO: 236439 - DNA, 561 bp, Homo Sapiens
tttttttgccttactttcatgtgcaatgagaattacttaagaattggtaacgcatgtagccttttttagtaaccttggaagctgtagtaattctaaggaatcatgaaccttgcctggacatttgccacctaaacgatcagtgtggtgctgcgttctggccagtaaattccatgtttttggctatatctcatccaaactgagcagtttctgtgtatatatagaaggtagaaatgaaaagtgagaaaatatttgaaagggattatattaattgctaaatattttattcacaaaggtcaataacatggcaagataaaattatttgtatagttttgtctgaatgagcgagaaaaatgtggatgtactgtttgtatatattgtatatattaaaacagatatgtgcatgaaatcaagaaaaaagaaatgaacaaaagcaaagcattagtggctatggtctgtaaaatgaaacaaaaaaactttatttcactataagagtactttattttaaatgttctttaggagaacattttgctaaagcagactaaactgcaaaaaaaaaaaaaa

SEQ ID NO: 236440 - DNA, 577 bp, Homo Sapiens
  misc_feature (46)..(46): n is a, c, g, or t
  misc_feature (199)..(199): n is a, c, g, or t
cagacgcatttttggtaatcacagctggggagtgaaaagggtgccnctggcaccactgggtggatggtccagagcctccacccacagaggggatgcaaagggcaggtgagtcaagaaccgcataggtctccagtccccacggggctcccaggccggggaaaggttcccctgaggtcactctgaggccagggacgtcacncaaggctggtggtcagtgtgaagggctccgtgccaactggtcagctgtccttcacgcacatatccgtggccacctgagacctgctccacgacccttccaggcagagccgagagttcgccccaacccttccccaggcccagtgtgaaaaacagactcacaaggggcttcttggcctgcagcttcatttgcgagagcgccgaggcaggacacagagcacagctgtgctggaagtgtggggagaacccggacagctcagtcctgccagcagccgcaaagagccgaggctgccaggcccatttatgtccctcatgtctctagattttctcgtcacccagcctcaaaaatatatgtgtctgcaaccctcaaaaaaaaaaaaaa

SEQ ID NO: 236441 - DNA, 652 bp, Homo Sapiens
tttttttttttttttcaatatattcatttatttgacaattatttattcatttgacaattattcaatgtttactgcataagcaaaaaactgaataagacggttttctgcttttataaaacttacagttaagtagaagggacactgcataagaagtaacatgggagaaggctcaagtgttgacaactgtgatgaagagagatggaggtccagaaggaaattcaactgtggcgagaggcaactaaaaggttcctgcagtccaggagtcagcaacctatggctcattaagctattcaggatagagacagctgtggctcatatggctagtgagacaacttccaacagagtttagtcaacaatgataagaagaacagtttcactacaggaagagctactgcgcaactgcctggcagtcagccagggctttggctgaccaggaggtatctctggccatcattaaataggactgagactgccaacaccaccttatgtccactgtgcactgctacagagttgggtggtaagtacttgagggcatgtgggaacattcagctggatgaataccttaaaggctgccgatctcactctgggcagctgtgatattgtgaaatatatagttggtcttcaactcccttccggcatacaactcctaaaa

SEQ ID NO: 236442 - DNA, 791 bp, Homo Sapiens
  misc_feature (5)..(5): n is a, c, g, or t
  misc_feature (65)..(65): n is a, c, g, or t
  misc_feature (756)..(756): n is a, c, g, or t
  misc_feature (759)..(759): n is a, c, g, or t
  misc_feature (782)..(782): n is a, c, g, or t
taaanccacatttttttttgttgttacaataagctaggtcttcagtacccacaaaagtagtcaanctctgcttccttgcacctgagttgagaggttaggactctaagaaaagcaggtgcaagcaggcagaacaagtcaagattctctataactgaatactacacttcttaaaaaataatcagactctatatggtaaccagaaagatttaacctaaaattaacagtaagaaaataatcagacaaatcaagaatgaggaacatttcaaaataactggtctagactccagaaatgtcaagatagattatttttatttttaaagggagggcatgggaactgttttagattaaagaaagatgaagaaacagaacaactaaatgtaacatatgaacttttattagatgctggatcaaagaaaattagaaaatccagttatttgggggacaactgagaaaatttgaatatgggttatatattagatggcactgaatcaaagtcaaatttcttgggtgtgatagtagttttggagttatgtccctattctcagacgatatatactaaaagtatttaaggctgaatggttccaccaaaaacaaaaattatgtggcacggggctgaagggggcaagagagaacacataaattgaaatttaaaatataacaaataattacatagcagagcactgataccacacataaagagaatctctatacacccattatttagaaatgtttcatgaattctatttttactgtgtnctnctcgtgccgctcgtgccgaattnctggcctcg

SEQ ID NO: 236443 - DNA, 679 bp, Homo Sapiens
  misc_feature (34)..(34): n is a, c, g, or t
  misc_feature (646)..(646): n is a, c, g, or t
cttctcattcagctaaattcacatttgccccccnccgccgcccccgcccccatatgctcctgctattattttggtaatgctctgatgcaacattgcaactttatgaaatatttgtatgaaaacaaaaagactgcaaaaaatacactttcaaaagaaaccattcattgcatgtttattatgcaagtttaaatgaacaaagaaaaccttcagaaacaagttgatcaacgtgagagaaatttcatgataattattcatagtaataaagtgtcgtgggcttaattgtatatctggagccagtgtcatccaccaacaatgtgatacaatatgaacttgacagtagttttgggttttgctcattctttcagccacctgtgatcagttttgttgattaaggacttcttgtcaggccattttttaatatcaaagctgaagcaatatccattcagggatttcatcagttgcgtcacaaaacacggatgataatatacatcactccattttttccattttgagtccttttaaatgtaatgctaacctttacaattaaaaagtcagattcagaatggaaacaaggtcattttgcaaacattggagctcttttattacaagtctgcttgttaattttagaactgtaaaaccgctctgnattaaactatttaactaacaaaaaaaaaaaaaa

SEQ ID NO: 236444 - DNA, 651 bp, Homo Sapiens
tttattttataaacatgtaagaaaagttgtagatatttattgtgggtctggttatgcaagaacaatcttcctggacacagtgtgcgattctcagtatcaaaagcattctcttctttcagttcgtaaaagaaaaacatggtttaacttctaatttactgcttattataaggtttaaaagcaattactgtacttatgtatcgaacttatttgtgtagcaactaattcatctgtgaagccatggtttgctgtggcttcacagtaaattttgacttaagtctaaagcgtgtgttagcatctcaccgtaacttaatgcttcgagtgagaagtttgaggaatgctgctttaggcaaaagagccactggaggaatgagctctgctcttttcacctgctctggactgctctcactttcctcaccgacaggaccacaggcttaagaactggctcagcagtccttctttagggtctagcgcctgcctaccagcttcctctacttctatcccgggacagatgaatgcttttctaaaaaatattttggaccatctgcatgattccctagcaaatgctttagagagctggtaagcttcagctccgacatggccagatcatcaaaatttgaagtttactcaggtctatttaatgagatttttttt

SEQ ID NO: 236445 - DNA, 465 bp, Homo Sapiens
ggtttcactatgttggccaggctcgtcttgaactcctgacctcaggtgatccacccgccttggcctcccaaagtactgggattacaggcgtgagccactgcgcccggccatgattcacttaatgttgccatgagtttgctgttcatgaaagtgaggtattaactgcactggttagtgcaggaaaagagcctacggaatcactgactttttacacaggctcccctatgcaagtaggcacaactgctcatatttattctctcaaagtatggttggcatttccccaaatttggtgattttgtgatgtgtacaagtatctataaagacagaaccaccaaacccagatttctgagaaccagggatcaaatgtggcttccagtccagagaaaatgcttggttatatattcagaaaaacactattattcaaaacaggccctaaggaaaaacagtatgggagccatgctcctg

SEQ ID NO: 236446 - DNA, 539 bp, Homo Sapiens
  misc_feature (527)..(527): n is a, c, g, or t
caggatggctaacaggctttgatagctgctcgtgaactaaaacagcagggtgtgtgcaggttcctcctctacggtcaggcagcaggctctgaaggctgatcctacaccgtcccagtgactccccttgacagagtgcccccaccccctaatagccaacagggttagcatggccagcacagatcgctgcttttattgatgcaaatcaagcctgctgcttctcctccctgcagacttagccaaggaactccaagatgcatgactgggacaagaaaaggtgagactccacatggaaatgccttgccctaaaccttgaatgactgtgagatgcgatctgggagtgcatctgtcaagtctttgtgttttcttcactaacctcagaatactgggctctattttatcaagcgctgcagtttatgcctctgtcccgtcaatgctcagcttctgcaacaggacaccaaacttgatgcagaaagccaaataggtcaattatgcaaatctcctggtgccatattaaatttcttgacganaaaaaaaaaaaa

SEQ ID NO: 236447 - DNA, 787 bp, Homo Sapiens
  misc_feature (12)..(12): n is a, c, g, or t
  misc_feature (45)..(45): n is a, c, g, or t
  misc_feature (62)..(62): n is a, c, g, or t
  misc_feature (142)..(142): n is a, c, g, or t
ggattcaagcanttctcccgcctcagcttccccaagtagctgggnattataggcatccgccnccacggcctggctaatttttttatttttagtggagacgggattttgccatgctggccaagctggtctcgaactcctgacntcaggtgacccgccagcctcagcctcccaaagtgttgggattacaggcatgagccaccgcgcccggcctgaactgtaaaatttttaaaaagaatttcgtgatatgtgaattgtatctcaataaagctgttattaaagcaagaaaagtccagctgagtttgcctggagttttttataaaacgaatggctaaatgtgaaatatcttagatataatagatagcatctgaaaacactaaataaaatatgattcccaaactgtgttctgagatgcgagatattccatgaaaaacaaaagataacagcaattggatttatttgaaaacttgcataataaaaactataaattctttcacatgtgataacttgcataaaactgtgccacccagagaatgagaattgcatggaggcaggggcctgttttgttcacccctgcatccttagcacctaatacagcacctggcacaccgtagatgctcaactgtatttaccaaatgaaaacacaatgttctcgctgcagactgaggcagaggcagcattgaccaactaaccattaccttaatgcagattaaaatgtataaacttcagcaaatatttataacatttggttcttttgtttttaataaagtaaaatcatttacttctctct

SEQ ID NO: 236448 - DNA, 483 bp, Homo Sapiens
agtgtttcgaggaggagaggggacaggggccaggtccactcccttggccctcctcttggaccccaaggccaggccggatccttttatcccgtggggagcccctgcctcggccatcgggatgaggtccctcaagtccctgcacaagcaggtcagagacccacccacatgccgttcctgggctacgccacgcgccatcccccggggctgtggacgcacccagcccccgacagacaggcgccctgagagctccgaaggcgcgatccccatccccaccagtggagaagccagaaccgcgattgttgcatctgggaaaacccagctggagccgaacggcccgtgcccccactgtaattgtgctgaaaatgtttctcaaatgacccaaattggctcttattttttctaatggccctttcaaagtattcatgaaattgatgctgtgtcataaaacaaaaataaaagatttcacagcaaaaaaaaaaaaaa

SEQ ID NO: 236449 - DNA, 424 bp, Homo Sapiens
ccattcaaagttattttaaaaatcttggaaaccctccccagtcggctgtgggtgtgcctgaaaacagagacctggagagcatggtgcaagtgcgggtggacaatcggaagcttctgcagtttttggagggacagcaaatacatcctacgacggccctgtgcaatatttgggacaatactcttcttcagcttgttttggttcaagaatatgtctctcttcagtatttcattcctgccttgtaaaaattcagccagcttagattttttttttaaggttttgatcttttcaaaactaaaacagaccctgagttaattgggttgaaaatttggaccttcactgacttatgcagggcgtatattttgttgagcccttcctcctttgcaaaatttatattaaagcattggtaaaccaaaaaaaaaaaaaa

SEQ ID NO: 236450 - DNA, 542 bp, Homo Sapiens
aggccaggtgctgtcatccacaaaggatgggtgaaataactggggtcctcaggtcacggtctagccacaccagcttctcccaagtactaaccaggcttgaccctgcttagcttcagaggtcagacaagatctggcatgttcaggatggtatggctgtagaccaggctgggttctggccagagctgttgcactaggcaatgctgccagagatgaggaggcatcagggcagtcatcccttctgctgtttgccccaagaatgccatacaaacctggggatgacccttaaaagtctcccgtcacccccagtattggggggaagctgactattcctcagatgatagcccagtcacttgaagaacaggacaagactattctgtgtctagggggctcaagcactgtgtgtgggtctaacgaatgcattttgtggaaatgggctcagactccccaaagggccatccaacctatgggagtgtctggccttctgaggtcctgaaatgtctcttttgtcagtaaacagctaataccctcaaaaaaaaaaaaaa

SEQ ID NO: 236451 - DNA, 471 bp, Homo Sapiens
  misc_feature (435)..(435): n is a, c, g, or t
taagcacttaatagctttccttatttacaagtcagattcatctaagggatatttttcttttatttttctggtgcttgaaatgttcctttaaaatagattatcagaggatacacagtgacacaaaatttgttgcttgtgaaaatgcagagtggattaagcttttctttttcaaggctctgcaacaaaacaggtacatttttttttcagtaaaaacactgctttttttttttgcctccgtcacacacacgagtaacataggatagatatgtgtatgtgaacatgtggctcttgttcccagttgtgtaatggatgcattcccttaaagtttgcagtaaagtgaatgtttattaagcaaattgtttttccccagtgacttctactgtaaaaatggcattgtctttcagtaggctctgaatatagtatgttcccatattncttggtaagagaccaatcaaccaaaaaaaaaaaaaa

SEQ ID NO: 236452 - DNA, 686 bp, Homo Sapiens
tttttttttttttttaatgggagccaaaatgtttagagaaagcttctgggtgtgcctttcagattttgaacaagctgccttgtctaaacatcaatttctactactctgtagccttaaaatgtgctctatttagatccacaggacccttctactggtgatatgaaaaacagaatacagaaattaagagaatcactttttactcaacaattaggggaagtaagtcaaagccctcctcttgcgacagcagatttcctgcgggccacctgttcagcgccttgataggggatagggtgatcaaagcactcacgaaaacagttcattcaggtatggaatgtcagaattcctttggccattttctcctgactctttgctaggtcccctggtttccttggcagcacttcttggatggaggacagggtccaccaacttctcaagacattgagtcttgagacacaagaaaccacagacttcaaccctgaagggcctaactctgtccatatgtctgtcctttgaatacttcctgtccctgcctaaaaggaaacccaaattgtttctaggatactggtgaagttgtagtgaggggcttaatgcagttaataatctaaaagccagcagaaaaccaaaatgcctcagccttaaatggttgtttcttttttattttccataatgaatagactcacaggcat

SEQ ID NO: 236453 - DNA, 666 bp, Homo Sapiens
  misc_feature (638)..(638): n is a, c, g, or t
tttttttttttttttaatctcgtgcttttcacatgtattcttatttttctcaatatacggtagggcacatggtaatcacatttattcacacgtggattttaaatttttattgagcacttactcttgtgccagacactgtaacagaagctaggaatacaacaatgaataaagcaagcaaggttcttgccttcttagagtatacattctagtgagaaagataacaaacaagaacacaactatttataattatcactcttgaatttggaaaattgggaaaataaaaactactgatataaacaaagtccacaggggaaaacaactttgtggaaacaattcaattcaggcaagtgttttacatggaatttgggagaaagggacaatactacaaacatatatttaagttgattgcatagagattatagctgaaggtttaggaggactaaagatagactgtaatgaaaggcagagcagaagcttcttgaatggccatcctgtgtggaagccctcagagatacaaatagcccattatcacaaaggagcacctattttatgttatcttggttccatcctctggccttgatggtatccaagggtgaagtcaaaaagaagggagaggtttggcggttcccacccctgtnctccgtagccgcagggctgccggcagct

SEQ ID NO: 236454 - DNA, 614 bp, Homo Sapiens
tttttttttttttttgctatttgggtaaaaaaattaaaaaaaaaagcacgcaaatatcattacacgcaaagttttatattgattttttccctataaatacatttaacctatcaattctacgcctagaattctatcttccagacacacctgcacatggaccaaatgatacacatgtgagggtatctcccgcagcgctgtatatatcagtgaacaaactgatcccagcccgatgtccctgcacagtgcacgagttaatcactaaggcacacgcacacatgaagtattacacatctaaaaaaatgaagcaggtctctaggtactggaatggggtcaagggataaaagccaggggcaaaacatgccaccactcatgtcagcaaaaggagggagaaatgcttatctattcacttatttacatatgcctaacaaacattggaagcacaagctagaggtgaataaaaatggttatgtgtacctggcacgtggggttgtgggaacaagacttctcagtttataccgcttcatgtcttgttttctgaaccatgtaaaatacctaaacataacttgtaagtcttaaaatttttctttctccatcgtgccgaattcggcacgagg

SEQ ID NO: 236455 - DNA, 737 bp, Homo Sapiens
  misc_feature (42)..(42): n is a, c, g, or t
  misc_feature (695)..(695): n is a, c, g, or t
tttttttttttttctgtttagccttaaagaagaataatatanctaaatttccaaatgttcactcgagggtaaggatttcttctagcacaccggtggtggaggatacacagagctggcaagcatcactttttacttagcttcctcctctctctgtatgcagatcaatggttttcaatctatggctgagggtaatactggtgagaatctgaccagggagtttttgtacctcacattccaatgatgcagggattgagcctctctgttggactctttctcggcctgcttttaagttctaagtgtgatggcttgggcaagggtatttgctgatgattgtatttgctttgagtgttgggctgtccttcccttacccctgtcttggcctttgagttactcagttaaacccattttgatctgaagcgactgaaagcaggtcctggccaggtaacattacagcctttgaaggattaagatctttagaactaattgctcagaggatgaagaaccacaaagctgcatatgaggcaaaagtgtaattctggcctttcattaccagtgtgggctaggaagcagaggcttgagaggattggggtatgcaaaactattttttccttaaatttaagagtagaggctgggcatagtggctcacacctgtaatctgtaatcccagcactctgggaggccgaggtgggcaaatnctgttgagttcaagatcaccctgggcaatgaagcaaaatccc

SEQ ID NO: 236456 - DNA, 676 bp, Homo Sapiens
tctgtgcagttatgggagcatgacaggggaggctccaaaatggaggttgagctgggtcttatagaataaataagtttgctgggaccagagacatgggtgtgcacagactcagaggcaagaaagttgtatgatgagggtgggggggtgtgcggatagaggttgaagcccaaaagccctgaaagttcagtgttgaggctcagggtggggaccctagagaggcaaaagatgcccagccagatggaattggtggtgtgaattgccaggtctggaaagagcccagatgggggctgcagcatgggccttggttgaagcctctaatcctgtaagggctgctttggcccaagaggccttagaaacccggtgtaagcctcaatcggtagccggtctggcctctttctcacacttaaccgacacagctcttgctctgatctcatcccaagtcatctcgctggaggacaattaactcggcttcaaaatggccctcagcctggagccaagatttaggagcaagaccgtctagttgggagagaagatgtttttggagagttgaagacttcttgaaaaagttcgaaaagttcttgaaaaagcaaaggatgcttctttcggtctgggagagggaaaacctctcccagggcaaaaggaactaagaccaggggtgggttaaaaaaaaaaaaaa

SEQ ID NO: 236457 - DNA, 472 bp, Homo Sapiens
ggcccgcgtgctgccccggaagtctatgcgtttgcgacgccggagtggccggggagtcgggacaagcgcaccctcgcctgcctgatccagaacttcatgcctgaggacatctcggtgcagtggctacacaacgaggtgcagctcccggacgcccggcacagcacgacgcagccccgcaagaccaagggctccggcttcttcgtcttcagccgcctggaggtgaccagggccgaatgggagcagaaagatgagttcatctgccgtgcagtccatgaggcagcgagcccctcacagaccgtccagcgagcggtgtctgtaaatcccggtaaatgacgtactcctgcctccctccctcccagggctccatccagctgtgcagtggggaggactggccagaccttctgtccactgttgcaatgaccccaggaagctacccccaataaactgtgcctgctcagaaaaaaaaaaaaaa

SEQ ID NO: 236458 - DNA, 459 bp, Homo Sapiens
  misc_feature (75)..(75): n is a, c, g, or t
  misc_feature (96)..(96): n is a, c, g, or t
tgtattggtatctccttaaataaaataaaatattcctattgtaagtgatatgagaaatctttaaccagccttatntaaaaataaaaagagaagccnttgtaagacattcagtatgtgtaaatgtgtttgtgtttgtagacaaaaggcaaaggtattatgtaaaaatatttaataatttattctttctattactgaattaaaaaatcagaggtccctgttatatttttaatggctaacaactcaatctcattaagttggaaaaaaaacttatcaaagagacatttacatggtttggcttttatattcatcatagtatacattggcggtatctagccctttctctgtaaaatatccctatgtttaatctgtatttcttgcttattatatgtaaagttgagcttctttctagatattaggcctttgaataaaattctatgtgagtcagaaaaaaaaaaaaaa

SEQ ID NO: 236459 - DNA, 786 bp, Homo Sapiens
tttttttttttttttcagtaaataagcaaataatgacaaattaaaatctatgaatggagttttctgttcttaccaagaaaaacttaaattaggctccaaaagctgtgaaagcctgcctagtttggcaaaaggggcactaggatggggaatcaggaaatctgaagtcctagcatcatacccctgccactggaaaagtcaacaacagttggctttgagataaagatatctccctattattccctttctccttccatttaagaaatgtgaagactgaaccaagttttatgctttaaggtttcttatttgtggtaaaaagatcctgatgacaggtaaggtacctagaagaaattaaagcagttaagcaactaatcatttacaaaaagaacttttatagaaaaagacaaattgactccgtatgatgatgacaaatgctcatcaagcacctgactaaattacctagcattatttcctttaagatatacacatgtggccaggcgcagtggctcacacctgcaatcccaacactttgcgaggctgaggcgggtggatcacctgaggtcaggagttcgagaccagcctggccaacatggtgaaactctgtctctactaaaaatacaaaaattagctgggtgtggttgggcgcctgtaatcccagctacttgggaagttgaggaggagaatagcctgaacccaggaagcagaggttgcactgagacgaaatcgcaccattgcttggggagtaagaccaagactccgtcttaaaaaaaacaacaacaacgagatatg

SEQ ID NO: 236460 - DNA, 476 bp, Homo Sapiens
taaatgcaaaagaaagggaatatgtcccacaattacacttgtgcttacaccatgaccagggtgtgggaagagcttaggaccaaaatatttgaggtacagttgaagaaacagggcatatcttccttgaagaagaggaaaccatagtagccataaactttttccaagtaattgaagagttgtcctgcaaaaagaaagaaacacctagtagactatcttggtgagttactggtcagtgaatgcattcataaaatcttgctctgtttgcttgtcaatattggcttagagggattcacaaatctatttgaggtaggactgaatcatcccacaaatccttaaatgtcttctgtgttcaaggcaccatgctagtgcacactgtaggataccaggaaaaattaaaactaatttatgccttcagagacttcacaacttagaagagaaatgaatatgctcagaattaactgtaaaaaaaaaaaaaa

SEQ ID NO: 236461 - DNA, 456 bp, Homo Sapiens
ttgctgcattctctgaaatagcaaggaattaaaaactgcctgtagatacagcaattaaagtgaactccatccgcatgtaccaatatagacgaagtcctaaaaacataataactaagtgaaatgtacattgtgaaaggatagctacagtgagatacctgtacttggaaactgtaaaaacccaaaataatgctaaatgctcaggaagagacagagacacaccagcttcaaggatagtggtggcctgtggtgataggtggaagggaatgggatggggtgatggggtttttagccatatctgtatttgtattttactataaaaatacttgacataaacatgacaaaatatgaacccctggtaaatctgggcaatgagttccccaatgtctactatattattttctacctttttctgtttttcaaatagttccataattaaacatttaaaaaaaaaaaaaa

SEQ ID NO: 236462 - DNA, 767 bp, Homo Sapiens
  misc_feature (41)..(41): n is a, c, g, or t
cctccttgccccatcccctttgctgcctcttattcattcancaaatatcctgaaggatgagaaaaaggctaggcttgccagagtgctatggatacaggaaacagtatataaaaaagttccagatggtggctcacacctgtaatcccagcactttgggaggccgaggtgggcagatcacgaggtcaggagttcaagaccagactggccaacatggtggaacctgtctctactaaaaatacaaaaattagctgggcctggtggcgggcgcctgtaatcccagctagtcgggaggctgaggcaggagaatcacttgaacctgggaggcggaggttgcagtgagcaaagattgagtcactgcactccagcctgggtgacagagcaagactccatctcgaaaaaagttccagaggtgggaaagagcttgctaccttctggggcctaaaaaaaagtgaatgtgactggagggccgtgaacaaaagcagcaggagggtcagagaggcaggcagaagccagattattctggcccttgtgaaccatgtgggggagtttggaatctaagtgctatggaaaaccattaaaagattttaagcagacacatacgactcttggccgctctgggtgaagtggaatagaggcagacaccagcagaaatgaggcggccatcatcatgttccaggtaagaggtaaagagggtagtggcagtacagatgaaagaagttatcatcttatggaaatagcactgacagtaacttgatatagatttagag

SEQ ID NO: 236463 - DNA, 564 bp, Homo Sapiens
ggccgcggccacaacatcctgcgccagacgcgcagcgagcgctgccactgccgcttccactggtgctgtttcgtggtctgcgaagagtgccgcatcaccgagtgggtcagcgtctgcaagtgagcggcccggggtcccctgggccctgatcgaggtcccctcctggagcctggccctctgaggcttacggtcttggcaaggcagcatcgccttggctcttgggaagaggagattggaccacatgatcttataggaacccctcagctctgaggtctgtgatcgccggacagtccaggcctgtctgaaccccaccactcacttctgtgggctctaggactgactgggttcttcctccctccccgaagcccagacagttcagttgggctgggggttgctccacaccctaaaacaagcctcagccaggcaacccgtcagtctgtctccatcctttcaccccttccctggagatgggaggtggggaatgaatggaagctgacgggcagagagaggaggattaaaaaaaagaaatagacataactgagctgaagtaattccataaagggc

SEQ ID NO: 236464 - DNA, 723 bp, Homo Sapiens
tttttttttttttttactcttattgtattttttaattgtcttagagtcctctaaagcaagacatcaagacaaatgctattaaagttttgaatcttgctttttcttgcatgccataccacctctttgatggaaagaaagaaattgctcacattaccccaatttccaacgggcttaggctttaagaagcaacagattctatgtttacaaaaagcccaatatttgggtaaagtctatgtaaatattgaccaagtgcccatccttccttatttccatttcttgccttcccaccaattctcactaaacttggatgacctatttatgtgtccatgtacccccacgggactgagagctgaaggcaaacctaataactgtcaatgaatgatcatggtcctcaatccacttaatacttactaagtggctactatgtacccgacatttgcaagcactagagcttcagcagcgcacaaaaggttttcatgcagctcacattccagtgagcacagaccaaaagcaaatctagcacagggcacgtgctgctatgaggaaatataaagtaggatggagctggtggcaacaaaggcctccatgagcaaagtgagcctctgggaaacgagggctggagaaatgcagacatattggggtttaaatggagagagtttgtaagatcatgttatcagatataaccaactggcccctctttttcactgtcttacactgtcatct

SEQ ID NO: 236465 - DNA, 469 bp, Homo Sapiens
cagagtttcaccatgttggccaggcaggtttcaaactccagacctcaagtgatccacctgcctcggcctcccaaagtgcttagaattacagctgtgagccactgcgcctggcctctatgtttaacttttgagaagtctcttgattcttgccactacgaggtgattttatccaactattacaggaaagaaaatgggagctcagaaggttggactgcttgttcaaagtcacctagctagagagctgcgcagctggaactagtatacaagtctagctgttgaaagcaccctgagcacgttacctcatgctgtaccttgcatgtcttgttgtttccaattttcagatgaagaaacagttccacacactaagagacttaacgagggtacagttagtttcaggagagctggtagttttcattccgtttagaactggacctggtaactgttgattatcctaataaatgcacttcat

SEQ ID NO: 236466 - DNA, 624 bp, Homo Sapiens
ccaaaactatactgttttgtttaatgtacttttcagtggattcgcaggtatcttttaaaaaaagaaaagagtaaaagttaattattcaagtgctactaaggttagcaaagaaaccatttggcattaattatggtgtgattagggaaatctctaagcaagatggcctgtcaaaatccattttcctgttgagggaagtgacctgggtttaaacacagcctgagaagaggcccccaaacactgcttttctctctttctgcttagtcataggaggaagcaaaaattcaacaacaacaacaaaatgaacgtgagccaacgttacccttgggtgtttgctctcccttgatgactctttgggaggagtgagattatgcacagatcaagatttaaaagtcactgctttagagtgctttatgaacaaacaagctctgttcaggacagggttcactgcctagttagactagacagtccagccccatacagctctcaggttggcaaagtgcctggtgcctgaagcggccctcggtgctcaggaatttcagacacagtggcacatgtcatacctggatgagactatggctgtgctcaagtctcagatactttccacctaaacaggatgtaggtttt

SEQ ID NO: 236467 - DNA, 490 bp, Homo Sapiens
atatttgttgttttcagtcagtgtgtggctattatgaataaaagtgctatgtacattcatgtactaggtttcatatgaatacatgttttcattactctggaaaatatttccagcatacaattcctggctcatagggtagttacaagtttaattttaatagaaactagcactctgttatccagagtgactatcattttacattcccatcatcaatgaatttctgttttttcaaatcctcttagccatactgactgatatgtattgatatcacattgttttaatgtacatttttctaaaggataataatgttgaactttatttaatgttctcatatgacatctgcctattatctctgatgaaatgtttattcatgtctgcatgttttctaattgtatttgttttcttgcaagttttgagagttctgtttatattctggttactagctcacataggcaataaataagttttttttccacaaaaaaaaaaaaaa

SEQ ID NO: 236468 - DNA, 760 bp, Homo Sapiens
caagccaaataatgatttaagagtgtgctcaataaaaaggccataggtttaagaaattaaatggaataatataaattactaggtcaccaagaatatttcatgtatagtacactgtctaaggaatgcagagaaattttacaagaaacccaagactaaatacttcattaagaacactggttactaagtaaatagatggctcatgtaggaaaaagctaatatatgtagatgtaatgtcaactaagtgcatgtgacagaaatgaagaactaggaataagaatccagattttctggccaggcacggtggctcacatctgcaatcctagcaccttgggaggccatagtgggtggatcacctgaggtcaggcatgagtcactgcgcccagctcccaaagccaattttcaattatttgtgagccatagattcagtgactacatcaatatctcttgccagggattggcctaacagctcagagaacagattgttaggatatatgggcaagccttctaagttcaagaggcaagagcagaaaatggaatgctatagggatttagctccatcttaagccattctggccctttctgctctactttaccagctatagagttaggaaggcttccagtaggccacagcaagaggaaaaacctttattctgtggggctcatttatccaggatttaacttacctgtgtcatgttaccgatattaacacaagtaatttagagttggttatattatttcaagaaattgagcacaaagccag

SEQ ID NO: 236469 - DNA, 470 bp, Homo Sapiens
  misc_feature (6)..(6): n is a, c, g, or t
aaaacncaaagtgagaaatgtgcattaaaatgatgtgtaacatacccatatttattgaagaatgcattcccacatcattgttgcaaatatgaacagtgcaaaaactgcagttccttttgcaccaacctatttgcatcaacaattttacctaactggtccatgttaagaaatgtgtgtgggccgggtgcagtggctcatgcctataatgtcagcactttgggaggccaaggcaggtggatcaccttaggtcaggagttggagaccagcctggccaacatggtgaatctccatctctactaaaaatacaacaattagccagacatggtggcacgcatctgtaatcccagctacttgggaggctgaggcaggagaatcacttgaatccgggaggcagaatttacagttagctgaggctgcgccattgtactccagcctcagtgacaagggcaaagctccaaaaaaaaaaaaaa

SEQ ID NO: 236470 - DNA, 523 bp, Homo Sapiens
  misc_feature (163)..(163): n is a, c, g, or t
  misc_feature (320)..(320): n is a, c, g, or t
  misc_feature (413)..(413): n is a, c, g, or t
gctctgggccttcctttattaatttcttaaactggcagatttagaatactaaacttccttctattcttagaataaaccctatataatcagctatttatttaaataacatggtctctgcaatttctcctggtttccattttttctcataataggcatttttttntaaaaaacaaaaatgaatgttcattagtgagacaaaactataattttgtttttttcttctttctctcttccttcctttttaaaatttgtattctccagttttgctaataatgttatacaattttacaagaaaaaagtgagtaggagagctgtttttntatagtaacagattctgtgaaataggtatcatgccaggtggggtggcacgtccctgtagtcccagctactcaggaggtgaagcagaaggaccncttgagcccaggaattggagactgtagtgtgctgccatcatgcctgtgtatagcttctgcgctacagcctaggcaacgtagcgagaaccatctcagaaaaaaaaaaaaaa

SEQ ID NO: 236471 - DNA, 438 bp, Homo Sapiens
atctataaagttgtggtgggagaatggctgagaacagtgatctctcagctctccagctgtaaagatgttaattatgattttaactctcaagatcaggccacataaggaacaggggaattccaggggtgggacacagctgggggagtccagaccagggcagggaaaggagactcacaagccaaacagagctgctttggggaaagttcttatcagctggtgctgcttcctgagccatatgcccattcctcaagctgtacccctttcttggctatgtaggatgagttcctcctaggcccttgttaggagtggctattggattctaagcggttggggcatgagggaggatattttaaagggaagtatagctgattttaaaagaacctatacattcaagaacaaataaaaaacagcacttttctttaccaaaaaaaaaaaaaa

SEQ ID NO: 236472 - DNA, 585 bp, Homo Sapiens
tttttttttttttttgattttcaaatattttatactagttatataataacactattttaaaaactatatagaataaacagcactgaggagagatgaagcaatagaaaggtcaaagttcaaacttgttaaaatatgtttggctttgtttccctaaggttggaattattaaactggtgtgactttagaaggttttcgaggaattggtgtgtgttactgcagaatcactagctcttaatttgtaatttgatggctaaaaacggacaagtcacttaaaggaatatatcgtattaaaaagttactttccttgacatttggccaccagtcagccctgtctcccctagcctctgtctgaagtatggaagacatttagcctgcaggctcatgcctatgcagtaccagagggaatgtggagggcgcttgccatgcaccagcagccctattctcacctgtgtgattatatctaactttagaattgcagccccaagatggttatctgaaatacaaacccacttgtttgcaactttctgcctacctccccatggcatttgtgcagtctttatgactgggatttggcctcaacgtttc

SEQ ID NO: 236473 - DNA, 773 bp, Homo Sapiens
tttttttttttttttaagagatggtggcttcctatgttgcccaggatggactcaaactcctgggctcaaggaatcctctcatctcaggctcccgagtagctaggaatacagacacgagccaccatgtctagctggaagttagactttatctgcattcctggaatagtaaaagcaaagcacgggtcagctgctctcggtaaattctagcccataggtccaagtcaagttccaggaagccccctatgaaaaagattctgatattagtaccagtgtttagttcatgtcatggcctgacttaagtataggtcattaagtgtaatgccaaggcaggggcttgagtggtttggagctcatgactgttccacttggaatttatcctggtgtatgaatacgaatctatcaatattttttttcaggtggcttcccagttctcccaacacttttactgaaaagatactgtctaactatttatgtcaatatagaaacataaagtcaaatatatttgtttagtagacttgaagagagcctagaaacacactcagagacatgtaaacagcatcagacaagatggcatttcaaatcagagttgaatggatttttcagctttgctgaggtataactgaagtgtactaaactgcacatatttaaaacatataatttgatacattttgactcacaaaacaatcaccacaatcaagatgatgaatatatagatcactcccaaaagtttccctgtagtcttttgcagtcctttcttcatggccttcttcatc

SEQ ID NO: 236474 - DNA, 650 bp, Homo Sapiens
tttttttttttttttcccaaatcagttaaggtcacatcaaggaagctataaaaaaaatttttttaaagactttttggatttcagaattctatgaaaaagggattgtggacctgtagctttatagcaaagcatcaaatactagacatgcaaaatgagaagattacatgtgaatatttaaagaagttatatttgtttgacataatatgcattgtacccgggcataataaagttaaaagccagttattctgactgccagaacctgcagaataaattatctttagcttctatctgctcccattccctcctacccacaaagagggagacactatagactttctgaatcctacattattaatctaaagactacttttccctgattttgcagaatcattcagctcactgacaatagtctctcaagtttctaagaggaaacaccagtagaaatattaactataatgcaaggtaacttttctttaaagcaagagacacgaattaaaagaaggattatcttttattacggtcttcctcaaaagacgaagcttgttcttaaatttctgccttagaatggattcacaactatgatgttaactttaacagattgcaccacccaaaaaggttttatatctccaagtcaacttgggagaaaaaca

SEQ ID NO: 236475 - DNA, 639 bp, Homo Sapiens
tttttttttttttttcaaatttctttttttattctaaataaaaaccacactttgtgctgaacaatggaatataaaagaatcagatgtacaatgattttagacatctactatttggggaaaaaagtttacaaaatatacaaaactttacagcaatagatagtaaacacttaaatattaggaggtcagtacttattaatttaatggaaggagttagacgtcaacaactcttctctgtttcataagagactttagctattcaaggtgggggcggcgagtggattggacaggggaagggttttaaagaaacatcaaaatcgagtttcattttcattctgatgttaagcttatgatgcataaccacattgaaactaatgctgtgcaccctgcctcctgactcatttggtgcaggatttagggaaaagagtcccagatgggtgcagaccaccccatagagcccactcccataccaataaatacagtgtctatctagaatttgctttggaagttaagcagtcttgggcttggggaaaggggcacagaaggaggccagaggaagaagaaaattcaacactagcaaaaacctgtctaggaaaaagatatttaagcccaaaggtttggccggagacaaacaggtactca

SEQ ID NO: 236476 - DNA, 722 bp, Homo Sapiens
agaatgggacctgaaaccagggatcctgacttatcttgtacttcttgctaagtaccttagaacttttggagcacctgcagcctgcctggtggcccagacatcacatggtgcacgtgcaagtcagagagcagttggaaactgacaataggcacgtgaccacactctgttccttcaggacacttggcaggaaggagcactctgggaggagtctttgtttggctcccatgcgtgaaaacaaaacttctgcctttgcaggagctggggcagtctgagttacagacttgggtaagactttcagagcttccttaggagggaaggatggcctggtggcatttaggttcaactcctttctgacagggctcagccttcctgtttcccatccttggctgtggccaggttcaaaggaaataccatctgtggaagcactttccaaagaggcgtggtccaagtgcagaatgtttttcctctcctctgtggatctcaggaagccgattccatcttccagcgattgccacattcattgcataagacaaaggtagtcatgggctcatcagcactgcgtgtctgcacctggttataggtgcagttcttcttcttgcatttgctgcactggaagaggtcagtggtggtgccgccagtcttggccatctggtgctcacggatggcctcctgggtcatggcattcctcaactccctcagttcatcactggccatttcctctg

SEQ ID NO: 236477 - DNA, 601 bp, Homo Sapiens
tttttttttttttttaaataaatgaactggtcattgggtgaactggcttttggttaattgacctagagcccagttctgcttaagcctgacttttctaaagggataattagccaaaatttcatctggagctggctagagcccagccatgctaagcttacaaagaaaatggttctctcatctggcccccattacactgtctcaaataaaatcctcattggtaccacaaatcaaaaacaaaaccccaaaattaaaaagaaatcccactttcctagactaccaccagagacaattcaaaccaactcatcacttaataagcaggattatccttagtgatctctatgagcattggattgggaagacagaaatcagtgcgacaggcaagagtccacatatgggaacggcaagcagtaaggctgaaaacacagccccgaacaaaaatacaaagcaccctgagtgtctgcccaaggaatctggacgatttcacaggccacagctagccatgagggcagtggaataagttcacttgctgatgaggtataaaaaggaatttgagaagcgcaaggccaaacatgaataaaccagtaggagaccactaatccat

SEQ ID NO: 236478 - DNA, 498 bp, Homo Sapiens
  misc_feature (457)..(457): n is a, c, g, or t
ggactggagcctcgttttccccctaggcagacctaaatcaagcagcttaccacaatagtgcatgctgagtagattagttccaaggaagggagactggaatgctggtgtcaaggaaaagcctccctcatcatctagtctaagaccataacgggcagaagcataagaggttccagggccataggagaatgagaagtagggcacatatagggaggaaagaaaagtgaagaagggggaaatctctgaatttttttactgctgggaaaagtgtactacatgaaggatgcttggggctttgctaacctgctcaccgctaaccctccaagtctaaccatccccagaggccacacaaaccaagtgactcctgtagttcccatttgccccactatggagtcagggcaaaagtggaatagccactccatgtgattttagcatgtttaatcattttaacaataaaccnccccacaaatggggtcatttaacctctaaaaaaaaaaaaaa

SEQ ID NO: 236479 - DNA, 635 bp, Homo Sapiens
tttttttttttttttggccagggagatttaggtgctgactttaaaacaatgaaaaaacaatttgccctaatggagcttgagggcaataacaaataggctatggtaagtaaatgccatgaaaagggtactacagtagaaggtgctatacatgcaatcaacccagcctgggaggtagagaatcaggaaatgcttcccaaagaaatgccatttaaactgaatctgatctgaaggatgagtaattgtgatacatacacatatgctggtgggaaggggtggggggtgtggcaagaaagacatgaagtataagagtattttgaatagaggaaatatgagcaaagcccagaatccagagagctgataacatactcagggaactaaaactaacttactgtggctgaagagcaaagtatgaattgagaagtactgagagagaccaaagaggtcaacaaggttaatatatcatgaagcctgctaaggagttcagaccctatcctaagggtaagagtcattaaaatatttaaatacttttatatgtaatataatccttattaacaaaagataattttagccaatgtgatgtgtttagagggagacagaaaggtcaacctggagattgttacagttttccaggtaag

SEQ ID NO: 236480 - DNA, 725 bp, Homo Sapiens
  misc_feature (705)..(705): n is a, c, g, or t
ggccgcttaattaacctgcccaaggtcgtatagttagtaaagtggtcatgcttggattttaacctaggcagattacttcagagtcagcgtctgccttactatcctgtttcctgagcaggaatttccccttgtgtcaggcaacactaggtgttaggagtggaggtgtgcagatgttgccttacattctgttttcctgatgtggtgtgcttcctaagagtacaaacctgagcatatgtccaggcttgcaaagtctcaggcaaagctgggactaaggcttgtgtttcctgccttgggtaggattttcttctatgcatgttgggtgcttctcacttaacctaatagtatgccttgtctgttttccccccttcccctttttgtttaaattgattcacagaacacaaaaatttactaggtatgaacatttgaaaaaatggaatagagaaaatggtacatcacatgtaataaagataaatattgttttgtgaaatgtctttttcaataataaatatgtgttgtgtgctatataaaactatttcttattgtggatattgaagtttgaagcctgttgttcatctatagatgcactggatgggattggaagtcttcagatttcagtagggttttccacaagcttatgaagacattgttctgtttaggctgtaaactgtttttatttcttgatgaaaaatgttcttctatttatangatcccaaaaaaaaaaaaaa

SEQ ID NO: 236481 - DNA, 791 bp, Homo Sapiens
tttttttttttttttggtacttttagtgaaaagacagggtcttgtcacattgcccaggctggtctcgaacttgtagctcaagttatgtgcctgcctcagcctcccaaagtgctgggactacaggtgtgagccaccatgcccagccacatcaatttttaagtagatatatgcctaacggcattccaaggtcaaataaatatctaggattatcttgctgtaccgacaccttgcacttaacattgtgatgaaataatccattgttaattttttgatgccttccttctatccctgcatttcagagtgaaaagataaaacaatttcttactgtgtacatgatgattgagtactgacaggtaacatgacctggggaagaagtcacttgacattagctaacaatgtcagagacagattaagaagtgaagactcccgattgcttcccattaaaaataataattatgaccaggtatggtgacatgtacctgtagtcccagctatgtgggaggctgagctggaaacattgctagagttcatagttgcagtatactatcattacatgtgtgaatagccactgcactccagcatgagcaacacagcaagatccctctctgccggacccgccactcccaaaatagaagactctatctcttaaaaaataaatattattaggttttatttagaaacttttatttagaaaatcttataatacaaaaacacacttgagaggcatttgagattattgaccatacctccttaaatctattaatccaaactactataatttctactatact

SEQ ID NO: 236482 - DNA, 443 bp, Homo Sapiens
tgacaggcattggcgaactatggcttgtgggccagattaagcctatgactagtttttctacagcctgtcacctaagaatggtttttacttttttaaatggttgaaaaatagtcaaaagtagaatgttttgggaagcatgaaaatgatttgaagttcaaatttcagtgttcataaataacattttattacagtcaccctcatttgtttacatattgtctgtggcagcttttgtgttatgttagcagagttgagtagtttcagcaaagaccaaatggtctgcagagactgaaatatgtattgtatggccctttacagaaaaagtttgctgacctctactttatgacattctcaaaagaatggcttaaattcagctttatgtaattgatgtatttctaaaaaggcaataattaaaatatgtgatgaaatcataaaaaaaaaaaaaa

SEQ ID NO: 236483 - DNA, 766 bp, Homo Sapiens
tttttttttttttttgaaattttcccggtctgcagggctactgagtaaagcctaaatgcattctgacatggtgtaatatgaaataaaaatgcttaatttaagaagtattatttattcttaacgtggtagctagtctccaagatggccccaacgatccccatctctggtattcatgccctgtaaagcacctttcatactgaatagaagttatttgctcaacaaacagaaaacactgtgtgtaacttttgaggctagattataaatgacattgtggctcagtctttatctctttacccttgttctggaaaaaggaagctgccacgttgtgagggcacttaagtaacaccaaaaacaggtctatgtggcaatggaatgaagcactctgctaaaagccagtgaaacactgaggactcctgcagtggcatgtaagtgagtcatcttagaagcttgtcctcctgctccagtgaagccttcggatcactgcaactataaccaaaatcttaaatatagccttataagagaatctaagatagaatcactcaggtaaattgctcctaaattcttgaacctcagaaactgttaagataaatgttcactgtttaccaccaagtggtaatttgttatacagcaataaatttatacttagctaatataaaaacaatttcataaaatattttggtttatgtttcttaagtattttttatctagataaacttatatattaacttagaaatacagacagttagaaagactacttttatataca

SEQ ID NO: 236484 - DNA, 640 bp, Homo Sapiens
tttttttttttttttaactgacttctgttccctaagttatatctgtcggccttgcgggataccagtcattactgggtgtatgctgataggtatgtatatacattcatatcagttctctaggtcatgttcctggactccagatttatatctttaattgcctagtgaacaagttgctttgacatcccaaaggcatttcaaatgaaactcatagatccctccaggcttgtttttttaatctcggtaaacgacactaccacctactcagttacctaagacccatcggtaattcttgactggcgctatttttcctcaactatatctaatacatttattcctagtgaatctagctccttaatatcactggatattatctcaatgtttcccactttattgaagaaacacaggtggtgtaaatcctggcatatgtccacatacttaaccattctatctcagggaaggtggaatgacctatgatttgtaaatttggaaaggacaaactgggcatgctagtttctgccacccttcctcctcgtggctgctggccacaggggacacacattctaatcctccaggtatagtttttctcaaggggcatcacaggttggattccctgggaagtagattctgaaacggaaattag

SEQ ID NO: 236485 - DNA, 399 bp, Homo Sapiens
  misc_feature (20)..(20): n is a, c, g, or t
  misc_feature (38)..(38): n is a, c, g, or t
  misc_feature (371)..(371): n is a, c, g, or t
  misc_feature (377)..(377): n is a, c, g, or t
gctggtctgggaactccccncctcaagcaatctgcccncctcggcctcccaaagtgttgggattataggcatgagccaccgcacctggcctaaaaaaaaaaaaaaaatctttttttataaaaaatttgattcatagtttttttaaatacaacgagtacattgaacatgcttcacattcagaacatgaagtcttttaaatgaatataggtagaacttccaacttccaggctttgtaacagaaatcatattaaagactcagtagcaagcctaatcctcaaatcccccatctgttaacctgataatcctcatgtgtaaacttatttaagaagctaactcctgagccacctgtattctgagcattgcaataaagnatgtgnaagattttaaaaaaaaaaaaaa

SEQ ID NO: 236486 - DNA, 518 bp, Homo Sapiens
ccagacaagattgactacataatcattaggcccagaacacagtgaaaatgcagcatcccttgttcaaaaaaattattaagaatttcaagacacggcagcagagcattaaaccaagagtggggtccttctgaacatggggtcctatgtgatggcacaggtcacaaaaccatggagccaaccagctctgtgcccagaccttctccagcaccttccagataaaagcttaactaagagctacatactttccaaaggcaccattgcttcttcactgggtgacatttgcaaaataattgcccataatgccaccatctaggacaatgagatcctttcagaattttctccaagcttgtatgtgtatatggatgtgtgtttgtgtatgtgtctctttgacacaggtggattgttcttaacaattgttgtactattgtgtcacttaaaattatagcaggagtatttctctgtattaataaatagtatttaagaataaaatttaaatatttacataaaaaaaaaaaaaa

SEQ ID NO: 236487 - DNA, 391 bp, Homo Sapiens
tttttttttttttttgagatagcatcttgctctgtcacccaggcagaattgcagtggcacagtcatggctcactgaataatagatgttaaataatactagatgttaaataatagtatcataagtacctacactgtttcctcaaccctttgcttatatggtttccttcatttgattaaaaagctgaagtggcacatacatccccctttctgtcatagagaggcagatgacaagcggcctacccacggtttgggataatggactagtggcaacaggcaagtccagcttttattgtttgggatccttactgagaagcagcaggcttcctctactgtcataaaaatattaaaaagtaagagcccgtataatttctcataataaaacaatgttttg

SEQ ID NO: 236488 - DNA, 614 bp, Homo Sapiens
  misc_feature (598)..(598): n is a, c, g, or t
tttttttttttttttagaacacagactttttattttttgcatttattgtggtaaaatatacataacataaaaccttttaaccatttatttttaaacattttaagcttcttattgaaatataacaatataggaaacacatacacagtacaacttgtaagtacactgctcaatcagatttcatctggatcaagaacagaatattccaatattccggaaaagaaaagaaacatgttaaaaagaaaagatttttatttaaaaaacctagacatagtaattaaaatgggggttaagagaggtaatctctctatccctttgtgtgtgtgtgtatatatatatatatcatacataatcccatatctatgcatctatacccaccctataatgtaccattttcagaaatgggtttgcagaagactttctaaggggtatttgttttattgtttaaaagattatgtggtaataactttgggatacactaaatagagtaatcaaacaagtttgtcacccaaggaaattttcacaaattcagacttcagggcctattgactgatcattctcaagtcaagagaggaatgaggagaatccttcttgcccattnctagatatatttttta

SEQ ID NO: 236489 - DNA, 706 bp, Homo Sapiens
tttttttttttttttgagacggagtctcactctctcgcccaggctggagtgcagtggcgtgatctcgggctcactgcaacctcccacctcccaggttcaagtgattctgttgcctcagcttcctgagtagctgggactacaggcacgtgccaccatgcccggctaatttttttgtatttttagtagagacgcggtttcacaaccttggccaggctggtctcgaactccttgtgatccacccaccttggcctcccaaaattctaggattacaggcatgagccactgcgcctggccttcaagcttcattttacaatcagtagacactgtcactaattattgagaaaatttatacaaatcaagggaaattcagagaaaagtcaaacagaagaaaaataatgagtctggaagaaaatatagcccagccattccttctctccaggcaggacctaagaagtgctctctgtggacacggcccaaaccagacaggccccttcctgcctgtgcccgatttccaagctggcccaaccaggctattccctcatagcctgtgtagtttacagtgttctacagattttttaaatcatattttaaacaagcttcactttcttcttctaagaatcatgagctgcaacattcctcattttctcagttgagtccctcagtaaagcccaaggtgtctgcaggcaggactgtcctaacctactag

SEQ ID NO: 236490 - DNA, 540 bp, Homo Sapiens
  misc_feature (523)..(523): n is a, c, g, or t
tggaaagttctgcttgctcctcatctttgacagcatttggtgtgttcacctttttgaattttagccattctaaacagcttatctgcccctactgtggaatgatgtgacagacatagaataacacttacagtgattctagttcaaaatgaggcaacatggaagggataaagaagtcactgacccaaaatagtttggaaatggagctgggcaaaatccagcagaagtttcttaattaggatcgacagcctgggaccggcccgccgtcctgtgggtctttgcctctgggctgtctgctgggcatttcttggaaccattattatttatctttttttctcgcacttttttgggtatggcttctatcgcactccaaatgtttttgagattcatccttgttgttctgtgtgtcaccagtttgttcctttagccattccatggaatgagtgtatcacagtttattgatccattcttgtattgacagatacttgaatgttttcagttttttgtattagaataaaactgctanaacaaaaaaaaaaaaaa

SEQ ID NO: 236491 - DNA, 648 bp, Homo Sapiens
  misc_feature (39)..(39): n is a, c, g, or t
tttttttttttttttgtgagaaaccacaagctccctggnaggagtggtctttactcccattcaacggaagaggaagcagagcaagcgcatcccagcccgtgcgcagcgtggcccgagtctgtccagtcctggctgctgggcaccgcgccggccctgggatgccacagcagtgaccaggacacacagctcctgctcttgcagtggcaggaggagctccaacatgaattaaaagtaaataaccaagcagaacatcagggagagagaagggccaggatttaaactaggtgggggctgagagtgaattcggggtgcagagcagggagggctcttggggcaacgctgctgcgtctcggagtgaatgacaggagggagcttcccaggcggaggggcggctggtgcaggttcttcagccaggaagggggcatgcaccagaggactgggagtgagaaggagcggaggcccatccagtgggccctggagattgtgtctggaggccggattctcctccacgcgtggaggactggacgccctcagggctgcgcggggccgcaggaccgccttggtggttagcgaggctccctctggcttgactttgggttattttgagcaagagattaaaggtgattacgattgggctgaggcgccacg

SEQ ID NO: 236492 - DNA, 790 bp, Homo Sapiens
  misc_feature (1)..(1): n is a, c, g, or t
  misc_feature (99)..(99): n is a, c, g, or t
  misc_feature (782)..(782): n is a, c, g, or t
nctgtaccagctgcaaaagtaattaaaatattacttgggtattactaattgttctgtagacaaagataaaatctgaagatcattagcaaatacattacntttaagctgagttgctaatatggaacccttacatatatacccaatactaaaataaagctaactctgttttaagattctgggtcatatagcccattctaaacaaaatgttcaataatcaataaatcactcattgataggttaacaaagatattcaatgaatgtctgagagttaaagacaacatctgcatagcattcatcatatataaccacttctaattactcatatgggaaactgtcctttaaatgagaaaattctgatgccatgaaggaggtccaaaacagcatttcgagattgctcttttctaattttgaaggtgcttctctgggctttctaggtttttgctttcctcagaggattctagtttggccattactacattattggttccaggagcctctggctgcttatcatcaccatcaaagataatgtcttctggatttggaggtggagggcagaattcttcagttggaaagatctcctggaaaagtgtttcagcttgcttgacagcatgctcatttcccaggccacagtcaggcccagagcagacataaacattggaaggcaagccattatacgagcttctgctgattcccgaggaatctctcatattaaaataaagagcccacaagagtcttggctttgtaagttcttcctcgtttatttctgtttcagtatacggagnaataattt

SEQ ID NO: 236493 - DNA, 474 bp, Homo Sapiens
aacagacatcacacacagattttacagtaggtacaagctctagcctggcacacaacacagccagcgtcttggacaggggtctgccagaggagggtagcaaaagccaaaagcccagaaagtattctgcttcctttgtcctcttccattttagccaggcaaggagcattctgtgtcttatatcttcttttccctgtggcgttcatttccaattgcagaaaggaggtcataaccagattctttccttaaacagctttccagctgagtacaacaaagacaaaacaaagcaaccctgctcctccacaattctgctcttccatcactctacatggcaggagaaactcccacaatagctttttcctactgtcagagaggaagcataaaccaagatttccaaaggcaccactggttggttcccaggtgccctagagtaggatttttattttattttactttattattttttttttgagatga

SEQ ID NO: 236494 - DNA, 351 bp, Homo Sapiens
  misc_feature (311)..(311): n is a, c, g, or t
gtggagctggagaagaggcaggagggcaggagcagcacacagacactggaagacagctggtgagtgagcccgcccttgggccccaggagctgccctgcctggacctaggcccagcaatgagatcccccaatgccagtgcaactaagagaagggttccactgggaaggctgagaacccctctcctcatgggttctctacaggcaaaaaggcaatgtaacctagtacgatggttcccagaattcctttcgaatttgccatttcgtttcccatgaatcacctatgctagttcacacctaatgttattctttatncttgatatagtgacatttattttgctaaaaaaaaaaaaaa

SEQ ID NO: 236495 - DNA, 494 bp, Homo Sapiens
tccatatcttaagaatttgaatttagggcttatcaatgatcttgaaatacaggggtggagacaggttggcagcaaaacaaactgctcaactaagcaatgaagaaaaatctgcctctgtatccagatagaaatgaatttcaagtgttaaagaggcatctctcacgctgctcgagggtggaaaaatcttgtcaactggcaaaagggaaatactcactaatcactgggcattatgaaaaagtacaaattccttacaggtacacatttgccttatctgattttatgtttcttctcactctgccaattattttacaaatataaaaagagtagttttagcagaaaaaagggttatggagtgaaatactaataagcaataatggaatgtaaccagggcaatttcatacctgccaaggagcataattaaaagagaatacaaaaatctaaaggtgaaccttgctcctataccaaagtaaaatcgatttattccttattttcta

SEQ ID NO: 236496 - DNA, 744 bp, Homo Sapiens
tttttttttttttttcagaaagtacctataaaaagtaaaagaccacattttagggggagaaatataaaattatggtgaaaggccacgctgtgaaaagtacttggtttacagtacctgcggtgttctccactggggcctgtccagagaggcagatgacactcacctcatcaactggcaatgaacagcagctgaaaagggtggctgctggactggggactgttcttactcctaagtgaaaccctaccttcctgatactcatggagaacactgcagttacgaacagaccaaaacaaggagctgcaaatgcagaactcactgggcaaaaactgacagatgataccaaagtcgtgaaagtatctcatctcaaaaaagataactacaatctcaaactttcaaaaaatgcagatcttgctcagaataaatcgtaacaatctcaaagtgcatttggatgcagaacgtatatttacctatataagctctttcttgttctcgagtaagtccagggggaataactgtaggcattcctggaatcactgtcttctgttccattgtgtcttggttccagcggctcctcttccgcttcttacttgggaagtctcctccgccgccggccgggcccggctgctggtccttacgcggcggctgggaaggcctctcttcctccaccattaccaacaataccgactccaacagccactcggcttactgtcccgggcttaccagatgaccagctaatgttttaag

SEQ ID NO: 236497 - DNA, 769 bp, Homo Sapiens
tttttttttttttttgttttatgcactctgtacatttttcttttatggtaaaaaaaatatctttaacctcagggggaaagggagaaaaaggaaaaagcgcatgcacttgtcccatgggtgctgtgaagggctgttcagagttccaggggctccactaaggcagcagcggctcggcaggccatgtcttttggcctctgcaccaacctgtcaagagttaagcctcaggagggcaggccaggtgactttcagcacacgcattcgagtgtgcacgtgcacacacctttaacttgatttcccaaattctccactttgtggttttaaagctctctcaatacccagtggctgggaacctgagccaggttcctgaataaaggctttgaggttgcctctctatgctaacagagtgctctcaagggcctggtaggcagcccgaggtggaaggtgggctcacaggagctgctatgggctgcgtcttagagtcttcctctgccagttaagagcccgtcctgagaacctgagaaaactactcaggggcatactcatgggaaaggcagaggtagctctgccttcaaaccacatgaggttgagagggtctggagatacctcttctagccgtacatgctgggatgaaagccatgtttttgctctgtttgggtctggcttgttttgttttggctgttttttctttgaaaatacattgtttagaaaaaagactacaaacagctatactaacaagctataggggatgacagtgaggtcagtgtttttt

SEQ ID NO: 236498 - DNA, 696 bp, Homo Sapiens
tttttttttttttttgtatttttagtagagacagggtttcaccatgtttgtcaggatggtctcaatctcctgacctcgtggtcctacctgttttaaactgttacgcaggtcaatcatgtaagtaaacatcaactgtaaagggaaaatcccagtactaagtaaggtgtgattgttattcatgagggtcactagatcagactctcaaatatgagcacttagatccttaatgtcaaaaatcacttttatcagacaattgttcaatatccacagccattgatattgtcttagaaaacagaaaggaaagttttgatggcagaaagtgatggaatggaagggtaagtcccttaagaccagaacacaactccatatagaaggtgaaccagaacttgggatcacaaaggagcccctctggccctctaggaatcagagcatactctgtgatattttccctcgcagcctagaagtcaggagacccccaggtctagtaaccatggacacctcccctcaccccttggggcctcatattctgtatctgagaaggtgattcctagtcattggttttctataacaaacacctcctcggttgattagggtccaccgtttaacaaaaatagacacatgggcaatgggaaaactcattctagctgagttagggcatcagattttgatcgaagtcaaaaggggactagaatttat

SEQ ID NO: 236499 - DNA, 762 bp, Homo Sapiens
tttttttttttttttgcttttccccttgcctgtttcccatctgctttttctccaaggtaaagctggactgatttcagtggatgagaatacagtgataagcaaatctttaaatgttaccctaaataggctcttaaaatagaatgtagcttgtaaagatataagttaactgcctgcaagttagtggccttctactctccagtggtggtgtataaacccctgaaaattcaaatataatcctaaaagcagaaagactgacatttaggggaggggaaaggatggataaaaagaacaatactcaacctaccagcctccaaagagaagtcatgcaattgtgaatacatgtcaaccaactgttattaatattccagccaaatcacactgaaaataaaaaatctggtaagagctgtagtggaaagccacattagcccaccttttaatggtatatatatacacacacacacacacacacacacacttcttattaaaggtctatttacaaatatgctaggtaaaagacaaacatttttccataatacacagtgctgcttaaagaactgcttcagacatctccagaatatttcagtataacatgcatgacattttaaacacaatattttatatcaaggagtcttcatatttagccattaaacttaaattccaacaaaaatatttttcatcttaaaataaatcaaatgtgaagattacggtaatattttttcttgctcgatataaaaatatcgttactaattgtttagcttaaat

SEQ ID NO: 236500 - DNA, 368 bp, Homo Sapiens
tttttttttttttttaaagcagtctgcatctttctgaaacttctagtgagtctcaagtcatgacaacctgggtcagagtcagtacaaatgggacaaacctgggggagaagaaaggggaagatgtggccctagtagcttatggtagattctcggtcattgaatgctctgtccagcccaccattgtccttgggtgggagaggtgaataatgttggaaaagatagaagatattgctggcatcttctttgttattgtcccctacaaaatgcagtggatgctaccagacattttgagactcaatccttatggaaaagtaagaaccaaaagaactatttcttgcaaacaagtatctcccatttgactttataag

SEQ ID NO: 236501 - DNA, 439 bp, Homo Sapiens
tttttttttttttttaaaaatttttattttataaatagggacagttactacaaagctgccaaattcttccctgtcctatgcatctcttccttccattcctactgctctaccctgcctcaggccccactgcctcaggcctggctgaatctgaggaggtcctctggggtcttcctgcttctcatctcaatagtcagagctgatgttccgaccccattccaaatacttggcctgatattggaggccccaccctctcagtcttatttcctaccattctcctccatggacggcctgatgctccacccaaataggaaagtgggacaattaacattctctaggcccggggaggtggctcacacctgtaatcccagtactttgggaggccgaggtgggcggatagcctgaggtcaggaattcgagaccagcctgggcagcttaattt

SEQ ID NO: 236502 - DNA, 529 bp, Homo Sapiens
  misc_feature (482)..(482): n is a, c, g, or t
tttttttttttttttggtcattagttattaattttacacagttaacactgaaaaatgaatgatatttaatcattgtcacttactgagaagcaagaacaatgagtgagcccaaaggagtctactaccatacctattaagtgtagggaagggtttaagtattttttacatacttttcttctgtcattggaaaaacaccacccatctgaaatggacagaagaaaattttcccaggtgttctactctcatcagaacagcttggtgccagtgacctccacactgttagctggctcccatactgcttgaagggcaccagtcaagagctgtcaaagggagtctcctcagaaatcagcatttgtgggagatcccacttccaaaaaggtagtgcagcagtgctgtttccgagcagcagtgaatgtgggggctgaagacgacgctttacagggccttgcttaggccctggggatgggagtaaacagagtcangatatgaggatgtagtgaaatgagtttctgcataatcctgggtgata

SEQ ID NO: 236503 - DNA, 717 bp, Homo Sapiens
  misc_feature (26)..(26): n is a, c, g, or t
  misc_feature (81)..(81): n is a, c, g, or t
tgtctcctttgggagtggtgtcttanctgtcaaactgggtggagatctaggaacctatgtgatcaacaagcagacgccaancaagcaaatctggctatcttctccatccagtggacctaagcgttatgactggactgggaaaaactgggtgtactcccacgacggcgtgtccctccatgagctgctggccgcagagctcactaaagccttaaaaaccaaactggacttgtcttccttggcctattccggaaaagatgcttgatgcccagccccgttttaaggacattaaaagctatcaggccaagaccccagcttcattatgcagctgaggtctgttttttgttgttgttgttgtttattttttttattcctgcttttgaggacagttgggctatgtgtcacagctctgtagaaagaatgtgttgcctcctaccttgcccccaagttctgatttttaatttctatggaagattttttggattgtcggatttcctccctcacatgataccccttatcttttataatgtcttatgcctatacctgaatataacaacctttaaaaaagcaaaataataagaaggaaaaattccaggagggaaaatgaattgtcttcactcttcattctttgaaggatttactgcaagaagtacatgaagagcagctggtcaacctgctcactgttctatctccaaatgagacacattaaagggtagccta

SEQ ID NO: 236504 - DNA, 655 bp, Homo Sapiens
tccaaatgaatattttactataaaataaaagaagtaaataatacagagtaattatttattacttattcatttctaggcaggatgagggtctgagagtataatacagttcaaataaagaagttacctggcttaaaaatagctacttgctaaagatagaaaattattataaatcttaaaaacaaacaggcaaaacatcttgaaagttttataggctttgcattttaaaattatagatgattagaaactatacttttcttctatactgatactaaaatagtttcattttcagcttaaattacaacagttaataatttatctgactgtatataaacataatattctttctacattttagtttaaaatagtacaatattaaaaagcttataaattgccaataaacatgggaactcacacatacatttctgacattgggggattattataattattatgttatggaatgccaaacataggcaatgtatgtaagttttaggatagttataatgaaataataaaagggaaaaaaaaaccaggacaactttgtcccttcaaagtagaggcaatgtaggctactttgggaggctgaggcgggcggatcacgagttcaggagatcgacatcattctggccaacatggtgaaaccctggctccaaca

SEQ ID NO: 236505 - DNA, 445 bp, Homo Sapiens
  misc_feature (26)..(26): n is a, c, g, or t
acagagcaggactgtctcttaaaaanccaacacaatacaaagtaaaatataggaacacacagaaacagaatattcatgaggcaaaaccacctatttctatatgcagtacactcagatgtttttgattttttcggaaaaaatgctggtcaatcctgttaaaccattaagttggcttctcaactcagtaatgggttgaggcttttgcactttgaaaaacactagtctagacaatttctgacatgggcagagcatgtgcttgttctcaccttatggagggaggaacatacaaagatattaactgagttcctcaaattcacccatgatctgagggaagcaatgctgacctccacctgagggcttcccagtccactgctgccctttccctcaccctctgcagtgcctgctcttctcctctcattctgaaaccttgctctgcacgtggagc

SEQ ID NO: 236506 - DNA, 477 bp, Homo Sapiens
cattggctttccaaagtgctgaggttacaggcacaagcccctgcgcccgaccacaagtaggtgttttaaaccagtgtttttttttaacaaggcacaaacattcgacttaagggtgacagcatagtactttaccaggaataaagttatgttttacacatatacacgtggaaaaattaaaaccctatgaagttggtattgtcttatattaagtaatgaggaaactgaggcataaagtagctaaggattttgttcaaagagcaagtgatggcataatcagaacttgaacccaggtctacccagcatcagagcccatattcctaatccccacactggggctgcaggaggaaattaatggaaggattcccacaaaacaagacaaatcttttaccatataaataaattcacattatgagtggacaaatgaaactgtactattaaagcactttatcctcttttttctttttttttttttttttt

SEQ ID NO: 236507 - DNA, 493 bp, Homo Sapiens
tttttttttttttttcctatctagctatctcttaaaaacaaaagccatagtaaatgcatcagagatggatattcaaaatgttcctctatcagaaaagattgcagaggtaaaatttcatgatggttgtatgcttttttaaaatacagacaactcttgataacttctaccaatgaacttggggatgatgaaatggcatgatgctcaataatcctttttacttgatttgaccttccctattgaatttgtaatgaaaaacaaaatactaaaaccacactgtaaggtatagttcaggaagaaaggaaaagctgctcaactgctgcactcctgcattctcctttgtgctgggaatggatatcatcatcttgccatagaggtgtcttctttgcaaataccttgtaattgctcaactgtctcagacataagagtgatgaaacagttattaagaattcctggccgggcgtggtggctcacgcctgtaatcccagcactttgg

SEQ ID NO: 236508 - DNA, 696 bp, Homo Sapiens
  misc_feature (25)..(25): n is a, c, g, or t
aaaaggccaattaaaaaatagcttntgttttttaaatggcacccattaaagactcaccagtcaaaatgagacaaatcagtcctttagacgttcacagacaattgaaaggcactttaaaaatccactttttaaactaccacttgagaacacatggtagcacagtcttaaattcatcctagttgatcgggaatgatgaatgagtgttggcaccagaaaatcctgcttgcagaagggggcgcaggtgtcggtccacgggacagccactggccaggctagctgccgcctcactccgcagccttctgtggctaaatggcaggacggacacacaggaatgggctttggaccacaagctctggcatatcgggaggcaaagcactcaagtactctgcagtctagatgacacatttcatggtttggaggacagaagtaggtttccacatcacatgaaaaggacagtgtcacagtggggttacccagtaaacagctaccaaagccatcatttcacgcttccctgtagttttatgagctcgccctctgcatgtggatatggggaaagccgggcatgaaggggtgtgtgaaaaagaacagcctctgtgactgactgcagtaagctcacaagtttgtcactgtcagacttagcaagtcagcctgcaaaggttgtgctgatctcttggccacactacctactcaggttcc

SEQ ID NO: 236509 - DNA, 565 bp, Homo Sapiens
  misc_feature (85)..(85): n is a, c, g, or t
  misc_feature (90)..(90): n is a, c, g, or t
tgtcagagttataattaaatatgggcattttgggtttttcagtctatcttaaaacaactattggtgttattctgttatatcctanttacncaagttgaaaggattacaccaaaaggtaattatagataagaaatgaatatttgtttatttccaagtcatggcatttgattgggtattaatcttggcaggtatttacaagaaagacacaaataacattttgaagttgcccctaaaaactgaccagtttcagacagtaatactactagactcaaaaaaaacaaaataacacatccatcacaccccctcgttgtaagacagttatttttctggggactgttctgtctggatctcatcacccataaccagtattgatctgctctgacctctctgctttacacctctgtttcaattcaaaacattattcccagttctgaagaggcttggggcctggctatatcctgaaaggttgcttgattgtgttcctggctcaacgtctagatgacatttctaacaagttccagggaaaccttacactgtcttgcaagttttcttctgtagcataaag

SEQ ID NO: 236510 - DNA, 719 bp, Homo Sapiens
  misc_feature (714)..(714): n is a, c, g, or t
ttatttttaaagcatggcatggcagcatatacacctaaacacatgcatgtgagcatgagaggcctcgctctccaagatcagaagctgggaggggaaggaccttgacgtgctctggagaccagcggtgcccatggggatggcaggtggaggttctgtcctcacaacccctggggttatcgttccagccagaaagcgaagagaccactcacaggaagcaagggcaccgtccggtcctcggcgtggtgtgaccagagctctcatgctcaggcctccaccataacttgctcttcggcatcacggggcatctctcttcttgcccaaacaagcagctttctggaaagaggagtggggatgccacttagcaccattagcccatgtgtggctggtgggggcttgaactgaccacaagtgggaaaggcagagagtgcgccagaaaaacacctgccctgagcacacagtgtgctccgactgtaggctgagctctgggagcctggatgtcctcacgtctccatgctggatgatgtagtggctctctgccctggggacacagtcgaatcacctgaggagctctcacccaggcagtgtgctgagccgccaggcctgagacaccaactcatacaggtttctccatgtcccaggcggttctgatgtcagccagggttgacagtcactgaagaggcaagctgggaggttccttccaggtttggggacatnccatg

SEQ ID NO: 236511 - DNA, 755 bp, Homo Sapiens
  misc_feature (48)..(48): n is a, c, g, or t
  misc_feature (60)..(60): n is a, c, g, or t
agagtccattttttcttatgtctttataaggttcacttaacttaaaancagcttttaaancaactttttatcttctgtcttgctatcattgttcctacttccctaggaagccctggctacctttcgcattaggaccagtctgggttttaaggctctgggaagcagggttggttagtaaagacaggaatgttggggagaggtgagtagttccttcctctttctcctctccaatttatgcttttaacttattttctacctggataaacttctggaacttggcttttaaatttaacttttctagtttttaagcagtttccaccttgctttggtctaatgcttttctttgaaatgctaacagaattcccaagctttttccagttctagatatctttactagacctttgggggactcttataatggagctgcttttgaaaagcactttaattagataatgtattttgactaaatcacgaggatgcccagtgagagcttctagctgatctcagaggaccagagtgactgagggtaaagtgtctcacagcccatgctgaattttctgcattttaaactgatactgcagtcattggagagagagctcctcatttctcgaatgaaagatgagatatattcatcctcatgtaccacatctgtcttagtgtttgcgtctggggtgtgttatcaaacagagcatggtctacatcccactgtgtcaaccagaagagccaagtgttatctcaattggcccagtgtttct

SEQ ID NO: 236512 - DNA, 462 bp, Homo Sapiens
gggaatttctttgcaaatgaaaaaaaaaatctatattcagcaagttaaggaaattatttcaagaagattgggggttaatcacacagtcaaacatgatagcctgagtaaacaagacgccgtttatttttaaaaaattaaatcctaccttaaatctaacatgttccaaaagcataatgattgaggtatcgctacagcagaattcataaagcaggaagtagctcgcaataaggctcaagaaaggtcaaagtatgattcaaagtctacactgcatcaatagaaatggcagtgagaaaaatcaagacaacacatggcccctgctcatctgcactgtcggataacatctgaaatactgtggtcggcactgaatattaccttgcaaccaggggagtatgaaactagaaattacagcacatgagggacactagcagggaggacaaaaatttcctctaagtaaaatcttgg

SEQ ID NO: 236513 - DNA, 445 bp, Homo Sapiens
tttttttttttttttgccagaagtatgatccagttgtcagtaataagatatacagggagacaggctaggcatcctctaggaatacttttgctttctagataaacaacaataggaacacaacagtatcttttcttcttcctgactcaaatgcaatggacacaatgacttcaagccttgacagccattcagtaaccgtgagaaccacttgctgcttagaatggcagagcagaaacacacagagcctggcccttgctggaaccactgtgcaaacgaaccatgtcgtgcaaggaaaaacaaaccccaatctgtttaaggccttgttggtcaagttttctatttacttgcaggtgaaaatgttcctatcagaaaaaggaattattatggataggatgaccaagtaaggccatctgagctaaaaccttacgcatgaagaaacagccattaa

SEQ ID NO: 236514 - DNA, 625 bp, Homo Sapiens
  misc_feature (1)..(1): n is a, c, g, or t
  misc_feature (13)..(13): n is a, c, g, or t
  misc_feature (57)..(57): n is a, c, g, or t
  misc_feature (618)..(618): n is a, c, g, or t
ntcaagtgtttanttaaaaaaataatggcacctgctttggattcattgatgacaccncaatggggtgaagatctacagggaatttacaattttaggctgacatgaaactaagtagtaactcacaaaatggaaattctgcaacaagcctcacaataaacatttccagtttctactttcagagttgctaactactgcctaaacatatcttaaacacagagcacgttttgttgaaatatttctcttaggacaaacacagtagacatgctttaaataaattaaaattgcaacacataaatcattcctaaaacaatcaaggtgcattactttctagcttcttataaattaaactgtactgatttcaggaaactataggttagttctgtttcatatcttttttttttagcatcttatctagttttgatgtgaataagccaatttcattctttgcagtgatttatctttttaaaccaactcgttcctttgtgcatgtgctaaccttaaaacacctcttcatataagccctgaattttaagtggtgccatttcttcctacccccagcccactcctcagaattacagaaatatgtaaaataggttgtttaatcacacatgttcatanaataaat

SEQ ID NO: 236515 - DNA, 618 bp, Homo Sapiens
  misc_feature (485)..(485): n is a, c, g, or t
tttttttttttttttacaattccattggcatggtccttcaccgaccctatgatttgcactttttatttctatgtgtgccacacacaatgcagtattaatggcaaccaggtaaatattgatttattttttaaagcttttcttcagtgttttgtcaaccatttcaaagtgtctcccaaaaaaggatgctgaagagcaattgctcccttaagcaacagattcatatttaccctgggttaatacaacaaaaggcctgtataattgtcttttcattgttaacacccaaaatagcatctatctagacagtatccccaaagaatttggaaaatctgatggtgtgagcagcagccgttagtatcagggtttcccattcttggacagtccgaggctgtgacctgttagataattagattatacttgaactggaccagagtttgttttttgaatttatgagaaaaaccaaaacactaagttaagtttgaacttgnaaagtattgaaatttgttgagtgtcctataaattgtcactacttttcctgatctgtataactgactgcaaagtgtttgtttttacaaaagagaaaagaaaagatttttaataaagagaatttgaaagcttaaa

SEQ ID NO: 236516 - DNA, 596 bp, Homo Sapiens
tttttttttttttttaattattttcagttttatttaataaacatcaatttccttgtagaaaacatagaatttctaccaactaaacaatattgtaataaggataaatgtatcaaatcacagataatgttgttaaacgaagatgctgtcttgcagatccattcatgaacaggcctaaactggcagtgcctattgttcatttattatgggtggatttcccattttacaaacaaaccttttatttatgggaagaggttcagcgtttcgcaatgtctttagtatgtatttcccgataccggaggggcagaattccccctctgtccatcaagtgacatctgcttgcagctgtagggaattttgcagggtactcttttccagagataaataatataaagatataacacataagaggtaattccctggtaaccatatatgtcccccaatcttgtcttgtcaaactataatttgcttatggttcctcaaaaaaaaaaattgtttcttgtccctttactacttcccctctccttcttttcagttgctcttatcaggaatcctacacaagcatctacctaaacactactatttcaagggccaggcca

SEQ ID NO: 236517 - DNA, 435 bp, Homo Sapiens
  misc_feature (202)..(202): n is a, c, g, or t
tagtgtgtatttgttgaatgaatgaatgagagagggaagaaggccccacttaggtggaggaagcagtcattgtcaggtgcagtttcccttctgcaggaacaagtgcctcatgtagccagcaaacatttggcacctatccagtgccaggtcctggaggccaaagccgaggagccgtcccctcccccagctctccttcagaggnatggttggggaggaggtgccaaggctttcggtctgccctctcagggccacccaggctggtttttcagtgggggctagaggtgctgggaggtgccctccccttctcccaggaagttcctgagggacaggggtcatgtgaccccaagtgttttggggggactggccaaggcctggggctctgaggttaaaggacacattcttcagattcctgaagggggatggaggcagctaaag

SEQ ID NO: 236518 - DNA, 743 bp, Homo Sapiens
  misc_feature (78)..(78): n is a, c, g, or t
tttttttttttttttattttaatacagacaaaatagattcttttattttataaaaacgtaataaagtttgttattcancaactgttatttattaattttgcctttgtatatgctgccagaaaagaaatattaagaaatcctgacttggtcatggtgaatcagaaggcctacctggatttttttatcactctaactgcgcagctaatcattcaacctcaaatttgttttttatgacactccaaggatgcccttagctgcatcactcctttgtcatcaaaagcttagaaataacaattaagcagattcctgagttactaaatgacacataactagaattgagacttaggaacttttagttccatgctaagcccacagggacacaacatctctaaaacattaatcataattgggcacaaatattttttgtcacgattccctcctgccctcatttgcttttatatgtcgttaagttcatatcctattaattgaattatcactctcaatatgttgacttttcaccatcataagcttatactgatttttcaaactcatattgcaaaagcaagctatcatgaaatgtaaagatgtccactttggttaagattcacgtaaaggtttgaagttggagaaaactcctggaacacaggtctttcttttcatcacttttcctccaatcatcatctgtgaaattcttcccaacttcttaaatgcatattcaaaatcccatccaagaaaccaatcta

SEQ ID NO: 236519 - DNA, 549 bp, Homo Sapiens
tctatagcaatactttaatattccaaagaaaaatatgaactgagaattgtattatctagccaaattgtttttactgtgtaaaggctacagataaacatatttgacatggcaaaaatttagggaaattgttccatgagtcttttttaaggaaactattaaatcattaatttcagctgaccaagagattaatgggaatgttttgagtttcaaatacatttaaactgtggaactaagaaatgtgaggatgacaacagaatgtaaatattatatgtcctcacaaggtaggaatgatacaacaaaaattgagagaaaaggaaaagaaagtggaagttcactgatacaataatagttgggcaccagagtgtatcagctaaagctaagctgacaagtcaaagagaagtataatcacatttaacatacaaaagtaggtcaggtgtggtggattatgcttgtaatcccagcactttgggaggctgaggcagatagatctcttgaagccaggagttcaagatcatccaacatggtgaaacctcgcctttactaaaaaaa

SEQ ID NO: 236520 - DNA, 688 bp, Homo Sapiens
tttttttttttttttctattttaaaatctttattcaatcagatccatgcttatttacattacctttcatttagaattaaaatatatcaatctgtagtttaaatcatactttcagccctttacaaaatatgtgattaaagttttcatggtttaaaatggacctagaatatggaaaattggattcactttaatgaaaatgaaaaattttgatacactagaacataaatgtatacgtactaaacatacagtattaaaacaagataaaacatctacagttttcttttttcttctattttctaaatattataaatcatatacttttaataagcattcaaataaaactctcaataaatgccaactgaagagatggagaaaaaaaatttcctgaacattcttttcacttacttcactacaaacttcatgtttcctaggtcagaagttatccacatttagaatatcttaagtcacaacatagatatatttggtacattccacatgctaaacactgtacaactggcaattctcaaaaaataggtaaaagaaatgtaagaaatggtagactcagtttagcctcccaagaattggaaggacatctacagtctgtgcttaattgtctataaaggaccaaacaaccttccctttgtttactcatttttttatattcttgaaaatgttatttgcagcttttt

SEQ ID NO: 236521 - DNA, 536 bp, Homo Sapiens
  misc_feature (527)..(527): n is a, c, g, or t
  misc_feature (532)..(532): n is a, c, g, or t
ttttttcaacaacaaaaaggacctttattctggaggcaaatcccaaacagcaaagcaagcgagtatggcaggctgagcagcacggcccatgggcagaggagggctcacttttcaaagttccaaatagggcaaaatgtgtgtttccctaggaagtattttttaaaaacatttttgagatagagtcttgctctgtcacccaggcgagagcgcaggggcaagatcatggctcactgcagcctccaactcctgggctcaagcagtcctcccaccttggcctcccaaagtgctgtgataacaggtgtcaaccaccacacccagtcagggctcacttttcaaagccccaaacagaaggcattgggcaaaatgtgtatttcttcgggaggctgttactattattttttgttagatggagtctcgctctgtcacccaggctggtgtgcagtggcgcgatctctgctcactgcaagctccgcgcctctcgggtttaagcaattcttctgcgcctcgtgccgcctcgtgccgaattnctggncccg

SEQ ID NO: 236522 - DNA, 740 bp, Homo Sapiens
  misc_feature (173)..(173): n is a, c, g, or t
gcagaggggatgaagtagttgaaacctgatcagctcatagttgtttttccatgtgggttagtgtccgaatggttccccaaatcccacttcatcactcataattcaggctagagctccggaggctgctgggctgtggtttggggtgaggagagtgtgttgtgcaacagcggccntgagatttggcatttgcatcttgtaattagtgctgtgggagggggatcgggactccaataggagggggtgggccctctcgtgtctttccatggaattctccccaccaccctatgaaacagggtttagcatctctgttttataggtaaagagacttgcctgtggttacagagcattaatgtcacagctagaattccaacagctcaagcttttaaaattaccccatgccacttccagggcactgcattgaaagtcagctttggtttaggctctgccaccaattatgtgaccttggacaaatcccctcactcacaagcccactttcctaaactgcaaaatgaggtcaggggtggtggacccttagtcctcagcagagtcctgcagttcctgtgtccctggagcccgttggtctccctctgtaagtctgaccttgggcagcacggtgtctttgcccagagcggttctcattcccttctaaggcagtgtctgtcactcatgccttttgggagctggggctcctatgtggactctgatttaagggctataaggcctgtctcttcctacccaat

SEQ ID NO: 236523 - DNA, 474 bp, Homo Sapiens
atgtgagccactgtgccccacctacctctatattttaatataaacaaacctcccaacgtttagcacccaactctcacacctgcaaaagtatccaaatgcaactggaacaggcgtgccccagagctggtgtgggcttggctgcgggcacctgcactggggctgagggtgaaatatggcactaaagaggacagacggatgctggagcagagccgggggacaggtgggtggtgggcatcccctggcggatgcagctatgctgcctccctttccttggttttgtaggactaaagggcccgggcactctggggagaaatcttaaccgagggtcttcctagggactaaaagtgtttggagttttgatgccgttcgctgccttggccgagctccacatcggcaggaattctatcatggggctgtgaaatgttacagattaacttaaccactcggctaatggtttttgttttcttctttgtg

SEQ ID NO: 236524 - DNA, 605 bp, Homo Sapiens
tttttttttttttttaaagactgctaagagttttatcattctcatacgaaacaaacaaacaaaaccactgtggataaactttttttagaaatgtatatttcctgagtttttattcagatcataggaattataaattttttaataatccaggataattatcatagacagcatacgtttatttttttcccttttatgcttcaaagtcaagaagtacagctatcacttacactgttatatctgtctacgaattcctctccctttcctccatcttcctgacccacactttttagtgctttctacttctagtctgcttcatcaaccaaacttattctgaactggagattaaataaaagtgataagatagagtgagaactaatcagtaagtagatgacttcagtgctagggatttaaggtgattttatcctttggcataataatgtttcaccttctaacctagggataggagtggttagcgagtatctcactgatcgttatcttaaatttggcagcctgtatctcagcttgtagactaactgtgcctctcaactgaatgaattttaatccaatcaatctaattcaatataactaatatattccatgtatat

SEQ ID NO: 236525 - DNA, 561 bp, Homo Sapiens
tttttttttttttttaaagatttggggttgtagtagacagctgtacattttttgcaatccagcatctaagcatccttcttacctggggtactgtgagcatctgcacagcggcagcgtccttccactgtagaagctgaaaggcccagatactccttctgcccttggcaatgaagacacacagtgccaaccagaagtttgcatcttaagtgtggtgactcacagacacagggacaatcaagaaatcagtctaacagcagcggaggaatcataacatcttatgtagatttcatctttttatgagcctggcttatttcaactttcctgtccatttagtgagctaccagatagctttctaataaaaattttctgcttaggccaggcacggtgcctcacgcctgtaatcccagcactttgagaggccaaggcgggtggatcacctgaggtcaggagttcgagaccagtctgaccaacatggagaaaccctgtctctactaaaaatacaaaattagcaggatgtggtggtgcatgcctgtaatcccagctgctcaggaggctgacgca

SEQ ID NO: 236526 - DNA, 462 bp, Homo Sapiens
tttttttttttttttgagacagggtcttgctgtcatccaggctgagtgcagtggcatgaccacagcttacagcagccttgacctcctgggctcaagccatcctcccaaacttaggtcagtttttaaaaataagagcaaagaggaaaggccgaccctgccagatattaagataggctgcaaagccacaacagtgagaacggtatcagttcgggcacagaaacaaaaatacctgagaaacacaacagagcgatcagaaacagaccactgtgtatatgagaattggtatttttaaaaagacaccacaaatgtgcgaggggaattacggagtatgaattcgttatctatcactgtgtaacaaactgcccccaatttaggagcttaaattaacaatatttattacttctgtttctgagggtcaggatctcagcagtggctcggctgggtggctccggcacagggtct

SEQ ID NO: 236527 - DNA, 627 bp, Homo Sapiens
  misc_feature (8)..(8): n is a, c, g, or t
  misc_feature (608)..(608): n is a, c, g, or t
ataaagcncttgtcaagctgagtagactgttttcttatgtgaaccacaaaatattttctctgaaatctacacttagtttaaaaacagagatgggattttgcatattagcttgaaaataagtatatgatgatgatattaggtgcccactagcacctagtttttacagctttgcattgtcaccccatcactgccagggacccagccccaggcatacacagatgaaaggacagtttcaccttcttggcaaaaaccttcagaacaattgtcaacatactctcaaatgtctttcccactcagaaatgaggagcaaggtgtatgactttagattcaagaagtatatggggctaaatatctttaaaagtataactctggacaatgtacttagggacctactacttactcaaaatagggtagtagcattaataactaaatagggcgtgagtcatgagaaagattccctgcatctcttgccaagtattaacactagttttactaataagcaacggggtagataactttgaagattgcatcaacttcaacacaaaaaaatgtgaatatctaccatgtgcaaaacagtcaaagtatgttaggggaaatttaaaacattncatagaaaataagtatgtg

SEQ ID NO: 236528 - DNA, 370 bp, Homo Sapiens
tttttttttttttttcactactgtagttggaagttaaaaaaaaagtctacctccaaggaactggcagagtgtgagaactgtttataaaaacttgagaattttctcaatcttgcttcgtttgcactttcccctggattcccacatctgattttatattcttccttccttgtgctgtttcttctcttccttctccacagctcttcacccatcattcctttttttcactgatccttctttagcaaattctttcactcccaaaggtcctgaacacttcataattttagaaatgactgtattttagaataaccaattatcctgaatgagttttgttcttttgcttcatttataaatcagctgggtttaatgttat

SEQ ID NO: 236529 - DNA, 567 bp, Homo Sapiens
tttttttttttttttctaatcagcaaggaatgtctttaacaaggaagaagtaaattatgataattactctgaatggtcggatccttgagcattactaattagcatttattgcctggattatagaacaatacatgtgaaaccgaactgcgattgctcttttacgttgaagacttgaaaaggcaatggagcaaaaagccagcatcatcggtagtgtagtcagtagtttacatctccttgataggacgcagaacccctcactttggaaacacgcaaatatggtcctcagtatttatggcccattcattttttttttgttagtcacatatttacataagatatcatagtcatggtagactaatgagaggagaagcattttggttatgtcatttcgggataattttatcagttgtgagagtttaacaataaagaacataaaacttgctgtttcataaaaatatgaaattttcctggagaaattttgacttaataaaggaacaaagaactcagtttgtagtgaataaaattttacattcacttccccactttctcatagaagatctacagttg

SEQ ID NO: 236530 - DNA, 653 bp, Homo Sapiens
tttttttttttttttcaaatgcattctttttatttgagaaggatgatctcaaggcagtgccctttgggaaagatgtctttcatcatcatgtacatcaggatcaaccattactttcagcaaagtacaaaaatacacacgtcagtgacttccgtacaataaatacataatcatgcatcccacaataaaaggcaccgaaaactggtcacttagtagtcataaaaattactagctacattaacaaagccaccaaaattatctgtacaaggaaatgtaacaatatattccaaaggtgaaaacacataaaacatctttaaaatagtaggcaataaatatctcaattgtatatatttttaaaattatgccattgtaaacagcatgtaaacaaacaaaactcacgttgtcttaccattactaaaagtaattagagccaaagttataacctctgctctgtcaggtatatttcactggcaagtgtgctaagcagttaaaagtttcactcttttctgcagcaaacagagcccactgtgtaataaatagatagatattatctgcatctttcagacacaagtgcttagtttcaaaacagactaccaaaatgtagtaaattcctaactataaataatacggcaaggctaaatttaaaataccttttc

SEQ ID NO: 236531 - DNA, 720 bp, Homo Sapiens
  misc_feature (62)..(62): n is a, c, g, or t
tgcgcccctgcaccatgcagctgccctgcgcatggagccgcgagggacagcaggcccagccntcaggcaccacctgcctgccaggaggttcgggaaactggcgccgcagcggagagggcatctgtccaacgcctcccccggggctcagctgcgggcccccaggcataggcacccatgacccttctgtgttgtttgtctttgtatagtctgcagatgtggatcctgactcctgagagaagtagctcaccgtgacgaagctgcgtttgcttttatcgatttgcaaatcaaagaagggggacatattgggagaaggccccccaaaatctggccataaactggccacaaaactggccataaaatctctgcagcactgtgacatgctcatgatggccataacgcccacgctggaaggttttgggtttaccggaatgaaggcaaggaacacctggcctgcccagggcagaaaaccacttaaaggcattcttaaaccacaaacagtagcatgagcgatctgtgccttaagggcatgttcctgctgcagataactagccagacccacccctttatttcaggccatcccttcatttcccataagggatacttttagttaattgaatatctatagaaacaatgctaatgactggtttgctgttaataaataagtgggtaaatctctgttcggggctctcagctctgaaggctgtgagacccctgatttcc

SEQ ID NO: 236532 - DNA, 737 bp, Homo Sapiens
atagcaaggtgtgttctttggggtatatctcaattctgacttttgaatgtcatcaccagtaatgattctggacttacattatacttctttttggggtattcaaaatatgaattttgggggtataaagtcaggccacaacagcttccaacttttctcatttctcttttggagaatttaaatcacaccaccagttccaccctaaaaaacatgttaaactccattccattagatattttatggatgccattacattgtcctaggcaccaagtttaaacagagattaaagggaagtctctgctttagaagaactgacactccaggtccagaagggagaaaccaataatcacaacatgttatacggctcattccacagtataattggagaggggcttagtctaccattttcaacagcacatttctatagcacatctgatcctctgtcattacctgtgacaattttccagccctctcctgttttttttttttccttccccgatcagcttgggattacaaggtcaatacagtaatttgagcacttttacttgcatcctcagtactcttggcccattattcctctgctcctcctggtcagtttatccctgattttggattaatccagtctctgctttctgctcccaaggagataagcaccacacaatactgaagaaatatgctgatttttgttaaaattggtggttttcagcctcagctgatactttatcaatgctaggcaaatt

SEQ ID NO: 236533 - DNA, 617 bp, Homo Sapiens
tttttttttttttttaactctgaccattccttttaagcttttattgcccatgtcttcgctgagcaagatctatcttgggggatccatgggaagtcaggcacagattgtgattccctaacaaaaaagtcctgaaatccaagggaattaaggcaagaagccagggaacaaagtgcaggagcccacagatatgactcagtgaaaggaggcctttcacagcagggctgggttcattgggtcatgcatttttgccttatgcctcttgaaggcatagcttgtcctcagacgtcagcgtctccaagattctatcccttctcatctttcctatcctgtgtactttctccctacatgtttggctacttccaggattttgcttataacagtgattactctaagttatatctccagccaataaattcttgcctaagttctagatcctaattttgtatttaaattatctctctgcccgtcatcgcctgccacccacaacccaagggttataaggcatgaaaggctatcaagaagttttcatttttatatctgaattctcttcatcttataccatagcattcccacatatttatagttcaccaataaagaaaaaaaatggagtggggaaa

SEQ ID NO: 236534 - DNA, 430 bp, Homo Sapiens
ttccttatatacccttttgccagccaagatactgatattttaaaacaaaatggaaaaatgtccaatacaatattctctttctggaggcttcctacaagtgaaagcagattttgtcattttatttggcctttgcttgtctttgatatatttctttatgtgtttttcaaatacatactgttgtagatttattgtcttgtatttgcaagtatgccggttgagagaactaaaatggttatagtattgtttatcagaaagaggaagtgtacttaagattattttatttatttagatgaaaggcttctacataaatgcactgaaataaatgctagtaatttcttgtatcccacttctttttttgcttctcatggaaatgtttgtacttttttatcattgtcttttatgaaatataatgttctaaaaaaaaaaaaaa

SEQ ID NO: 236535 - DNA, 610 bp, Homo Sapiens
  misc_feature (34)..(34): n is a, c, g, or t
tttttttttttttttaaatagcaatttttaaaancaaggttgaaagtttagagaagttaatttaaaaaatgatgctatatgagtaaaacatatttgacatactatttttagatagttagaaatcaaatgtcgatcacaaaagaatctggaattagaagcgtatgttaaactcatgtccttcatgcccaatatagcaaatttccagactttccccctcaatacactgacatgcaatgaaaacagattaaaagtgactaattttttctggtttaagaaaaagatcctggttactttaagagtactattaaaaatgaaatgaataaaccttgtttctgtcaatgattagaaaaatcctctactggaggattataaaaaacattctggttgctatatatgtggcagcataaaaatgtgaagaataaaaatttgttctctaccaacaaatctagaaaacaaattctctgcaggagagtttgaaaactatgttctaattgagaaatgtactgacaacttacagtttatcattagataatgtattcttagggcaaaaatgccttgaaagaaacctacttgcaaaatactgaatgtatgtttgtgtagaaagatttct

SEQ ID NO: 236536 - DNA, 366 bp, Homo Sapiens
tttttttttttttttaaagtgttttctcttatggttggtttattttatatttacaatctatttttacatttgtttcagtacaaagtgcagtagtttcctggagatgcagtagcaaattaccacaaactgggggagcataaaaacaacaaaaattttcctctcatagttctgggggtcagaagctcaaaatcactttcactgggctgaaatcaaagtgccagctgggccagggtccctccaatggttgcaggagagaaagctttccttgtttttcaagctgttggtggcttcaggtgttccttggcttgtgaccacgtcactctaatctatgcctccacagttcaacagcctcatcatcttctgtgc

SEQ ID NO: 236537 - DNA, 609 bp, Homo Sapiens
tttttttttttttttgatgctgaaaatttaatacagttacctcatgtcacagataaagaacagaaatgacttgaccaagttcacattgttgtttaacggcaggaaaagcactaaagatggatagtcctgccttcctaatttgaatgctcttattctctacaggttagggtcaagttattcagtaaaacaggctatcaggaggttaagcccaaacagtgaggaaacaaattttatgatgcttgtttgactaaatgcatgcagtttacctcaagattaagggatttaaaaaaggttagaaaacagtgtaaccctatctcctggatatatctacagacttgtatttaggaattatgccaggctgttatttctaacagagctgatgatcatagatgtggcctttaaggcaggactgggtatttggttcttaaaaatgattctgtgcctgccaatcttaggaataaataatgctttcaatgatctacattctctgtctacctaaaaagtacaaagaaaaagaatatatttaatcaaagagagatgtgtcccaggtagatggtaagcaacgggaataaagtcatgatatgcccagaataaccaatgatgaatgtt

SEQ ID NO: 236538 - DNA, 466 bp, Homo Sapiens
  misc_feature (14)..(14): n is a, c, g, or t
tttttttttttttntgcttttccccctctatctcaaatgcctcactccgggacaaatattccttcttagcactacttaacataaataaatcaattttggctcttcaaagtcattctgcatataatcctgtcacccttataggagcctactgtacattctcattgtgaaccaatctctctttacattcacaatattatgatggcggggggggaggggctcttccccaaggtaaatgtagctcatttaaaaaactacagtggggctctgtgatctatgtacacatgtatgtcacatatttgaccatttaaaaaacacagaaacccttgagactttctgtaaaatttgggatcataaaatatattaaaaagcagaccaaaggcaaggcattctgttctctgacgtcccccgtctagtttaattcattttcccagtattgggaaaagcaggctcaccttgtctcttccca

SEQ ID NO: 236539 - DNA, 667 bp, Homo Sapiens
tttttttttttttttgtagagatagggtttctccatgttgcccaggctggtctcgaactcctgggctcaagtgatctgcctgtctcagcctcccaaaatgaggcatgagcggattacaggcatgagccaccgcgcctggcctgaggctaactgaaatgtttgccaaagatttgttggaactggtattttgaaatgaaagcatcttatactgtgtttagaacatactagatggtccatagttggaagctgctatcacaatattactactgttatagcaaattcagagattcacactgaatttggttcccacaattctgcattactttgaatagttggtaaaagaattttttttgttttaacagatacatgaaaagcaaagaatttatgaatgaaatcttctaaggatgggctgccaatttttcaggtgtacacagaaatgtatttctctttagaacagtaagctggggagatgaatcacctctggtgcagaccttgcttgggtggccaagccaacaaaccctgcatcattaatctaaatgcatacttggccttctcctgaatcactttgataagaacaatctgcaaaggtgacactgatgagggccttcaaaccaaagaatttccatgtgtcccaaacacctcaagttttctgacaacaaaagctctt

SEQ ID NO: 236540 - DNA, 456 bp, Homo Sapiens
tttttttttttttttaacccaaaataactttattatcgtctccacttttgatataaaagcattctccaaatggggggcaaatgtggcaagtcactgtggagtctgggccccctgtacacccttctactccgaggaataagccctgtgcccaccccagttgcccattgccatgtcctgccaaccccctgccccccgccagggcaagccacagtgcagtacagaagtgaaagcctgagattggccagacacggtgaccacagggcctcttcctgaccttggctgtgggggcagggggattgcacattgcagcttcttgctgtctccaggaaagactgagtaactggggggcccccggggctggcacagaggcccagccagggccatggggccaggccttgaggctgaaggtgcagctgcagttgctttagttgggaggagcctcagtgggccccagct

SEQ ID NO: 236541 - DNA, 794 bp, Homo Sapiens
  misc_feature (4)..(4): n is a, c, g, or t
  misc_feature (6)..(6): n is a, c, g, or t
  misc_feature (785)..(785): n is a, c, g, or t
  misc_feature (790)..(790): n is a, c, g, or t
ttancncagattttagaagtagttaaaaatagtattagaggattatacatacaccagtttaaaattcatatggattgtatttttttcttttaaaaatggcaaaatgtttttggcaaatgtaagcaaatgacttggactgcgttgggtctcaccagctctgagccgggtcagtcatagccaggcgaggcctactgcttcctgaggtcactctgtggggctgggggaaggtggatgcccgccactgggaggtgctggccccccacctggctccccctcaggccctcagtcttgaacatggaaatggagctggtgagaggtgccaattacaaactccagcacggatcacccattagcatcactgagagaactctggggccttgaaccacatgcagactgggtgagtcgtctacacagtgacccatattgcgaaagtcagagagaggagtggtgcttccacccctccgacttgtgcgcccgccgccattttttttttttttattttttttattttaggaaacttcttttaaaaaatgttttctgttttgtatgtgtatgtgtatccagaaatgtccatcctccaagctggccaccactgttccctgaatttggcagtgcctgttgcttgcagctgtcagcatcctgaaaaccatgaggtgccttcaaagtagactctgtggcccagccgcgcgagtggcctccaggaccctgccgcacgatgtcattctctccttattctgaatcctgtcggctctgatgctgacctcgtgccgcctcgtgccgaattnctggncctc

SEQ ID NO: 236542 - DNA, 581 bp, Homo Sapiens
tttttttttttttttaaacgtttatacttttatttattaaaactagataatgcatatccacaataaacccacagtctcaaatatagagacattaaaaaaaaaaaaggaatcttttccactgagcctttttgtctttgggaactaaagacagcttgagtaaggtgtccttctgaggctccacctctcaccagaacttaggggtactcctgctgtctcggtcatgcccatcaacactgagactaccacactataagtcaccatccatcaagcatggggtccctacacttcctgtcatgttcctgtcaaataataggttcccgcactactgcagtcgcccacttatcaggcccaaggtcctaaaaaaagcctggtctcgcccgcaactcaaaccacacgtcttaggatgccggaccggcgtcacgccccacgtcccgctgttgactttatccaaacagccgccgccgcctcagcccattctgtggtcccgctggtctggctctgcgtagttccagtggagccaccgaacactgatactactttgttgctcagccccgcaaggaaccggccacttgccaccatgg

SEQ ID NO: 236543 - DNA, 458 bp, Homo Sapiens
tttttttttttttttcttaaggggtgggagtcttgctatgttgcccaggctggaggactgagactcagtctcaaaacaaaccaaacaaataaaaaaaccaaagcaaaaagacactgctcaaagctaatccatgggcagtacctgcattaaaactgttatctgcaaataaggcaaaaataaatactgtttgttgcagagtggaaatgcatcctagattggattaagctaagaggcttgagaggtggcaaccacggacttctgctcttagacatcctggtttgtaatattttgttgttctgacagccaacttgatcattcttccttgcattataaattttcacagtaaatcttaccttcggggtcagtggtaacacctataatacttgtttgtatttaaaatcctctaatatccaatacatttaatcacagcctcactgacatctcaattgcccttgaga

SEQ ID NO: 236544 - DNA, 640 bp, Homo Sapiens
gatatttaatcttacaaaaggaataatgaatataaaaaataaaacaaggagttaccatttttcctctatcagaggccaaaaagttcgaaggcacaatgtttgcaagaatgtagggaaatggatatgctcagtttatgtacttttggcagtcatgcatactggtgcaacttctttgactttataggcaatcataggcaaatttataaatgtacacaccctcttaagaggatggttttattcactgtattttctgtgatacaatttggatttttaccatgtacacatattattttttcagtaaaaaagttaaatcattaggaaaacattaattctcattgacaggaagaccctccttcctattcatacagcaacattttacttcctatgtcacaccatgcaacagcccccagcagcagtaggccagagttgttttcatgtcccatatcccagctaggattattccagggctctgaaggcatctgcttagatctatctatgcattcatattttttcccttccttccttccccttatttcagaaataattcaagaggactgatgataacttgataaagaagctctaaaataaagctgatcaaagtaacatacttctttgcacaattcgtaatattaaattttga

SEQ ID NO: 236545 - DNA, 530 bp, Homo Sapiens
tttttttttttttttctggatgtctcgtttttatttttttatttttttattctccagatctcaagacggtgtctggcacataccattcaatacaagtttggtacctggaacccactgaatatgcatgtccagtaactattaactacatgtgttggtgcaagggagaaggtcgagcaaccggatctgctccatcatagcccgtctcagtcgcttcattcaagtcagcggggtgaggttgaggggattccaacttcacaagggcagatttctcatggactctctttctctggttgtactggaacactttctggcgttattcctctgctgggacagcatgaacttatgaaacgtggtcctgtctgccctaaagccagggtctcaccgacaaggacagcgatgctggggcgagaaataaagttcgtcctgggcctgcgtacggtacagcgcccttgggaagcccttgtggagttaagggtgatgcccacttctttgtctccctcattctgtttcggtggctctctcgttcccag

SEQ ID NO: 236546 - DNA, 681 bp, Homo Sapiens
  misc_feature (32)..(32): n is a, c, g, or t
  misc_feature (390)..(390): n is a, c, g, or t
  misc_feature (528)..(528): n is a, c, g, or t
  misc_feature (531)..(531): n is a, c, g, or t
  misc_feature (563)..(563): n is a, c, g, or t
aactcattgtgaatcctgagcttggattctancacttattcttttagcttttggacttcaggcctattgtttcaacacacttgcgggtgttggtccctggttatcacagctgtgccctagaaccacaagaatttcattttcttgctaagctcttggagatcagtaggggagaagcctttgcttggttttctggctgttagattagcaaaaggccctttggaatttactgacccgtctcccaggcagaagggaaaagtgacaagacaggtacaagcatgtgcgggcagcaaacactatgaaacttaatggaagaagtgacattcactctgtccctatgtggttcccttagtaatgcctttaactcaggatcagatacaaactgttttacanctgctttgttttaataaaagagcttttatctttcattgtggaacagtgcatcttgaaaacagcatttggccagagggctaggcacggttttaaacttgcatctagagattccttcactacaggcaaccaggactgggnccnccccactccggtgttggccatgagtcgcctcncggcccctctgctgcctatggccagcaacctcggccccagggcttccgcagatcaacactcacagcccctggaaggagtcacactttcatcttctgattttgcaaaggaagacatctt

SEQ ID NO: 236547 - DNA, 573 bp, Homo Sapiens
  misc_feature (555)..(555): n is a, c, g, or t
tacagttttattaataattattatttttcgtataccggttgcactgattcatttttgctcttttattttttaggcagatggctggtttttgtaggattaagcagtgaggaaaaacagcaaactaaaaatgctacttcaaatatagcaacagtcactacataaggcttaaatcaatatattgcaagtaatttctatgaattttgaacaatacaatgtagtgtatgtggaaagatcttgcctaataagtttcattctactcctcaaagttactgaagtcagtcaactattaataacagaattgtttttatagaaagattccatcttctttactgttagatgttatacgtgtcttgtactaggataaaataatgagcattgtgcatcgcaccttctgataatctcatacttctataaatactaagataaataatcactcttttaaatttagagagagttggttttaggctaacgattttttttcttctttccaagacagagtcttattctgacgcctatgctggagtgcagcagtgcaatctcagctcactgcaaccnctgcttcccaggttcaac

SEQ ID NO: 236548 - DNA, 456 bp, Homo Sapiens
tttttttttttttttacaatgtaacaaccttttatttttttgaggtttatcagttttaaatggcattataaaaagatatgtagatatgttaaatatatttttctgactttttattgtgataaaatacaaaatttaccattatgagatgaaacaatcttaaaaagtaatgggaagacaaagataaagtaggcaaatattttacattactcaaattaccaaaacggacaaacaaaaacagaacatctgaatagcctatatttatgaaaaaaacctgaatcttcctacagaataagcaatggaataacaaatcttaaagtggccatgtatgcaagggaggcagcataggaatgggaaaggaaagaaacacatcaacagatgcaggaagcaggtcatgttcttgtacttggcgaaaggtttgtaggtgttcattacaatctttttaaaggaggatgaata

SEQ ID NO: 236549 - DNA, 594 bp, Homo Sapiens
  misc_feature (40)..(40): n is a, c, g, or t
tttttttttttttttccaatataaacttttatcagtcacnttgaacaaaataactagaaatatttcatacatttaaaaaaagaataagaaattatttacaagttaagccgcaaacaattcaccaaaaactgagtaattaaggttacttaacaaacaattcttctgattagttggaaaattgtttcattactgttcacaaattcatacctgatttactctgtagacaatatagattaggcataggataaaatcctctgtatttggttcctcccaatcattggtcaaagtcatctgacaacagactatctgaggaaagtgtaaatacaaagtcacccaataaaacatgaataagttttgcaaagcacagtaaaggaaaaccagtttgttctgaacactttattgctaaaaggatgtaaagggtaagaggaaaaaggtgacgaaacactccttttgatatgcttgttggggagtcaggatgaacttccttggctagggatagaaggaagagatcacctaaacttcaaaaaccacaatacaatttgcatacttccttggccagggataggagagaccactaaacttcaaaaaccacgt

SEQ ID NO: 236550 - DNA, 736 bp, Homo Sapiens
attaccaagacatggcaaaaagagtttgtctgaattgtaatgttgcgtttgtgaacctattctgggattttcagaggtacaaggttagaatgctacaatgttaccactgtgccttccaatgtttatatcatcggaaacataacataatcaaagtggctgtgatttaacaaaatgattaaagtgttacctacctgtgtagccgaagtagtgtgcagtgaggcgtttctgaatacatggtcagatttttggaaaaaaacaaaaacaaaaaaaacaagtaaagttcaaaaaccgtcaaatgagaaaattgcaagtagtgtgacagagctgattgattttgttgctttcttgattttttttttcaaaatgggtttactaaaatgtagatgacttaactgcctcctccttcgtctgaaaaatgccaatattcaatcatcatgcagcattataacaagccttataagtcctaaagcattaagttgcacttttttgaggaggggtagtgcagtatttctctggccagtatgaatgaagtttatacttaccatatttgatagaaacatagatcaagctatggcacagcgactcatcagatagctagctttgacgtctgggcacaattgaaccaacttccatcgtgaatctttataatgattgactttggtgtatagtgcagtaaacaaatagtgctcctagttaagtatttgtcagcatccttttgtctctaacttgtttctat

SEQ ID NO: 236551 - DNA, 447 bp, Homo Sapiens
tttttttttttttttaggaatgtctaaatcagattgtatgtttggatcgccctcacctgtcccattgaaaccaactggtttatttgttcaggtaaacctagctcaaacggagaaggaggcgtgtctgtcatctgttcactcaggagctgctccctgagtgctctcagctctgcaccatgtccttgcgctgtgctggcagtgtgggccctccttcctctggctgacctgcagcactcctgtctgtcctgcgcgggtgtggtgcgtggtgaggcttactgggcaccggatggcggggccttgtttcagaactcctgcccatggtcttgcttttcagttaacttgcaaaattctgccacccacatgccttatttcagctctccttggatatggtttcggttttaaggctgtttcagatgctcttcctttcgattttgtaaaccagtctat

SEQ ID NO: 236552 - DNA, 400 bp, Homo Sapiens
  misc_feature (376)..(376): n is a, c, g, or t
cttgtctattgtatatataatctatatgattaaagaaaatatgcataatcagacaagcttgaatattgtttttgcaccagacgaacagtgaggaaattcggagctatacatatgtgcagaaggttactacctagggtttatgcttaattttaatcggaggaaatgaatgctgattgtaacggagttaattttattgataataaattatacactatgaaaccgccattgggctactgtagatttgtatccttgatgaatctggggtttccatcagactgaacttacactgtatattttgcaatagttacctcaaggcctactgaccaaattgttgtgttgagatgatatttaactttttgccaaataaaatatattnattcttttctaaaaaaaaaaaaaa

SEQ ID NO: 236553 - DNA, 686 bp, Homo Sapiens
  misc_feature (42)..(42): n is a, c, g, or t
  misc_feature (47)..(47): n is a, c, g, or t
  misc_feature (655)..(655): n is a, c, g, or t
cttccccagccccagggccagagtgggggctggagggaaggncaggngctacagtagtagtgggggtatatgagggaaggctgcaaggatgtggtagctggagttttgagagatggataagagttttccaaggaggcaaaagtggcagaaaagctttgcaggtgaggaggagcagcagaagcttaacctgcatgagaatccctctcaccagtcagaaagttgaccctgcacagccaaggggtaagctctgaccattttgcaggggacagaactgagacccagagagggaaaggaacttgcccactgtcacactgcatggaaggggcaaaactgtaggctccaatacttgggctcttaacctccttactctgagccttctcacgcttggcatgctgttccctctgccaggaatgcctttccttcccttgattgcgtgaaaagttcctgccaggtttggtgtcatccctttgtgccccttgtagggtgaggacagaaagggtcccattggacaggtgggaaaactgaagccctaggacactcagataccattaggatggactgggaccccagcctttcctgccccctttcaggatcccaaagagatacacgggctcccctaaaaggcagagtcccagccacagcaactgctcttgtnccttggcttcctccagagaaacagagatcgg

SEQ ID NO: 236554 - DNA, 601 bp, Homo Sapiens
tttttttttttttttgctaccatctaaaaatataaaaatcattcttagctccaagatggatttggcccataggttgtgcggtctgccacctcctagcttaaaacaacatcctaatcccaatagtccgtctaacctaccttttgtttattttgttgggaaagggggctctgtgaattatcacctatttaattcatgttaaaaaccactatgcaactatttccaatttccaaaagaagaatcccactcaggcataggaacaccccaaaaactaaacaaaactgacaaaaaaattgaacactgcctagagcaaaagtgccaaataggttttaccttcggagtcaattccaatcagcgttagtaatggctgcctagggcactataccaagaaagattttgaggatatttttagagaggatttcatagtattggaagggaaggggagcagcattagtgtcttgtatttgccatcctagtctagaaaaaagataaacaaagggccattttatttattaaaaagatatttccaccattttttaaggtagataggattaaggatggttttctagatctaaactagagtggtatttttcataagtagaaa

SEQ ID NO: 236555 - DNA, 621 bp, Homo Sapiens
tttttttttttttttgctatgtaactgaccacccaaaactcagtggttataaacaactaccattgtatttgctcaggagtccataatctgggcggggctcagtggcaccgttccgttcatcttactggtggttgctcatgtggctgcattcagctggctagttggctgggatctgggctcaattgaacctctctctctcctcccctagaatctcagggtctctccctcttcctgtgtctctctacacagtctcagcatacagtctctccagcagcataaatagactttctttttttttttttttttaccaggtgacagggctttcaagattacagaagtgaaatctgccaggtctacttaatgcttaggtctggaactggaacgagatcatttctgacacagtctagtggttaaagtgaatcccagggccagccttgattcaaggagtagtgactatacgagtgtgagtataaaagacatggttcactgtgagcaaccaatgtagccaattaccactgacacgcaacaagtcacctgatctgtacactttgatgttatgtttctcatccattaaaagggaaaataataattcctattttatagagatctcacagttaaacg

SEQ ID NO: 236556 - DNA, 347 bp, Homo Sapiens
ggccgcgcaggtggcggcgctggcggcctggctgctcggcaggcggaacttgtaggaacgcggggcttcttggtggggccggagccgagacccagccggagcgagcaacaggttggtgaaaaccctgtgtccttggagaaagctggttcccgttttccagagggggagcccagagcttgaaaggccgcggttggcacttcgagaaggaagtggagagtaaagacagcgcctggagcgatcgtagaaacacagaatgggactggggaagccctttggaaatccagctgcagaaacagacaccccaatgctatttacatacagctctatatatataaaaaaaaaaaaaa

SEQ ID NO: 236557 - DNA, 751 bp, Homo Sapiens
aattatcttctctaggtttccccaaattagcatatttgttaatcaaattaattaagaagcttttcaaaataaaagcaatgctttaaataaatatattctttcataaccatagaacatttagttctgttggaggtaacaaacattacactcaagtactttatgaagacattagggtaaaaattacctagatgcaattataaatgtaccctaattagtcatttctttttgcatgtatgcttttctgtgtgtgttagggttatatcatagatgtgtggtaactggttagctcttaaattatcacaaagatattatcggacccacagaatttatatcagctcaatgtgatgatatgatattgtttgaacaatatctttaaatttaaatttagtaccctaaattacatccaaacaaagccaacacctctaagctgccatatctgttatagaaaatgagtgctagactctcagcttggaagaatgagaccttcctacaaatctcgaaattatacaacaatattattgtcacatcaaaatcctaattgcaacagagctttcagtgtgtttcagagtaccacacaggtaggtataaattcacttatgatcagcttttctagtgaaatcatatgtttagtaaatgactacagaaaacttcctaaaaattgattttatttaataaatattttttaaagttttctgactgaagaaatgaccttgctaatctttttagaaattctcatcatctgtttaatctt

SEQ ID NO: 236558 - DNA, 711 bp, Homo Sapiens
  misc_feature (20)..(20): n is a, c, g, or t
  misc_feature (54)..(54): n is a, c, g, or t
tttttttttttttttgtganaaagccttcagaagggtttctatatcttaaagcntaagcagtgtattttgttgataccagcaattaaagttgaataggtaagaggtaagtctctgtgcatagaagctaatacctggatgtgaggtctagtggagagtgagtggacagtggtggggagggagtgatacagtgcatatactcgaaaactggtttctgtcattgtcattgtttggtactccctatgggagacattattaactgtctattaatacagataattatccctttcttttgctaacagaaccccaagcaataaatcctaatttgtttaagccaattatgatcagctgctggggatggccatggcacccggtctcataggggagtttctggagaaacattggttttcctgataaaaagggacagacacgggtaatatcatccctacatctttctttgtactttgttgaaaatatgagacctacaggtgtagtagacactcaaatcctgaagtagccagcatgagaaaaggccaggagaacagtagagaccctggacctgaccttgtcaccatagctgcttgcctcctgatttttggatatatgagaaaaataaagctctgctagctcacagggcatgtctatgcaaattttaaaaagacacccattctcagttgatattatagaattaacattaatttcttcagttgtaa

SEQ ID NO: 236559 - DNA, 532 bp, Homo Sapiens
  misc_feature (193)..(193): n is a, c, g, or t
agcgcctggacccagcacggagggacttctgcagagagagtgcgcagaaggattccgggagcacagttccgccgagtgacactgtttatggaccgtaagagctgaccgctgtctgaaggcttgcccacagaccttacactcaaaaggattctctaaaaagtgaattctttgatgttgatcaaaccatgccttnacgcctaatggcttttccacattcactgcattcataagactttgctcttgtgagaattcgctcatgccccaaaagcaaagatctttgattgaagggtttgccatcctcatcatatctgccctgcttccaccttgtttgcgcattctgatcttgaataaggttaaggttttgaaggaagcccctgctgtattcatcaccactagtagggaaagtaagcctgcaactgtccacaaattctttacacttatgtaacttttctgaaagtttctcagctgattcctgcattaccactgatatcttatatgactctaaatcttcagaaaatttcaaaaaaaaaaa

SEQ ID NO: 236560 - DNA, 344 bp, Homo Sapiens
tttttttttttttttgttagccatgctttcctgtttattccacaaggtgaagaatattttccaaagatcattttgtctggatacactctcttcttgttggcatcttgatcagaattgtattaagccagttcatttatttgggaagatctggcattcaacgatattcagctttccaacccaggactgtggtctgtctctccatttgctggagtctcctttaagcccagcttcctcacatgcctgcgtgctgagcagtgcttctgtccattaaatactccaaaaccctattttcaactgctcactggacacatttcaacctggacaaacttcttggtcattcttta

SEQ ID NO: 236561 - DNA, 654 bp, Homo Sapiens
  misc_feature (74)..(74): n is a, c, g, or t
  misc_feature (105)..(105): n is a, c, g, or t
  misc_feature (111)..(111): n is a, c, g, or t
  misc_feature (647)..(647): n is a, c, g, or t
tttttttttttttttctatacataaaacatttatacctgttttcatttttttacattaagatgtaaacatcctnttatccaaaatagccagtgaaaaaataaaancaaaancaaagtaagcctttaaaaatagttggtgaggagttttcaagtgttcttgctgaatgtatccgaataccaaacattgtaactcgtcaattcaatgacaaggaggtagctcctgaaccaaactggtgcgagctgtgtcaatacagagcaaaatctcaattaaccagaatgctccaacttccctatttacaagaaaattctgttttaaccattagtttagaaaacctttctttttttgagacagagtctcgctctgtcggccaggctggagtacagtggcgtgatcttggctcactgccaacttccacctcctgggttcaagcgattctcctgcctcagcctcccgagtagctgggactaaaggcacgcgcaaccacacccagctaaattttgtatttttagtagagatgaggtttcaccacgttggccaggctgattctcaaactactggtctcaagtgatctgcctgtctcggcctcccaaagtgctgggattacaggcctgagtcaccgtgcctggcctgaaaccctttctaaatnaaccact

SEQ ID NO: 236562 - DNA, 598 bp, Homo Sapiens
tttttttttttttttggagagacggggtctcgctctgttgcttaggctggtcttgagctcctgacctccagcaatcctcctgccttggtttcccaaagtgctggaattacaggcatgagccactgtgcccagcccctttgaaaatattaattctgacttcctataattcccttctatctactcatgcaatacaattatattttctaatatacttaaaaattagaaaattataatcagagtacagatgtttctaccagattaaagctttaaattcaacgtttaatacctaagcttttaacctgtcttcagcaatttcaaaaagctaatacaaatgatcaacaacttgtatatatattttactagaagtgtactctaccatttctagaatacgtgtttagctttatgacataatttcaagtacgtatttagaccccaaaatatttaaaaaagcagaaagtacctatattgggatgatttaaaatcttcattattcttacttctctgaagagctaaaaaaaaaaacaaacaaaacacataatccccccaacacaagttattaaacattatattccactgttgtaatataaatttaaatttt

SEQ ID NO: 236563 - DNA, 623 bp, Homo Sapiens
ttttataaaatatctagaacaggcaaatcatagagacagaaaatggattattgtttctagaggctgggggaagaggaggattagagtggcagctcactggtatggagtttctaggtagatggaaatgttctggaattagatagtggtgatgattgcacaactctgtaaatatactaaaatccactgcatcatttactttaaaggggcaaattttatggcttgtgaattacatttcaataaaaagaagatgaggaaacctaggatatgtcacaatcccatgccacaaactacttacacttccaatataaaaactatatcaacaatagtttacatcacgttcattgcttgctaaagtaaggtcatgaatgtatcaaaatattttataaaagttaaaatttaggagatccatcatttctcttttcaatccatcactgattcattcaatatatatttatgtgtatgccaggctcttcatcaggtaaagtgtttaggagagatataaagataaaactgatgagaattctgcacttgagctacagcatactttccaagaattacagcatgagatataaaatgaaaagaaggcttggaggagattcacacgaaatagtactgttcaggag

SEQ ID NO: 236564 - DNA, 484 bp, Homo Sapiens
ggcccccagcttatcttcaaccccttcttgtcagtactcctgtgttctgcttttagtctaacattggctgtgacctgacttggcttgttcatttcagaaatagccactttctgacatgtttttctaatttacatctttgtattttgatgtaatttctccctttctcaaagtaaaagaacattataatgatttcctagtggccaattttattttatttttattcttacaaagtttcatccatacctagccacatcattttgactatctccctaaccatcttagaatctaccatctttctgacctttgttttctgactaccatttgtaaaccacttgcctatgttttattcagatatcccttatatcatgatgttatactgttattcagagtaatttcattttttcttttttgagaataggccttaacaccagtgtcagagtggtttatagatgtgtgctagctattttagttcatttaaaaaaaa

SEQ ID NO: 236565 - DNA, 469 bp, Homo Sapiens
ggaaatgtcctcagacccagtaattccacccctaggaatccagcttacacacacaagaaagaaaagataaatgtacaaggttagtcactgcacagtgagacagcaaaagattagaaagaacccaagtgattattgatctgggttttattcctttatagcccaaccatatgatggaatactataatgttgtaaaaatgggttaagagttctttatgaattggtgtggaaacatcgccaagatatgaaagccaaatgcagaaaaatatatgtggtatgctattatctatgtgaaaaagacattactattctctggaaggataaacacaaatttgagaatggtggatatctggggtgagaggtatccttttcactgttctttaaaagttttgatattttggtgtttgcctattcaaaaaaatggttaaaatcagttgccaccaattaaaaattaggagaatgcaaaaaaaaa

SEQ ID NO: 236566 - DNA, 558 bp, Homo Sapiens
  misc_feature (15)..(15): n is a, c, g, or t
tacccctttctccanccctgactaaactaccacctcaggtgactttttaaaaaatgctgggtttaagaaaggcaaccaataaaagccagatgctagagcctctgcctgacagcatcctctctatgggccatattccgcactgggcacaggccgtcaccctgggagcagtcggcacagtgcagcaagcctggcccccgacccagctctactccaggcttccacacttctgggccctaggctgcttccggtagtccctgtttttgcagtacatgggtgactatctcccctgttggaggtgagtggcctgtaagtccaagctgtgcgagggggccttgctggatgctgctgtacaacttctgggcctctcttggaccctgggagtgagggtgggtgtgggtggaagcctcagaggccttgggagctcatccctctcacccagaatccctctaaccccttgggtgcggtttgctcagccccagcttatctcctcctccacgctgtgtaaatgctccagcactcaataaagtgggtttgcaagctaaaaaaaaaaaaaaaaaa

SEQ ID NO: 236567 - DNA, 430 bp, Homo Sapiens
tccttctacttaactacttccttcaccattaaatagaatacagtaatagctatttcaaattaatgaacataatacacattacttttgtcaatctgtgcaaatgtatgttatgttgtgtctaaatattcatcaaaatatttttattcctgaataccaaatttcagacaatatacaaaagcacatatatgaattgtaattaatcttcacctctcagtagctcaactcctacctcctgacccaaaaggtctgttgcccatagaatggtgcatactttccagacatgtttctgtggatgagatgcacatgaccatgttcacctacatatgcacgtaatctttgccaaaaagtgcaaccacattaatcatctccttttgcaagctgtcttttccacttaatattcttctgaggatttatattagcatcttattag

SEQ ID NO: 236568 - DNA, 640 bp, Homo Sapiens
gatttagcagtttccattaagcactacatcccactattccatttttaggaaggacagatgcttgaggccataggttaccagctcttgtttggtctttaaaaatgcaagtaagttgctaacattttcaaataagatttcaacataactctgacaatgccacaggacacacagtttggctccatgtacacgtacctggggacagtggcagtccccaggtctctgccatgccaagatcaggccccaaggccattcagcaccaggcacaatctctgctttcctgacaactggcctgctttgcttatttaccttagtagccttccaggtaactgacactggtgtttgaacgcttaactttcacaaagcttgtttaggcaaataaaatatgttcatactgatgctgggaattttgttactaattttttcccttaagttcaaataaaactaaggagttgataaaagggtattctgaacagaaacgtaaaaccaagagcacagaaacacctgctgtgtttcttctgccagtaacagtgacagagaaccctcaggcccttgctcgtccggctgcagcacacacggcctcacctgcattgctccccgctcctctctgctttttttccttggctagttgaatggctcggta

SEQ ID NO: 236569 - DNA, 551 bp, Homo Sapiens
  misc_feature (71)..(71): n is a, c, g, or t
tcagagctagcaggttcagtctgtgtcacgaaccatttctctggttccctgcagacaggaaaggttgtccntaaggactcatgagattaggttgggcccagccagataatacatgataatctccctcctcaaggtttttaatattaaacacatctgcaggacacattttgccatgtaaactaacattcactggttccagggattaaggaatgaacctcttttgttggggaagggtggcattctgctgaccacagcactccaaccaaaagccaaaaaccaaagcaagacttactaacgcatatcaaataaattaaaggtacaaaatcgtgaatctcagttatcttaaatattccaatactatttacaaaattattcaaattctcacgccttccaactcaaaattagcaatctaaagtaatttccatatcctagatggaaaccctcatgctaaactgtctgattatgcatggttctaaatggtttcagtggcaaatacataacattgtactactgattaaactgaacttaaaagcatcaataccagcattgct

SEQ ID NO: 236570 - DNA, 542 bp, Homo Sapiens
gccaggcatggtggtgcatgctgtaatcccagctacttgggaggctgaggcaggagaattgcttgaaccccggagatggaggttgcagtgagctgaggtcgcacgattgtgctccagcctgggcaaccagtgaaactctggggggaaagaaaaaaaatgtattaaatctctagttttagagagttacaccataacatccctgagtatggtcaatttcaagtcagctttagtgtgacaagcccctaggcccaccatttatgtctttatatattatggcaatatatgatccttatatattaaccactaatcgctgctgtttttgaatgttatcttttctgaggcagtcttgctctgtcacacaggctggagtgcagtaacaccactgaagctcactgtaactttgaactgctggacttggaatcctcctgctgtggccttcaaagggctgcaattacaagtgtgagccactgcatcccacctcacattttattctttggagattttttttgacttggattaaaaaactttatatttaaaaaaaa

SEQ ID NO: 236571 - DNA, 346 bp, Homo Sapiens
gcagtatcagaagccccaggttgcctgctgggagatgcataataaagctcagtcctgaactaaaccaacacatcacctggccctgggtatagaagtagtattgtgagggggatcttgggtcttccaggccaggtgtaagcaaatgtagggagttcagccccaggagagataaaagaatcatgccatggccaggtgcagtgacttatgcctataatcccagcactttgggaggccgagatgggtggatcgcttgagcttaggagttcgagaccagcctgggaaacatagtgaaacctcatctctacacacacacacacacacacacacacacacacacacacacaca

SEQ ID NO: 236572 - DNA, 435 bp, Homo Sapiens
atcaccactaccaattgcattattgaccctagtgctttacttttccttatgttcactccatgaccctatgcagttcctttcattaaagtgacagagatatttccctactccttgactttgtgtttggctatgtgacttgctaaggtaaaagtgataacatatcagtttcaagcctaagccttaagaggccttgggtatttttatttgttctctttctatctgtgccatttccatgagaaaaacatgtctctgctagctcattggttgagggaagatgagagataggagagtgagggccaccccagctgagttaagctgaattcaatgaacactgtagagatgtgagtgataaaaaaatgattgtggttgtaagccagtgaacttcaggatggtctgttaataaacattagttaaccgaacagttatatgattaaa

SEQ ID NO: 236573 - DNA, 459 bp, Homo Sapiens
  misc_feature (53)..(53): n is a, c, g, or t
aaattaaccacattaaatattctgtccattaagattccccaaagatggtggancgatgcagtgttagtgtgagaagatatttgcagcatgcaaggcaagatgacaatgcactaataacaaaatttcataaaacaatggacttggggcttgggaaaaataattatgacatgctttctgaagtgtccccagatagtttcataaaaaatggagcaaataggctaaagaaaaacccatagacatcatgttcaaaagaactgatgacaaggcatgttcataacccataaaatacaagtggatgcagctaaataactgcaatacttttgaaagagtttggcaggtttcgaagatgtgaggagctacaaagcagattaaaaaaaaaaaaaaacctaccacacatacatttaaatcaatacaaacatgcctgataattaaaacaaaaaaggcttgaacaagcacttt

SEQ ID NO: 236574 - DNA, 579 bp, Homo Sapiens
gaaacagaaatgagtagaaggaaaaaaaaagagttcctccaaggtcatatatggtcagtaatgaagcaaaaattcatggtatgtgacttaaagactttctaagacattgtacccatgggatgtttccaagcttcttgatctttaatcttttagcaaccttctgatactggatttaccttcctaggtgtggtgccctccttctggaatttagatctctggggcaaaccctgtcaggatgtgcctctgtgtagttaacactgccccagacagcagctctgatttcagtcacagttctgctgagaagcctgtctgcccctggcaggggtgaggggagggttgttggtggcagatgtagtcagaggcagaggagaccaatggcagacagggtggacctgcaggaaggtagccagaaggaaagaccttgggttttacccaaggtcaaggtggctgtgatagaagagcgaaaggcaaaagtaactaactgaatttcagaattcagaagtaaaagagaaaggaggaggatccctggaccagggactttcacaggaaccaaacatgattcatgaaaaaaaaaaagca

SEQ ID NO: 236575 - DNA, 517 bp, Homo Sapiens
ttaattaaaaagaaatggtcaaaaaagctagttaaccaaaaaaagttgagatcaggtgcggtcatggtggtatggctgtcgacattaaccaaaacagaaacagcaattaatatacttcaaaatttagtaggttgacaaagaaatcaaaatcaagggcatgagactcattcgtctctgggtatgaaaaaggattagattcaacttatcacactaaaaaaaggtgatgcataaatgtaacaataagtacattctgtattcaattgtaaaagaaattgtgtgtccattgaaatagtgccctttcatctccccatacaccttataccaccccctcccaaaaaatatcctctcgtgtcacagcttatgagggcatgacattaatgaggtaaaaagcaagcttgaaattttcccaggaaagcaccctaccggagactcatttattgtcattgaagcattcctttggctgacgaccagaagttggtggtttcgacttaagaggccatgttacatgaaaaaaaaa

SEQ ID NO: 236576 - DNA, 555 bp, Homo Sapiens
ctgtgcgccagggacacagcagtgaatagaacagatggagcccctctcctctgtagcggggggctgcaataggggggcccactggacaaggagcacattcccaccagagagaacattctagctgggtgagcggcctgcagggggccagcctgggggaacctctggagacggtgggaattgaacaaagcctctggggaggccaggcacggtggctcacacctgtgatcccaacactcggggaggttgaggctacagggagccatgatcacaccactgcaccccagcctgggtgacagcgagatcctgtctcaaaaatttaaaaactgggccaggcgcagtggctcatgcctgtaatttcagtactttgggaggccaaggagggtggatcacttgaggtcaggagttcgagaccagcctggccaacatggtgaaaccctgtctgcattaaaaatactagggattacaggcgtgagccactgcgtccagccggtaggtgctatttttaacatacccattttataagtgaggaaaatgaggcacgaaaagaaaaaaaaa

SEQ ID NO: 236577 - DNA, 575 bp, Homo Sapiens
gagatttaaaactcactaaggaaaaaaaatcacagcaaaagcagtaggttaacatcaggatatttatattcaaggctctatggtatcaagttttttttctctttagagccaggcatggtggcatgcacctgtggtcctagctactcacgaggctgaggcaggaggtttgcttgagccccagtgcttgaggctgcagttagccgcgaatgcactgctgtactccaatctggaaaacagagcaagaccctgtctctaaaaaatttgagattttttaaagtccatatttttttgttatttaaacgtgatattattcaacattgatgaacttgggtcgtgagttctaaaagggattcaaaataaaatggcattttcacttttttaaaattaagatactttttcatgatcaaaaatatgttgtgtctccctcctgaccctccttttcaggtaggtagcaaacgttgcgaaatttagttggcatatgcttcagacaaccttttacttaaatcattatcctcactgctatctttttttttgaagttgtatactcctaaaatgttttaagcacttaatttttc

SEQ ID NO: 236578 - DNA, 545 bp, Homo Sapiens
gaaacagtgggactacatcaggaccagaagacagtgacacaaggactgcaaatgttaagactaggagtagcttttcacatggagcttttatgtagaggacgtctccttctgttgattcctacagccgagacaagatgtgatcacaggagactccaaaatctcaaactgggcttgagtaacaccctagataaacatcaggaaccccactgaggctgaagtactgaaactgtggcccatgtgaaaaagaggtgcaagtgcacaaagattcatgcagagcctgctggaacagagggtggtggcggcgggttagtccacacttacacaccagcaggtatgctggggaagggccccccaggtggagtgcctgacatagggctcgctccagaggcgtctgactcagaagctcctgagagaggtgtctacttgaggtggggaggagtactatggttaatgaatacaagaaggtgtttcaggataaataggtccaggagggttaggtcattttggttttgacctattaatacttaacataaatgaagagttac

SEQ ID NO: 236579 - DNA, 453 bp, Homo Sapiens
atgagtgctgtaagagtttaattgtaagacaaaagcactgctacattatactttaaacataagtcatctttcagaaggaaggattcagtgcaaattaaaaccctatgaaagcccaactgtaaatttcatatgaagactctagaagtaaacttctagaactggaaacacttggttccaacagaatttgcttggggagaatatgtcttgaaaatgttaaatggtacagagaacatcatgtttaagtcaaccagatactaaaaaaaagacatgctgataggtcttaatacataaaactaattgattagcagtagcatgctttatatatcaatgattataaaagcaatttacaataaatttgagcatttctaagttttatttactgccttagccaatctcttaactatactgtaataaaatgccattcttccaattttttatttttttttttttttg

SEQ ID NO: 236580 - DNA, 485 bp, Homo Sapiens
caggagaatcgcttgaacccaggaggcagaggttgcagtgagccaagatcgcgccattgcactccagcttgggcgacaagagtggaaactctgtctcaaaaaaaaaaaaaaaaaattcagtgaaatacacctttatatatgagatccaagtttcactttttgtgatataatgagccagttttctcagtaatgtctactaaaaaaaaagccattaacctttctctaatatttgcatgattctaataaaagtatgtcaacttcttaaaatgttttattgaaatgtggcattcctttgaattttatgacattaaaataatccacgacatggtacagctcttcactttttcagctttttaaatgtccattaataagtttgaatacgttaaaattatatgtttaacctcaacaaaataaatggcaatatgttcaaaaaaaaaaaaaaaaaatggtggagcggcggccgctccaacatcagaatggtaaca

SEQ ID NO: 236581 - DNA, 752 bp, Homo Sapiens
atcacatcatgtgtagctactgggggggtggtgaaaggctgagtacgcatcatgttcaggtagtagggtgttaaacgaaatagttcctcacagcaatgcccaaagtcatccttggtcacaataaaggagaataaagggaaaaaagtatgattattgtattagattgtggggttgcaggtgagtttttttttccattttaaaaattattttgtggttataatgatgatgtcaatttttaaaaaaataaaagaatggaaaaagttgacttgggatttcataatgcaaagaaaaaagcaaaacaaaaaagaacaacaaaaagcaaacaaaacagatttacatgtaatacctaatttaaccccttcataactctgtgaagtgggtcagtattgacgggtcagcttaactaacagatattaggaatgagatccaaaacaaccagccatggtcgcacagcttgtggaacccaggttctttgacactcagcccagtgttccacctgcaatggcaacctaagtgaggagggcgcctcagagatgaggtggtcgacccttacaatgttgatattctccatgctttctcagagcaagtggctgaatctctttcgtgacagagaactcaccacctaccaaggcagcccattttattaagtctaacttttaaaaaagatacttatgatgagcacaattctgtctctctcatactctatggaaacgaccaatttctgacctctatgtcacaaagagtaagtttag

SEQ ID NO: 236582 - DNA, 660 bp, Homo Sapiens
ccagacgcctgggaattgggtctctcgattccctttggttttggagggaggagtttaaaactgtgcatgggagcaggagggactcaagggtggcagtggtgagtgggaggaaatacactttgggatgactcgttcagccctgagagaggggtgtgagttacccagggaatgggtagggaaggtttaaagcaacagagtgagactccgtctcaaaaaaagaaggaaaaatgtttcttccatccctataatccagtcatctgcttcctgcttcccttcctggaggaaacttcagctactaatttcttatgttttttaagagatattctgttactgtgtaaagtatacatacatacagacacatgccccctttaaattttttagatttatttatttatttagagacagggtctcactctagcccaggctggagtgctgtggcgtagtcttggctcactgcaacctccgcctcctgggcccaagtgatcctcccgtctcagcctcctgagtagctgggattacaggcgcacaccaccaatgcccagctagtttttgtgtttttcatagagacggggtctcaccatgtcattcaggttggtcttgaactcctgggctcaagcagtctgcctgccttggcttcccagtgctgggattacaggcgtg

SEQ ID NO: 236583 - DNA, 558 bp, Homo Sapiens
gagacagagtttcgctctcgttgcccaggctagaatgcaatggcgtgatctcggctcactgcaacctctgcctactaggttcaagtgattctccttcctcagccttccgagtagctgggattacaggtgcctgccaccatgtccagctaatttttctatctttagtagacatggggtttcagcatgttagtcaggctggtcttgaactcctgatctcaggtgatccacccatctcagcctcccaaagtgctgggattacaggcgtgagccactgcgcccagccccaatatgtcttaaagggggtttgggattaaagtacagttttccgctgaggaaacctaaggtcttaaaggggttttgggatcaagtgtcctgttgaggaaaactaggtgtcaccatgcattagtcttccccgcattacacaaaaggcaggtgtgttcccagaaaaattaaagatggtcttacaagaagtacaaatgtgccaacaccaggactttggggaccctggttctggccctgccacttgttactctattactttattccacatgtcatctg

SEQ ID NO: 236584 - DNA, 568 bp, Homo Sapiens
agaatgagagtgccacatgttttaaaggcctaggaaagcagtagataatttataacctaaaatcaaattttttaaaaaatgtgtttttgttagaatgggcagtgggtttcttttagcaaataacaattttgattaaacaaattgttgtatattcatattacggactactagataactatattatgggccactagataactataagaaataaataggaaagctctctatgtactgatatgatctttaagatataacaactaaaaaagcaatgtgcagaatatggtatgttgtatgcttacatttgtgtaaagaaggagacagaatatttataaaaatccgttgccctatacaagacatatctccggaaggatacctaagaaactttaacactcatttcccctgtgaaagcatttctcctcatctaaagcagagatgaaaggaagaacctatgctgaatgcatcttttgaatttggaactatatgaatatttcacatattttaaaacaaatgaagactttataaattaaaaaaaaaaaaaaaaaaaaatggtggagcggcggccgctcca

SEQ ID NO: 236585 - DNA, 596 bp, Homo Sapiens
tgcagagctttcaggtgttactcagctgcatagttacgcagatgtaatgcacattattggcgtatctttaagttggattcaaatggccatttttctccaattttggtaaattggatatcttttttttacaaatacgaccattaacctcagttaaatttttgtttgttttcctgtttgatgctgtctatttgcattgagtgtaagtcatttgaactaatggtataactcctaaagctttctctgctccagttatttttattaaatatttttcacttggcttatttttaaaactgggaacataaagtgcctgtatcttgtaaaacttcatttgtttcttttggttcagagaagttcatttatgttcaaagacgtttattcatgttcaacaggaaagacaaagtgtacgtgaatgctcgctgtctgatagggttccagctccatatatatagaaagatcgggggtgggatgggatggagtgagccccatccagttagttggactagttttaaataaaggttttccggtttgtgtttttttgaaccatactgtttagtaaaataaatacaatgaatgttgagtaaaaaaaaaaaaaaaaa

SEQ ID NO: 236586 - DNA, 583 bp, Homo Sapiens
aggcactggaattattgatgccacctgttacagacaatgctaatgcaagaatgaaggcacatgtacgacgtggaacagcattctgtcaactagaattgtatgtagaaggcctacaggattatgaagcggcacttaagattgatccatccaacaaaattgtacaaattgatgctgagaagattcggaatgtaattcaaggaacagaactaaaatcttaatgactattagaagtaactaagtattgttataagttttttaaaaacaactggaggcatctttgtacatattatggccagttgtacagaatcgctttctgtttagtactttagttctgttgagggcaaaatattataaatctatagaaaataaactgtttgacttgaatcatttctgaataagtaaatctaaataagaatctattttaattccttatttcttcatattaatacatatgtatacttttttgtgttactgaattaagcttgcccttgtaacaaaatatgttttggtatagttaccaggacacttactgattaatttttaacaaggtagaattttaaaataaaagatttataaataaaaa

SEQ ID NO: 236587 - DNA, 491 bp, Homo Sapiens
gaagaaaatatttttttccaccagaagaaattgctttcaatttcttaaccttcaaaacaatgtcagtgttgtcacctgtgcatttgatagccacagcacaagtattcttcaggagcataaatcctccagccttgaatggaccattgtccagctcctgtgaaaaacttaatatttgagaaagacattcaatggtacatgttttctgtacacttcatgagtagttgagattttcttgtattaaggttaatcactaaaaaggtgtttacttgggtttcgttaactaaaccccctaaagatgttttccattttattgttaaacacttggtgttagcaagggtcagcacgagaaaaggcccaatggcaagaatttctgcaaactctgtaaagcttactgaattcatttgtcatttattacattgctgagtggtgcttgaataaggaaacatgcaataaatttacttatttacccaaaaaaaaaaaaaaaaaaaaat

SEQ ID NO: 236588 - DNA, 524 bp, Homo Sapiens
ggtagtaattgttgttttactagttatacatttagaatataaaggaggcatcagaaaacacactctctaaagccacttccttgtgcacagagtctgcacagggagagcacaggcatctccctggaaaagcacctgccaatgacgaatttcatggaagaacctaggcaagaaaggaagcctctttctgagacacagtctctgagaggtgagcctagctttgctcttcctacagggtatgcttgggccatacacaatgctcgccttactttaaagctattttgccacagtcctgttaaatagtgtggacgtccttttgcagtctggtgtgcatgccatatgatcaggacagcttttccactttactcggtttcctacaagcaagtaggaaatacagtgaatttaccctaaaatgtccaatctgtatttatgtaccttgtcagtgttttgctgttggttttctaaaacaatctgatcaataaatcttatccaaatcaaaaaaaaaaaaaaaaaatggtggagcggcg

SEQ ID NO: 236589 - DNA, 654 bp, Homo Sapiens
tcagtaagtactcattgaattaatgaaacacattttggcatgagagattatccagggaaaattctaaatacttaatggattatatatttgtcaccctttaaatttttgtatttcttaaattttgaaaaatgactttttttcttctctagggaaaatccaattgttgggaaagcatcttagagtttaacagattggttcagaagaactggaaaatattatttttcttggagcttttcaattcatcatgtattttgttcatggtatttaagaatgagcatccgcttcaatgtcatctgcctccacattgtatttaatatttaataattgaaattaattgtttgggaatcctggtattgatgtattactagagaatttaaagcccaagattcccttcatacctgtgtgaccaaatccatgtttctgcaacttctttttaatcgaaagaatcttcctagaaaagctttgtaacaaagggagaactcctccgtagcaagaaaccatctcttcttgtaacactctgttctgtggacttgttttcactaccatcagtgcctgctctatactgccaacattgtgttttactagaaaactccaattcatgacagttcagagcttttcatttagttcatgtagaccctcccactttaaaaaaaa

SEQ ID NO: 236590 - DNA, 588 bp, Homo Sapiens
agttgatgaagaaaaagtcaaggaaggaggtgatacaattggaaatattcccatcaaatggttaatcttatttagaaaatgggcatattagaaaaagtccttccaagatgattttggataataaaagttgtatttgtggaaattggtattatctctgttttatgcacttacatttatcccttacattttgtttttagtgaccctacatgacattaaatttaaagtaaaacattgtttaatgttaccttttggcttgagaatgtctttcagctccagaattattgttactcatattttaatcagtaagtcatttaagctatgacagagtaggaattgagaaattatttcatatgctacagtattgaaatgtggatgctgccttgttttataagaagatgatcaaggtttgtgtgcccattacctttcctctgcctgaaagacgtgtctcaagaaaaataaattctattttagatgcaggtactgcattttattctaagaattgatatcaattcaaaacatagaaaactgtaaaagataaatcaggagatggctgattcataatgggtaataaaataaatagcactttcg

SEQ ID NO: 236591 - DNA, 600 bp, Homo Sapiens
agtcatcctcacatcctacttttgcctcctctttttttttttttttttctaaaaagagacagagtctccctttgtcgtccaggctaaagtacagtggcatgattatagttcactgcaacttcaaactcctgggctccagtgatcctcctgcctcagattcttgagtagccaggactataggcacataccaccatgcccaactaatttttaaaaatgttttgtagagatggggtcttgctgtgttacccaggctggtctcaaactcctgggctcaagcagtccttccaccttggcctcccagagcactgggtttacaggtgtgagccactgtgcagcctccttttatctaattgtccccacagcagacttgtctggtcttggctattttccggttgttaaggtgtttcaggatggaggaatcagttcctgagatagttattaagttctgcctgctagaaagggacagtaagtgggttgatatcattctagacttgttaagaaattgttcagaattttgattgtttttcatagcagcttgattaaaatacagattttaataatttccttactacttttataggtagtgctttcaaataaaac

SEQ ID NO: 236592 - DNA, 545 bp, Homo Sapiens
tttgttttttgactttttttgtattgtgaacaggcactgaagctgatgttattttaagattacagaatggaaaaagaaataaactattttaatgtctgataattatggggtagcccttgcattgcaagatgatgatttgattatggacacattatcaacagaattgaatttgcatggaactcaagacacgcttaagatcaccacagcataactgcagatttcaggaattacagtcatagagggtacatcaacttgaagagtagattgagtcttacaggaagtgagttacaataagtaacattaagagcccagctgccagcctggccaacatggtgaaaccccgtccccaccaaaaatacaaaaattagccgggcgtggtgacgcatgaccgcaattccagccactcaggaggctgaggcagcagaaccgcctgaacccaggaggcggagatcgcagcgagccaagatcgggccaccgcactccagcctgggggacagagcgagactccatctcagaaaaaaaaaaaaaaaaaaaatggtggagcg

SEQ ID NO: 236593 - DNA, 647 bp, Homo Sapiens
tgttttagttacatgggggctcatacccatgtcacttgtcccatcagcactatgccctctgcaagtaagactatgacgacaatggtcggcagaacaaaaggttgacaattgtgaaaccacaaggttacagaagaaattgaggccttgaaaggctccaagacttgccttgggtcacagagcacactgtcggtttgagattctcagtgttgcacatggtcataaatgtttgaatgtacaaccccccattttttagtcaattatgtacaagtaaaataagttttaatgtaacaaattatttaaataatgtgtgccctgtgaggatttatcccacttaatggcaactgaactctaccacattacattaacatataacatagcaaatatttgagtgtttactatgtgtcaggcactcttctaatcatcagatacgtgttaactcatttaagacagccaccctgggagcagatgtgatcatcatcctcgcagagaggaatgcacagagaggtcacagaaagcagcgtaccaggagtcagacctaggcagtctggtgtctaaggctatactctaaattattgagttaaatgatctaataaaatgtatattaagcatatacaataaaacttggaagtaaacgtgttgactgctaa

SEQ ID NO: 236594 - DNA, 487 bp, Homo Sapiens
atcagtttccacctaacaagtaattttttaattgaaagccttttatttctaggtctgtctcatgtctttaataaatacgggaatgagtctcatttagttcttaagctaaagagtactacaaaaaccctgaaacatctctgagatggtacatttactttccattgttactcttgtataagacagcaacaggtgagtttgctctcatagtggaaattaaaacagaagcagccagccagcatatatttccttccaagattgtgtacaacagaaagcctaacccatggtggctgataatgccatttaatatatagtcacctaaatctttatgtgtcagctccattgcagaggactcagtgggctactccacacccaagcctgagggatgaggagatcattagaggagatgcgtgggactctcccacggactaaggaaagtgaactgttttggtttactgaccgcatatataaatggattcagaaaaaaaaa

SEQ ID NO: 236595 - DNA, 470 bp, Homo Sapiens
tctctaggcttgcaagtttcttcagatgctaaaattatgcctttgtgtaaaatcagactttctgttatatgagtagacgtaggaattctctgtatactttaaaggagaagcacatagaaataaagagagagggtgataaaatctagattcatagaattgtggaaaccttacttcattttaagagtgaagaacccagtctgattaaaggaagttccgtgtttaaggcaacatgttgcttgtggcagatctagactcaaaactgagattcctgcctctgtccagtgcttttttcacttcattacattacgagccatcttaactccattcatgcaattctggggtaaggggttttgtcagaattccacctgaccttccctagagcagggtttggacaggatgagagaccccaatctctcagatttgaggcttcttttcaagatatctgtttttcccttttccttaaaaaaaaa

SEQ ID NO: 236596 - DNA, 414 bp, Homo Sapiens
ttcttagaatggaatctacacctaggagaagatgctgtgaacattgttgaaatgacaacaaaggatttagaatattacataaacttagttgataaagcagcagcagggtttgagaggattgactccaattttgaaagaagctttgctgtgggcaaaaagctatcaaacagcatcgcatgctgcagagaaatattactagaaaggaagagtcaactcatgcgaaaagcttcaccgatgtcttattttaggaaattgccacagccaccccaaccttcagcagccaccaccctgaccagtcagcaaccatcaacctcgaggcaagaccctccaccagcaaaaagagtacgactcaccgaaggctcagattgataatcagcattttttagcaataagggattattaaatttaaaaaaa

SEQ ID NO: 236597 - DNA, 481 bp, Homo Sapiens
cccccacacccacccccgaaaacaggagttgtgagaattaaatgagatcgtacatatcaagtagtaggaaaaatgcctagtacagtgttagaagtttatggtcttgtaggaagcacaaatacagaattaaagcaatgatagaagcattaacatggtacagtcctagcagatgagagaatgcttcattatctttggaggttgggagatatgagggaccaggaagctttcctggaagagcttacattatgacccaatatacattatgacccaacataacacatgtatacacctatgtgcaatgtgtttatacatttatcaatttgtatgtttttactggtttgtgatataaaatggacatgtatatgaaataaaacagaacttagcatcagtatgcatagttctctgtaatattttctagtttcttatactgtgtttcattaaacaaaacaaaacttttaaaaattgaaaaaaaaaaaaaaaa

SEQ ID NO: 236598 - DNA, 449 bp, Homo Sapiens
actgatgtggtttgaatgtgttctccaaagtttgtgtgttagaaacttaatccctggtgcaatagtgttgggagttggggcctattaggtgattcggtcatgacgggtctgcccctgtgaatggattactgtctttatttgggagtgggttagttataaaggagtgtgcaccgtctcttgctcttctgccctctgacctgggatgatgtaaaatgaagtcccttatcagatgcagacctcatggtcttgtacttctcagccagaactataagaaatacgtttattttcttcataaattaccgagtctcagatattctgttatagcagcataaaataaattaagacatctactttgcccatttatactggaggctttagccagaattctgtttataaagtttgcaggccaggcacggtcgcacgcctataatctcagcacattgggaggc

SEQ ID NO: 236599 - DNA, 482 bp, Homo Sapiens
gaacacctgtcacctcaagtgcctccagatcattttaagtctccggcagcatcagagcttaccccatggagcatcccgccccatcctcacttcttaccattttaaaacagctctcatgcacctcttgctacggctgcccctcacggactgggcccacaacatgctctctcagcggctccaggacattctctggttcttgggccgtggcctccagcaaaggtccctccatcatttcctcattggtaacaattttctgcccctgaccatcccaatccctaagacatttaggaatgctgagccggtcaatctcttccaacacctggtgctcaaccccaaggcacattcacaggcagtggaagagttccaaaaccttctgacccaggtgaaaactatgcctcatgccccactggcagcagcaccttgaagtaaagaccaataaaaaaaaaacagaggaagataattctaaaaaaaaaaaaaaaaaa

SEQ ID NO: 236600 - DNA, 434 bp, Homo Sapiens
gtgccttgtttcggagatctccagcaatgacattagttccaaactcactcttcttacacttcacttccccagactacggattctctggtgcccctctcttcatgcaacggcggagttgtttgaggagctgaaacaaagcaagccacagcctgatgcggcgacagcactggccattacagcagattctgaaacccttcccgagtcagagaagtataatcctggtccccaagacttcttgttaaaaatgccaggggtgaatgccaaaaactgccgctccttgatgcaccacgttaagaacatcgcagaattagcagccctgtcacaagacgagctcacgagtattctggggaatgctgcaaatgccaaacagctttatgatttcattcacacctcttttgcagaagtcgtatcaaaaggaaaagggaaaaagtgaa

SEQ ID NO: 236601 - DNA, 633 bp, Homo Sapiens
tttttaatttttaagtttttttttttttttggcagagatttagatctcgctatcttctctggctggctcaacatggaaggatcccaattttgaaagaaaaagcatgtgagacacagaacaggcgagagagtgagggcccggcatgcccccaagtcccccccaccctgcttgccgcgagggctccccagtactccccacggcagccatcgctctctcgccaaacaaaacagaagcccccaaacagaacaaaatggaaaaaaaaaagatttttcacagatgaagaagttcacattcattcgattcattgagcctgcggagagggaagagataggaattggtcactacggggagggaagggtgggagactagggggcggaagagaggaggggctggaacaccgtggggggggccaggaagccccctcccaaacctgcgctggctcaggctggaaggacgtgcttgttaactgtctagccaggtgctcgcgggactcgctgaagtcacgctgctccctgatggagaaggagggacagagcaggaagagaggagaggggccgcggagggcggaggcgctagggtcgtaggggagctgccctgtctccggagggcggtggctcccggcgcagcacgacg

SEQ ID NO: 236602 - DNA, 609 bp, Homo Sapiens
cgataatcataaactcctgtcctgcagagctgttgggaggattacatgagacatgtatgtaaagcactcagcagaatgcctggcacaaaataagcctttaaatctgtgagttatttattataattatgttgatatggaaaagaaagatactcctattatcaccagcacctatttctccaaggaaattcttacctctgtaaatttaaatgtgttactcttgtaaaaaccagagacagcagagttggtatggtaatgataatcataatacataatgattatggcattaaaaattaactggaaatagctgaagggtataaacatcaatcccaagagttataaagtcatttgcatttttccaacatgttctttttagctacatgagagcaggagccattgcagctaaaccaaaggatttcaaagaaaccattagttactaattcacatatgataaaattaacaaaggaggtaatttttctctttattattcaacgatacaattatgctaatcttaaaagtttcaattatggctcatctgaaagaaaatgatttattattttcattgtttcaacttcccagtaggaatggcacagattatatataatatacaaa

SEQ ID NO: 236603 - DNA, 721 bp, Homo Sapiens
gtaaatattattaatgaaagagaaattctgtatacttttttaaaaatctctttaatgaaagaatgaagagtggcagagataataattgaaagattagtttctcatggaattaatttggacttgatattcagtatttggaaatgtcttaaagaaaaccattttcattgtagaaaatccttttttaaatacttgttatatcccagggagattagtttataccttccacctcaggcagtcatcagctgctttagagaatggaatccaccctgcccctccattttttggttcctggggctcaattcaagtctggtcaagtctccctggctggggattctgtcctgggaacagatactcagttgtagtctcatgtgtctgcactcacccaagactctatatacttgcttgctcagagcatagttagggcagctcctaaaaatgcattcagcagaagactgaaaaacttcaattgcttcatttgtatgcaaatagaaaatggtagataattatatattatacgcctttgtgtaagttcatttaatacttgaagcagtctttgtctcaaaagagtatgcccttactgagaaaggatatgtgaacggtacatttattgttggggagagtggattgtttacatcatgtctggacttttgtctagttgggtagacagttctacaccagcagcccccttaataaagaagtctacacagaaaaaaaaaaaaaa

SEQ ID NO: 236604 - DNA, 501 bp, Homo Sapiens
tgtgccaaacactttcaatgcctcatcctatttaatcttcactataacccttcaaggatgattttatcatccccacttgacaggtgaagtaattgggcctcaagaagctatgttaatgagatagcatcgataaagcctttggctccagaaggcactcaatcaagttaatgttctttcttccttgggtaacttattccaagtcactggatcagtaaggggcaggagcagaattcaaacctggacctatctgattccagacacccctgggctttctgtctcaccgcactgcccagacactaacaagccgttgggagaactgatgaaccgaatggagaccactgctcttttgctggttaaacaaaagtggtccaataaataaggaagggcctgatctggaaaggcctgcattctatggctcaggatattcctgtttatccaacttggcaggcatgtaaatattagcgtcgccactcctgtcccccatgcatggcgctgtgtgtt

SEQ ID NO: 236605 - DNA, 363 bp, Homo Sapiens
gacacacattcattttggtgtcaaagatctgggcttcagtccctgttcggccacatactagctgtgtggtcttgggcaggtttgctctctgggcctctgtcctgctctgtaaagcaggattcacaatagtgaccttgtcctttggaggaagtaggaggtgaagtccctgggcccagctcagcgtccacagcaaactcccatcaggcctgatcaccctggtgtgaacattaacccagaactagcttacttacttgctcttccaagaagcaagaggtctgggttggtctgaactactctttggaaaaactacttttggcagatttcaaaccagttcctaaaatttccatgtattacatttagatt

SEQ ID NO: 236606 - DNA, 582 bp, Homo Sapiens
gctactgaatcaaccttccctagaactggcttccaggactttgggtcatatgagtcatgtgagaaaaatattctcctctacctttttctgagttaggcctcatgctgcttgaagctgaaaacatcctgttacacctcggttttaagcaccctcccctggcctctgagataagcctctcaggaacctgtggctctctaacccagtttgaaacgttttgctctccatagaattgtgtaccaggagagttatattgattaaattaggtcttacattttatgttatatattcagagacatatatttgtagtctgcatttcaggtaaagcgttttccatgttggaggtcaaatcccacgaggttcacgtatctattgctgctgctttaccctgttctggaaaagaaagttatttgcctgccgaacgcacagacatgagattagaaagtgatgacaagcgttaatgcttggctctttttatcatagactatactcttttctactctatttatttcatctgtgtttgtgtaacatgtatctcacaatgcagaaatcttttttttctttttgttatgaaaaatttccaaa

SEQ ID NO: 236607 - DNA, 807 bp, Homo Sapiens
  misc_feature (127)..(127): n is a, c, g, or t
aggattattcatacctgaaggagatatgtgatcaccaagccgaacagctgagcagaaccagcctaaagctgcaagaaaaagcatcagagagtgatgcagagatcaaagacatgaaagaaaccatatntgaattgaagatcaggtgaacagcaccgggctgtcaagttacacaataatcaactcatcagtgagctagaaagtagtttgatcaagctggaggaacagaagtcagacctggagaggcagctgaagactctgaccaagcagatgaaggaggagaccgaggaatggaggcggttccaggcggatctgcagaccgcagtggtggtggccaatgacatcaagtgtgaggcccagcaggagctgcgcaccgtgaagaggaaactgctggaggaggaggagaagaatgcccggttgcagaaggagctgggggatgtgcagggccacggcagggtggtcaccagcagagccgcccctccctccctgggctctgtcagctagcagagcatttggtggaagaaagacagcccagctcttgccatgattgggagccgcagccatctctagatgaaagggggaatgtgtagaggagaaattgcctctttataaagagcccagtttgtctccttgtgacattctctgtttctcagagtcattgccgtcgagtctctgctttttgtccacattttgggatcagcttactgcatgatcaaagatgatgtttccctctttttacttttcctcagaagattgagctgtcttttatttggagaataaaatgaagttctgaaaaaaacaaaaaaaaaa

SEQ ID NO: 236608 - DNA, 722 bp, Homo Sapiens
  misc_feature (21)..(21): n is a, c, g, or t
  misc_feature (53)..(53): n is a, c, g, or t
  misc_feature (698)..(698): n is a, c, g, or t
gtcaaatgtggacctgtagtntaagaatgacaggtggtagagacccagatatntaaaaataggtgttcaataagggaatactgattgtgcattgtatctggatagcatgcctaattgtgcatttctgaaagttaccaattcaaaatgtaattggaacagttatctttgattagacaagcctgggaagagaatgttgaggtgcagagctcaccagccaagttcatgcccctctcgggcctttgtggctgagaagtgggacagaaagatgattaaggtaatgtgtcctccctgtagcattgtccagggccgttgtgtagatatttgacttcactgacagaaaagaaaccagggagtttgtagagactgtgcatttttagtataacattttcaccatctgatatggtttggctttgtgtccccacccaaattgcatctcaaattgtaatccccatgtgtcaagggagggacctgatgggaggtgatgggatcatgggggtggtttcccctatgttgttatcataatagagagggagttctcacaagatctgctggttttaaagacagcagtttcccctgctgtcactgtctctctcctgctgccttgtgaagaaggtgcttgtttctccctctgccatgattgtaagtttcccgaggcctccccggccatgtggaactgagtcaattaaacttcttgtttntaaagtaaaaaaaaaaaaaaaaaa

SEQ ID NO: 236609 - DNA, 757 bp, Homo Sapiens
  misc_feature (104)..(104): n is a, c, g, or t
gatgcagagtattattctttaagacaacaaagtgatttctgtaagtttgagccctatgtggaaagcattgtggaatcttaacctttttgtacacactcttgtgngacgtatcatataaatgtcagcactaagtaatgtcttgtttgtggctgaatatttttcgtagatgtttttgaagttgacatgacttacgtgcatttaaatatatattgccatccttagtttgtaattaagatttggaatatggttgtggatttctgagcatgtgcagactggtctagctagttcaggaactggtgcatgtatttttcaaagataaagaaagtgtactgcgaaaatatgcaggaagattaattttgtggcagttttctaaaactgacaaccaggtgggaccaaagtttatgtgcctttagtcttaatttaccttgcattgtaatattcagttttaataaatcttcaaaatattttgtatttaggaatagatctgactttaataaaaacatggctcagaatctacaggtcaaattaatttgaacagttcttgtcaatccgaattgttgattctgtttaaatgaccaatactttttgaaattgatgtacttagtttcaagattcatagattctgttatctatgtagacagaatggtcatgtatattttctattagttgagtttttacatctttagaaatgtaaaattcagtatagtttgaaagcggcacaattaaaaattaattttctaacaaaaaaaaaaaaaaa

SEQ ID NO: 236610 - DNA, 863 bp, Homo Sapiens
gctgtatgtcataaaagtgcactgtgtcctgaagttttcattattttcatttcaaagaaattcactggtatggaacaggtgatgtggcataaggtgagtgcacggtatgttcagatcacagtgccttatgtccgaatacagcaatatgtcaccgccgcagccggggcgcacgcgtgtgaaacaacaccgagcttgaatgtggaagtctttgaaccttttaccaaatcagtttgttttctttagatttgtcaaaaagttgtaatttgaatataaataattactttaaaattttaatgacacttttacacgtaagtgttttgttctgggctaccgtgtcaacgaggctgctttacaacagctttatttatttttactttcatgcaatttttttacacatcttttggtggagtaaacttcaccacatccatgaataaactctcagttattttgaaatggcaaatttctcattatttaagtttggatctggaaaggacatgacttctgaaatagccgctgctgggttttaaaagctgaggtctctcaaagtgtggaggagacgttgccgtcaggcgggagccaagtgccgggaagatgtctattttttttcttgtgtattgaaatgtaaaatcatgatgtttgttatgactgctgatgcgattgtttttgtaaattttattgtggcatatacagtattgtcatacagttgaagagaaacaatgtttcctaatgtaagtgctctgaaaatgttgacactgtatatatatatatgaggatagtttgtttttttttgttttgggttttttttttttcagattgaaaaattaaaataaatcctactatctaccaaaaaaaaaaaaaaaaaa

SEQ ID NO: 236611 - DNA, 696 bp, Homo Sapiens
  misc_feature (27)..(27): n is a, c, g, or t
  misc_feature (101)..(101): n is a, c, g, or t
gaggctgaaggctgggaagaagaaggngagctgaactgggaagataataactggtgacaatagatgtgagttaaactttaggaaaaaggattccctttttntaaaaaaaatcaatacctcaaaagcaggctttgggacaagaaaaccccaaagtggcctgcttttcccatcccaggagctcattatccagtctgtgccaactgaagtaggagactgactgtgagtgctggctaaaagccctgggtggtgaggctcacagtactggtttccaggaggaagagcctttgtgcatttgactgaggccagtttctatgaagagcaagtagctgaggagaggtcgaatttactgctttttccaggacaattctggaagtaaagaaaatgtaattcaagctggttagcttaattttgtgccattctttaacataagagtaagctctattatgaaatacaactttaaaaaattttagctataaattatataaatgattttaaattgctgaggtttccttaggcagcttatttatttgtttacagttagactatctgagtaaatggttctttgtggacctaggcagttcctgactgttccacatgtagtacattgtaccaaagttcttaataagaatattccccacaatcctgttctctaaatgtcaaataaagattattttcactaaaaaaaaaaaaaaaaaa

SEQ ID NO: 236612 - DNA, 555 bp, Homo Sapiens
ggcacgaggctgaagtatttgtgagggacagcgatgtggccctctgtgttaagaataacgtgtcctgctttggcagagagaagaaaatagccactgcccgctttcaaggcaagatcgaccttttctgttttgttttgtttttctttctttttcctggccatgaggacaaaaattactgagtggcccttaaagagggaagtttgttttcagctgttctcttttgcccgtaggtgggagggtggggattgctgcgtcctagctagaggaatggctttgcttgaatgtgtagtgcacacgcacgggtgtttctgtgtgctagttgcttcttgctgctgcttcctgcttgtctgggactcacatacataacgtgatatatatatatatatatataaatgtataaatatatattttatttttttttaaatccctggagcttctggttcctatcagttcctgttgttaatcgtagaaccgttgtcccttcccccattcccgtatccatcatgttctttttcttttaaatatcaatataaaggtaaaaaaaaaaaaaaaaaa

SEQ ID NO: 236613 - DNA, 698 bp, Homo Sapiens
gtgatccctaactccacaaatacctggcagtccttgatagaggcagcacccgagtcccagatgatgccagcaagcgtcttaactgggaacgttatcatagaaacaaagttttttgacgacgatcttcttgtaagcacatccagagtgagacttttctatgtttgaaagaagaatgtgtgtacatttcaagaatttgggttttttggagggaggaggaaactgtttacttttttcctccacacgtttgatttttgacacatacacccctaattccctcaacagcagaacctacctgcagccaccaggggaccagctctgtgtaggtaaccagatggctctttttcccaagccgccatcttccagctgaccagactaaactcccaaccccagaccagggcaggggacaggtctcaagtccttcccagcatacacacagggaacaaacacataccacaaaccggtaactgtacctgtcaccctccttgtctcctccttgggccctacaggctacacatctacctttggcccctggttttggaaaaattccgtgttcctgacccatgtttagttttttcctaccatttctatttcatacattctcatacatttaacttgtaaaatagactgtgatattattacataatgtaattaaaaatatgaattaaaatattcctacagtcaaaaaaaaaaaaaaaaaa

SEQ ID NO: 236614 - DNA, 731 bp, Homo Sapiens
cagtaaagaaaccttcagataccagttccatcctgaagccctctgttgaacaacagggccagatcctaaagctctttcagggagctcttctctggggctggaacagttgattatgcaaccccattgtgtggagattggatcaactgagttgtgttatttttgttttaagtcaccttgtgcgagaacctcaaccgcacctatcttgggaaccgggtatacccttttctttagcactgctatcctttttgtcttcagcacaaataagatgttcaagtgagccagaagcaagaagagccattttagtcttcatagctattggctaagagagataatgagctgatggtctattttaaccttgaaagtaaaaatgtatattttttcactacaagtacattgaacagtaaaaagtgtaacagcaaagtatatatttgatgccttctgtcttttcatgataatgtgctaacaagttgtgttaatattttactcagccagagtctcattcatttgctaagcattgggaacattatgtatattgaccttaaacataggtgtcctatatttggattgtgacttgtagactcaagctaaccttactgcctctttttcacacttgttgaaaagtctgtgaagaacatagttaaagatctccaactttggaaaatatacatgatgtgaaactggggtgctatgttaaaaataaatgtatgataactaaaaaaaaaaaaaaaaaa

SEQ ID NO: 236615 - DNA, 744 bp, Homo Sapiens
gaggacagccaagacttaacaagcactgactaccgttcccttgagctaccattatcacaagggttgcctttcaattagtaaagctttttggatctccaggcgttccaatggaatccttgttgcctgatgactatgtggttccccttgactggaagacactaaagatgatctacttgcaatggaagatgtcagtggagaaaagacagaagaagattggttgaaaaatgaaaattccttgaactttgagttctgctgtcttcatggtactgctgaagatcatgatcacggagaaaagtcagagtgctcagtgccaacccaagggattctttccagagacgtacccgttggataccaaaattagtttggataatctgttcaaccattcttgataagttatctgaataataaaaaaactcaacagaggaggtaacaatttgaacattttattgtctaatttgaagatgtatgccatactttgtttgatagaagaaagtaaggcacagaaaacttgagtaccttatttttaaaactgcattaggattaaaaggttagcccctatatccaagtattggtctgagatcccatttctagaattctgaaatccaaaaagctctgaaaatcaatagttatttttccaaatgtattcattgtggtaaaatacaccaatataaaatttaccatcttaaccacttttaagtgtgttataaatacattcatgctaccatcaaaaaaaaaaaaaaaaaa

SEQ ID NO: 236616 - DNA, 771 bp, Homo Sapiens
gaaaaaaaactcatctaaccaaaacagatggatgggctgcagctctatgggttcgtatgccaaagttctacatgtccaccaacataaaacaaaaccaagccttggctcgttctcttctctcttcaatctctggaaaaataagtacatatagttgataacccctcttagcttacaggaagctttttgtattaattgcctttgaggttattttccgccagacctcaacctgggtcaaagtggtacaggaaggcttgcagtatgatggcaggagaatcagcctggggcctggggatgtaaccaagctgtacccttgagacctggaaccagagccacaggccccttttgtgggtttctctgtgctctgaatgggagccagaattcactaggaggtcatcaaccgatggtcctcacaagcctcttctgaagatggaaggccttttgcccgttgaggtagaggggaaggaaatctcctcttttgtacccaatacttatgttgtattgttggtgcgaaagtaaaaacactacctcttttgagactttgcccagggtcctgtgcctggatgggggtgcaggcagccttgaccacggctgttcccctcacccaaaagaattatcatcccaacagccaagacccaacaggtgctgaactgtgcatcaaccaggaagagttctatccccaagctggccactatcacatatgcttactcttgcttaaaattaataaatcatgttttgatgagaaaaaactattctaaaaaaaaaaaaaaaaaa

SEQ ID NO: 236617 - DNA, 558 bp, Homo Sapiens
ggcacgagggcttttttttttttttttttaactggtttctcttaaagcaaagactgtaagtactactttttctggagttcaatagttcagggagacaagtttttctttttaaaattcattctttattgtcactgttgcaaaattatcagtgagagttagcaatcgagttcttcctggacagctaaactgccctcttagtcagttaagatgtagcctggagatggaagcctagaactcagttctttttttggttcactgcagtagccctggttgaagtaatgcaacctctcttgtcaacggccttcactgttgcattcagctgtgaattttttaaggctttgttacctatgctgacataaagagctaatattattttctctgtacctactggcctaacatggtaaagaaacacgcttaaaacattcttcttcaaagaaattattggcttggaaatatataattagaaaaaaacatatttgattgcctcctcaaaatgccttaccatccacttccctttacacttgctttaccctaactaattggaaaaaaaaaaaaaaa

SEQ ID NO: 236618 - DNA, 717 bp, Homo Sapiens
  misc_feature (55)..(55): n is a, c, g, or t
gtgaaacagttttagggtgcaaaaatattttcccactgtttttctcatgataatntgagtctcctgagctataatttctgaaggatttttactactttggcattatgtaatctgatctctgtcacaatgatattaaataagaactatctcactttcatatgtttgcttcataaaaggatatggaatgtacacatcagctctttttttttttttaaactagcatcaacctataacttggtataaacttcccaagtatttagagaatagtgctggtgaaaatttaaataggataggcatatagaaattatgacttgtattgagtgatgtcctttcaacctaggactagtgacaaccttcattttttcagagctgaagaaaaaaccgtgaatttaagatcatatttattggtgcatgtaagccattatcctgtcttaatgaaccgattaatgctgttgattgttgaaatgtgaaatgtagtcactgttgaccttgtaaatatctgccagagatgaaaaaatattttaagttattgtaaataaagatgtataaaattcagtatcagtctgcaatgcagaaacatatcttagatgttaaaatactgtgtttgagagatgtgtaatttacccttagatgtatctagttacattaagagtgtaaatttttttgtacagtataaaaatacagctctatttggcttttaaaaaaaaaaaaaaaaaa

SEQ ID NO: 236619 - DNA, 474 bp, Homo Sapiens
accccctccctttctggggcaggcgtttctccgaggcgcactgaggctccggggcgagtccgcgcagcgcgagctggggaaagccgtccggggctcccgatgaccctgcactccgccgggaggccgcccttcggaaaagccgtggaaacacacccggattgaaatgcccctggcccgcctgacccgaccctaggagaagcagccgagttacccgacatcgtggtcagcaggagctgggtcggtggctggatgctgcagcagcagggactcagcgcctgggagggctcctggggcagggagagaagcagagatgcaacatttttaaaatttcacaaagcatccggctgcacccaggtccctggaacaggagacaaacagaattaatgttttataccttcgggtataggtttgagttttttccccctcatgccaagtatttaaaacctctagaaacccataaaaaaaaaaaaaaaa

SEQ ID NO: 236620 - DNA, 617 bp, Homo Sapiens
  misc_feature (18)..(18): n is a, c, g, or t
tgataactccagcacccnagggatggagagtcatggggaccctattaggtctcggtgcagtgttggcctatcaggaccatcggtgtagggctgctcaggagtcaacacacatatacactaaggaggaagtgagtccccacccattagcctcactgcttcagaaaaatctttcccacctttcaacttcttggatcacaactctggccttcctaagccatacccaagtacacatatagcacatttcacccaaggaccttccctctttggacactatgttacatacccctcttggcctttgaacctgtgccaggaagtgtgagctgttacagcaaggggctagaagtgaaaaaagtaattctggagacaagcactattttctcttcctaccccacctccatttctaatgcctactgccatcaaggccttgttttgcttttctttttggattgttcagagaaatgtgtgtggcatgtgtaagaaaagtgtatatactatcttatactacctctccaggttgccagagagttgcgaggagagcaaggggcacaaccgtctccctttatagttctacttttctaataaatagtctgtttaagatcataaaaaaaaaaaaaaaa

SEQ ID NO: 236621 - DNA, 654 bp, Homo Sapiens
  misc_feature (47)..(47): n is a, c, g, or t
ggcacgaggtgggagcaagcgaggctcccaggacccccaccctctgngacaggccctcccccatgttcttctgtctccaggaagggcagcggccctcccatcactggaagtctgcagtgggggtcgctgggggtggagagaacactaagaggtgaacatgtatgagtgtgtgcacgcgtgtgagtgtgcatgtgtgtgtgtgtgcaaaggtccagccaccccgtcctccagcccgcaaggggtgtctggcgccttgcctgacacccagccccctctccccctgagccattgtgggggtcgatcatgaatgtccgaagagtggccttttcccgtagccctgcgccccctttctgtggctggatggggagacaggtcagggccccccaccctctccagcccctgcagcaaatgactactgcacctggacagcctcctcttttctagaagtctatttatattgtcattttataacactctagcccctgcccttattgggggacagatggtccctgtcctgcggggtggccctggcagaaccactgcctgaagaaccaggttcctgcccggtcagcgcagccccagcccgcccacccctgcctcgagttagttttacaattaaaacattgtcttgttttgaaaaaaaaaaaaaaaaaa

SEQ ID NO: 236622 - DNA, 700 bp, Homo Sapiens
  misc_feature (652)..(652): n is a, c, g, or t
ctgtctttaaaacttaactactttagggtgtgccaccactgcagactattgtggtactttgtgacagaagacatgtacacacacaccacacacatacatacacactctctcactctgtctctcttacctttagctgcttgatcattaagccatccaacttcatgccagttcccttctttatagaagagtgaagggaaagacttcctgggtttgacttaaaccttgtccacctcttgatattttaggattgaggaataagtcattaatctaaggactgattacagtggctggagcttgggcacttgtcttatcactggtcactgagtctgaaagtcccagctgaattcttgcccttaagtgcttttgctgctatttttttgcccccagttccacaagatccaaccaagaattctgtatcctgggacagtcagattcttctaaatcaggccaggaaggaggggaaaagagtgagagaatggtattcccagatacttcttcctcctgccccttttcccagcagctctgagaccagatgttggctgctgtacttactccctgaggtagggaatgtgtggtgatcgagtggtctgtgttcctattgctggtggggtgatagggtgggctaaaaaccatgcactctggaatttgttgnatttctcccagtaaagcttttcttctcccgaaaaaaaaaaaaaaaaaa

SEQ ID NO: 236623 - DNA, 642 bp, Homo Sapiens
tagctttagaccggctaaaagctttaatccagagcctgccctactctgatagtaccagagtggagggcagaataccaaatgtccaggaaccaaaggcagggctgtggggacctgaagagcagcacagtggggcccgtgctgctgtgggggaaactgaggctgggagcctcagcagagaccggtgtcaagagtctctgggaactgcataggcctgaggaacatgcattttcaagttgtccattgatggtttcgtacctgaatttctcaccttttgtgaacatcttgggagggtgggggttttgcaggggtgttaaaagcaaggcttggagcccctttcctccagctggtggctccttctcagggcctggcctcattcaggccactttgtagagaaatgccctgacctcgcaggaaggatttccccacccccaagtggaaggaagaggacagtgtgggcaccagagggccctggaaacatcttaggggaaggaaaggaaaaggataaatttggagtggggggtctctaaacagattgcctggattccgttctttcctggggttctacagctgcctaagccctcaccttgggggaggatcaaagggaataaagagaactcttggctgaaaaaaaaaaaaaaaaaa

SEQ ID NO: 236624 - DNA, 773 bp, Homo Sapiens
  misc_feature (10)..(10): n is a, c, g, or t
cacaatcacnaacaggtaatacctggatcactgattcttactgtcctctctgagggtgggaaggtggggctagaaaaggctcataattttaaactcttgggaattaaacttgggaatttctattcctacagtgttttctctgggatttttagctcactgatcgccctagaatagtgtgaactctccagataggtcctgctgtgataggccaggggagtaggctgtgcagtgacggcttagggtaataagtaatggttggaggacaccagcataggagcagagtttagaacttaagaggacaagaaagctgctcagtggctggcgtatagctgtgaaggtaaccaaacaccaaagagggagtctgtcatttttataaggctggaagcgaatgttccttttctaccttaacatacagtttagggggttgcaccaagacaaagtttccaggctggagggtaatacatatccagcgcgagtgaagtccccactccaacatataccctttttgggtgggtaaacacctctttgcatgtggacagaaaatgtttatacttaaacagacatattttgcatatttttatctggagacttcttctagttttatactcttcccacatctatgccaatgccaccattctaaaacttacactccttttctacccctggtcttttccttgtccttccctacaacttggtagaggtccattttgtcttacttcacactttttttttttttaaataaaacacaaaagtctaaaaaaaaaaaaaaaaaa

SEQ ID NO: 236625 - DNA, 845 bp, Homo Sapiens
  misc_feature (67)..(67): n is a, c, g, or t
  misc_feature (79)..(79): n is a, c, g, or t
  misc_feature (88)..(88): n is a, c, g, or t
aggctgtgctgtcccctcgcaactccaggatggtgtgtagcccagtgactctgaggatcgcccctcntgacagaagatntcgcgtctngcgataccagagcagataatcagctcaacactgtcctcaccatcaagtatgccccagacccatgtgcaaaggagactgtactgagtccctcaaagagaagaagaagaaaaggacagtggaggaagaagaccaaatattccttgatggccaggaaaataaaagaagctgtcttgtcgacggtctcactgatgcctcttctgcattcaaagttcctcgacccgggccagatacactccagttcacagtggatgtcttccactttgctaatgactccagaaacatgatatacatcacctgccacctgaaggtcaccctagctgagcaggacccagatgaactcaacaaggcctgttccttcagcaagccttccaacagctggttcccagtggaaggcccggctgacatctgtcaatgctgtaacaaaggtgactgtggcactccaagccattccaggaggcagcctcgtgtcgtgagccagtggtccacgtctgcttcccgtaaccgcaggcatgtgacagaagaagcagatgtcaccgtgggggccactgatcttcctggacaggagtggtgaccatgaagtagagcagtgggctttgccttctgacacctcagtggtgctgctgggcgtaggcctggctgtggtggtgtccctgactctgactgctgttatcctggttctcaccaggaggtgtcgcactgcctcccaccctgtgtctgcttccgaataaaagaagaaagcaataaaaaaaaaaaaaaa

SEQ ID NO: 236626 - DNA, 737 bp, Homo Sapiens
gagagagaatgtatatatcaaatatgtgtaatgataaaatctgaattgtaaaatttttgtatattgttaaaattgtaattctaaattgtatttcaaaaatgattatttctgatattgtttttatgtcacccatgatgaaaactggactttatatatctaaacatacaagtatgaactattctatttaaaatttttaatagtttttttcttttttggtgcctataattgattggtcatttctgctggcttttctccaatgaacattgaaatcttcctgtatatgttaccaataagaaaactaccctggaacagtagaaaaacccaacaagagacttggcattcatcaagcacattatcagactttgagaacatattgaaggcattgactttgaaaatcatctctttttctcaagaagaaagcaatggagaagcaaatttgtttcattcagtgaatccccagtttggggcttgtggggcttagagacattgtgaaatcaaatcttgtgttatacttttctcctggctcactttttttgagaaggtttatgggctatttggctggtgagacacgatcccctcctaagaaaatgtaggtgctcagacaggtaaccactgctgctactgtttttatttgtttgtttgttcaattttatttaagatttgtttttgttgtactaggattttaaaaaatgtaatatattgcaggatttataaccaggaaaaaaaaaaaaaaaaaa

SEQ ID NO: 236627 - DNA, 645 bp, Homo Sapiens
agaattcggcacgaggagaaatgcagaaattgttgaattagtacataccaatttctgacatataacactctgcagcagataaagacaatagctctctagtgtggacatgaaaatatttctaagacattgacaggacgaagaagttgcacagtaaccacgcactcctgtttacatttgtatagttaaaacttgtttacctatacgtagcatatatgcgtgtgtgcaccctagaaaagagtctgtgataacacatatcaagctattgacagcggttttgtctgctgaaggaggaaaaaaggggggcttctcacattttactccatttaattctaggttgtttggtttaaaaaaaaagtttttatgtacaacagacaatttttaaaattccttttcatcatagaaaatgaaaatgtgtactctgttatcctttacgctctgtccatttttttcttcaaaaatgtgtctgacctattatcaatgtgaatgaaaatgagctttgctacataacctcttttcagagctttgtattcctgaagtgttggagtcgcctacatggcatagtcaaatgtttttaacttaaccacaacccacagtaaaaatgaagctttctgcaaagttaaaagtagtaaaaaaaaaaaaaaaaaa

SEQ ID NO: 236628 - DNA, 758 bp, Homo Sapiens
  misc_feature (116)..(116): n is a, c, g, or t
ggacagagtgaaaatcttaagtcccaatgggaagcagggaattccttggggtaaagtatcacttttctggggctgggctaggcataggtctctttgctttctggtggtggcctgtntgaaagtaaaaacctggttggcgtgtaggttccgtatctccctggagaagcaccagcaattctctttcttttactgttatagaatagcctgaggtcccctcgtcccatccagctaccaccacggccaccactgcagccaggggctggccttctcctacttagggaagaaaaagcaagtgttcactgctccttgctgcattgatccaggagataattgtttcattcatcctgaccaagactgagccagcttagcaactgctggggagacaaatctcagaaccttgtcccagccagtgaggatgacagtgacacccagagggagtagaatacgcagaactaccaggtggcaaagtacttgtcatagactcctttgctaatgctatacaaaaaattctttagagattataacaaatttttcaaatcattccttagataccttgaaaggcaggaagggaagcgtatatacttaagaatacacaggatattttggggggcagagaataaaacgttagttaatccctttgtctgtcaatcacagtctcagttctcttgctttcacattgtacttaaacctcctgctgtgcctcgcatcctacgcttaataaaagaacatgcttgaatatcaaaaaaaaaaaaaaaaaa

SEQ ID NO: 236629 - DNA, 675 bp, Homo Sapiens
  misc_feature (39)..(39): n is a, c, g, or t
gaaaagataagcgaggtcattgtcagagattggttggtngccttgcaaaacagaaaaatggaattttagctcaaaaagtagaatctaaaatcaacacagatgtacaactagattctcaagagaaaattggagttaaaggtgagctgtttcaagaggatgaccatgaagaatcgcattctgattttccatatggatcatttccctatgttgctagaccagtacactggcaacctggtcatacagcttttcttgtcaagttgaggaaggtcaaaccacaacttaactgagtactccagatgacagtaactgacttgaagatggaaaaatatcaaaatagaactttatattgaaaatcactgcttccatagattggcatttttagctattactatgacttatataacttatacatataattttgaaaataacaactaaaagatgtataacatagcaaaactgcttaaacatcccattttgacacttgtcttgcagttagtttgacattttgtagttaatgattccaaattggtttagttgggccatctcattcttcacttcctgtaaaccactccatagatttgtctttcttcaagaaattagttttctttcctttatttgattgatggtcattgactactgaaataaaatatgcattttaagataaaaaaaaaaaaa

SEQ ID NO: 236630 - DNA, 624 bp, Homo Sapiens
ggggataaggtggcagaaggaacctgagcaggacccccacctgaagtagaacttaagagaggggccaagtgtaggattggggaccatggtctgggagctgttctggggcagggggaatatgcaagctaaagcccctctataccctggtaggcttcctcttcagcatgcccccctcttcaccccacacccatgtgtacactcagagtcctgctgccgctccaggctggaccagacccccatccccacccctcctggtctgtatcctgggcctcagcaagccatgcccctggggtgaggggaggcatctcccaccagctctattctttgccttagctttgcagtgagtgctgctcatgtcctcccctccacccgcacatgggggtcgctgcccttcactcctacccccagaggccttggccaagctgctgctttgaaagcgggatcttggagacaggccatccatcctggagcctcatggaacaggatgatggcactgagaaagccaatgaccgaatctcttttctctgtaaaaatgtagactgaaaagccatgtgtattttcctatgtgctgtagctctcctttggaaataaatcacaggcatctggaaaaaaaaaaaaaaaaaa

SEQ ID NO: 236631 - DNA, 603 bp, Homo Sapiens
ggcacgaggcggcatgaggcacagatgagaatgagcacaaatgtgcatagcaagtgcagtttcctggcccttaaactgaagggccaggtcagtctgctcctccaggcacagcctgggagcccatcatgtgccccactctgcagtctgagcttccactcaagtccaccagggcctgcctcacatatatatacaagacccaatgtcagagtctgcctctgcccatgtctggtcagagggttgcactttgccactgctacatgttcccagaggttggcacagcatgacctggacctcacctaacccaggcaaactctgctcatcttcgagctctctggaacccatttctcaagggagaaccacattcccccacctcacagccaagttcaaggaagcagcctggctaaagcaatgactcaaggataccagaagcagagcacgcatttaagaagatgcgctgactcgcaggagcagctgactcttcttaagaagagtttactgattcttctttcagtacgggccttttaataagatattgtattttacttcagctatgggtgcagacaattaaaggattctagaaatctgaaaaaaaaaaaaaaaaaa

SEQ ID NO: 236632 - DNA, 767 bp, Homo Sapiens
aaggagaaaggagcaggagcaaatgcagaggaagtccaaaaagacagaaaagatgacgtcaactacagccgagggtgctggtgagcagtaacacataccctcttacagatgatggagatgctccaagagaagtccccacctcttcctgccctgctctcctccagaggatgaaaaagaaactaaatgataagggtaatgcggctctaggccggctgaggaactgtgtgttgaataactgcattttctgcaatagaatgcactcttaattttaactactaaaataatcccaagccacctttggttcattaacaaaccagagatttcatttaagtagctgtgttttgctcttctctaacttaccaacatcttgtgttgtgttgggtgtgttttgtcacttggagaactagtgtgaccccacccaagagcatgacacaccctggtgttgttaatggagcgccgtgaattttcagtgtgggatcctgaaatggcaattgcacatgtctgcatggcagagagcaccctgccatgagatctgagaccagtacttaacttctaggactgcaacacctactccaatgtgtgggaaagatttgctcttaattctcagtctggacagtgagaccaccccgctgtggaaacatgggtgctctgctctgtagttacctactaagggaaaaggcaagcaagtcattctgcttgctaggcatcaaaaagaaagaaaataaattatagctatttgttaaccactgaaaaaaaaaaaaaaaaaa

SEQ ID NO: 236633 - DNA, 633 bp, Homo Sapiens
gaattcggaacgagggttaccattctgttgttggagcggcccgcggctgtaggcttttttttttttaattgcaactttactttagatttaggaggtcgtgcgcaggtttgttacatgggtatattgtgtgatgctgagcttgggatgcgaatgatcctgtcacccaggtagtgagtatagcacccagtgaaactgtagtctcatgccaggcactgtgctagcccactctggctcatttaatcctctcctaagaagagaggagacacagcgtccccatttgacagatgcagaaagaggttccacaggtgtgccttgattctgtcctaaaaccgtttcccggaagcttttcctggtgtgggcgcttctaacctaatcctcaatcgattccagaactattactctgtttccacagtgatactgtgtctaggttttagggaggacagttcattgatgttacttaagaatgctttccaggtggaaagttccttaagtttgaggcttcaaattccatacagcacattaaaatcccattcatgagtttgaaatactgctctgttgtcttggaaataccaatcagattgttggctgaagtgatgtggataaagaagggatcttagaaaaaaaaaaaaaaaa

SEQ ID NO: 236634 - DNA, 777 bp, Homo Sapiens
gccaaagcagcatattagagcataggcttgaacttaaatctcagctcagtcacctgcaggactttaggcaccagtgatttcacccttctgagcctgtttctttattcgtaaaatgattataataattctttcacagcgttgtgaggattaagtgaaatgtgttaaatgcctactacagtaggtgctcagatatttatttttatttttttattatgcacattgtttttcctgcctttttatggctgtctaaagtctagggaaaagggaagactggttaatgatgagtagaaaaaacttgtaagctaatcattcactgacttattttccttccattttctggtttttaaaattagccacaccacaggaaacccacatttttagatggaaagagcaagaaaattgtgtcagtgctcttagttattttcatcttaatggtatagtgaaaagacattgacttgagatgatactaaggaagctttggctcactctcacttgaagaggggatcttggtgttgtagtacttggactgtacaaatgttttactgacttttcttactgctgtaaaggaatcaggcagttgggtattgatatgttatttggtgctctcattcatggcaaaggatttgataaataaaagttctttaaacactaaagcaaaatcaaatgagcaaaactaaggatgaaatgtaatattcatcagaacaaggatcactgagaaaaaatattcagaaacaactttaataaaacctgaattgaaataacaaaaaaaaaaaaaaa

SEQ ID NO: 236635 - DNA, 790 bp, Homo Sapiens
  misc_feature (8)..(8): n is a, c, g, or t
  misc_feature (54)..(54): n is a, c, g, or t
  misc_feature (101)..(101): n is a, c, g, or t
aaaattantaggacttcctctggcatgtaggtatgatattagaagagtttcctntgacaaaggacaatgaccccaagaagtaggttttttttttttttttntaaataaaggagagacagtctcactctgttgcccaggctggaatacagtggtgtgatcatagctcactgcagcctcttttaactcctgggctcaagcaatccttccaacctcagcattctgagtagctgggatcacaggtgctccccatcacaccctgctaatttaattttctttgtagagacagggtcttgctatgttgcctaggctggtcttgaactcctgggctcaagtgatcctcccgcctcagcctcccagtgttaggattacaggagtgagccactgcctctgccttcaggtagcaattttattagcaaactataagcctaaagtaatagttaaaattctcactgtgatattcattactaacccctgaacctgtacccttcagcttaccactacagtacttctgtagtagagcgagtatgggttttggtatcagacaggtccaaatttgaattctggttctacctttcatttatcaaatgactttgggcaaagtacttaacctctctgagctttagttcccttctctgtaaaagaataaaatatttcagtcttatcgtgtagatgatatacagagggcacataacaaatgttagatctctcaaatgtttttctgtaacccaaatatgcttacaactgattaaagaatgttctcactaacaaactgaaaaaaaaaaaaaaaaaa

SEQ ID NO: 236636 - DNA, 803 bp, Homo Sapiens
gaagatggagcagaatgagcagatgcagatcaccagcaaagtgcactgatgtgtgagctcttaagaccactcagcatgacgactgagtagacttgtttacatctgatcaaagcactgggttgtccaggctcataataaatgctccattgaatctactattcttgttttccactgctgtggaaacctccttgctactatagcgtcttatgtatggtttaaaggaaatttatcaggtgagagagatgagcaacgttgtcttttctctcaaagctgtaatgtgggttttgttttactgtttatttgtttgttgttgtatccttttctccttgttatttgcccttcagaatgcacttgggaaaggctggttccttagcctcctggtttgtgtctttttttttttttttttaaacacagaatcactctggcaattgtctgcagctgccactggtgcaaggccttaccagccctagcctctagcacttctctaagtgccaaaaacagtgtcattgtgtgtgttcctttcttgatacttagtcatgggaggatattacaaaaaagaaatttaaattgtgttcatagtctttcagagtagctcactttagtcctgtaactttattgggtgatattttgtgttcagtgtaattgtcttctctttgctgattatgttaccatggtactcctaaagcatatgcctcacctggttaaaaaagaacaaacatgtttttgtgaaagctactgaagtgccttgggaaatgagaaagttttaataagtaaaatgattttttaaataaaaaaaaaaaaaa

SEQ ID NO: 236637 - DNA, 722 bp, Homo Sapiens
  misc_feature (21)..(21): n is a, c, g, or t
  misc_feature (25)..(25): n is a, c, g, or t
  misc_feature (70)..(70): n is a, c, g, or t
  misc_feature (81)..(81): n is a, c, g, or t
ggagcgggtcggctacaactnggcntacaacaccatgctcaccaaaacatggcgctccagcgccacaggngatgaaaagtntgctgatcggctgctgaaggacttcacggacttctgcatcaaccgtgacaaccggctggtcacgttctggacaagttgcctggagaagatgcatgccagtgccccgtgaggccaggctgcacctgtgctgggggaaggtgggtgagccactgccctcaaacccggggcggaggattccaggcaggctctaggagtcaggtgtccgtttgctgctatcagtgagtgggggccattgttttttgtttgtttgtttgtttgtttgtttgtttttggcccccacgacaagtcttctactctagaagaaagactttggaagcagctgctgctgctgccaccactcctgtcagcaagtgctcagagcaggtgggaggcacagattgtccgtgggagggctccagtgtctgggaagagggcaggcggcccccatgaatgtcctcggaagggggtggctcctggtagcatccttttccttcaccatctatgggatattaggggcagaatctgccacttcttgcccaggagtgtgcacagatgtaagataattttgtgaaataatgtaccatagactctcaccaactgtatatacctgtacatatcagaagcaaataaagagctccacgtgcaaaaaaaaaaaaaaaaaa

SEQ ID NO: 236638 - DNA, 654 bp, Homo Sapiens
ggcacgagggaaaatccctacagccaaacctgagctcttcgcttatcccctggattggtctattgtggattctatactgatggaacgtcgaattagaccatggattaataagaaaatcatagaatatataggtgaagaagaagctacattagttgattttgtttgttctaaggttatggctcatagttcaccccagagcattttagatgatgttgccatggtacttgatgaagaagcagaagtttttatagtcaaaatgtggagattattgatatatgaaacagaagccaagaaaattggtcttgtgaagtaaaactttttatatttagagttccatttcagatttcttctttgccacccttttaaggactttgaatttttctttgtctttgaagacattgtgagatctgtaattttttttttttgtagaaaatgtgaattttttggtcctctaatttgttgttgccctgtgtactcccttggttgtaaagtcatctgaatccttggttctctttatactcaccaggtacaaattactggtatgttttataagccgcagctactgtacacagcctatctgatataatcttgttctgctgatttgtttcttgtaaatattaaaacgactccccaattaaaaaaaaaaaaaaaaaa

SEQ ID NO: 236639 - DNA, 653 bp, Homo Sapiens
  misc_feature (18)..(18): n is a, c, g, or t
cgcatccgccgcgtcctntgcacacgttgccctgcaggtccaccccccactgcactgttgcagctctccaggagcaggtttctcagagctcggtttcccgccagccgtgcaacgctgggtcatcggacggtgcctgtgtgtgcctgagcgcagccttgcctcttacggggttcggcaggatggggaccctgctttcctctacttgctgtcagctcctcgagaagccccagccacaggacctagccctcagcacccccagaagatggacggggaacttggacgcttgtttcccccatcattggggctacccccaggcccccagccagctgcctccagcctgcccagtccactccagcccagctggtcctgtccttcctgcaccttcatcaatgccccagaccgccctggctgtgagatgtgtagcacccagaggccctgcacttgggacccccttgctgcagcttccacctagcagccaccagaggttacaaggggagagtggcccttccctcacaagtccgacatctccaggcccccactgaactccggggacctctactgactgcttgctgggacagtcaccagggttggggggaagggccacaaaatgaaaccattaaagacccttaagagccaaaaaaaaaaaaaaaaaa

SEQ ID NO: 236640 - DNA, 737 bp, Homo Sapiens
  misc_feature (93)..(93): n is a, c, g, or t
gtgtgcaaaatataagtaagtatatattgaaaatataaaatatttcatatatgtatccaggtggaaatttagaatccaaattttcttaaactntaataacttgtctaacaactctctaatagggactaaaaatcaactcaatatatcatacatttacacttacaaagagtctttagacaacataatttttggaaaaataaagcaaattcaactttattggagttattggacagatcagcaaattgttattttaaaaagttttcttgtttaggcaatttggtaagtggtttctagttataaactagccactgttgattaacttgagaaggtgaagcaggggagttctgaagagattacctagagctacttaaccctaagttaagtaaaattttcactttcattcttttcattctctcataaactggttgaaaaaacactgtactaccaacaaaggtgtcagttgcttgtgctgccctgtctatgttatgctctgaataggtctcggtaaagattatatggaaatactataaagaatacataaggtaaaatactagtcagaaagggttcagaagaagttagcatcaactgtatgaaaattctaggtaaagctaagtactattgagttggaaaaaagtaattctatcatgtttgcttgttttcctctactgtttttaatgtgatgttgtaatatattttaaaaataaaacttgaaaacgttgaaaaaaaaaaaaaaaaaa

SEQ ID NO: 236641 - DNA, 692 bp, Homo Sapiens
cagtatcaccagtcccaaagacaggatacgtccctgtaacccaatctctcggttgattgatagcagaacagctcttgttggtctgagaaggcaggataagtgaccacatatttatgccactacctccaccagggagagtccttctccacaggcttgataaattcaatcaccaactgtgctgtcgtccctgactctgctactcccgttcttcctgctttcctgctccgtatctcagtctgcactgaccccagggctggctgacatcaagatgggagcccagcccacgggctttataaacacccaagaaccgtttcagatcttctctgtgctgatgcaggtagttttaaatttttctcagttccagtgatagaaaacccacacaatacatcctctgccagtcttaatagaatatcagaggtaagaggggcctcagagaagctctgacgcagtgctgctggggaagggaagtgactaaccccgggtcagcctgccatttagggaaagagctgaggttcttacccttgttgcatgctgccacctctccttagccagtgctcttgtacatccacacagcaccctaaggagccatagtcaccatcaaagactcaaccctaaggcccttcaagatctcaaagtgccttctgaagcatcagagattaaatattgttcaaactaaaaaaaaaaaaaaaaaa

SEQ ID NO: 236642 - DNA, 382 bp, Homo Sapiens
ggcaagagggtaatcccagcactttgggaggccgaggcatgagccactgcgcccggcctaaaaattttttaaattgtgtacattatggttttttttttttaccccaatttaaaaaattaatttttaatatacatgcagaaaaatgcacaaatgacaagtatatatcttgatgaattttcacaaatggaatacatttgtgtaaccagcagcagatcaagaaacagaacattgttagtgccccagaagccacttgtgtgttccctctcagtcactgcttttttcaaggacaaccactcttttgactcctgataccataaactaattttgcctgttcttgctttatatttaaagggaatcacagggtaaaaaaaaaaaaaaaaaa

SEQ ID NO: 236643 - DNA, 738 bp, Homo Sapiens
aggaatgaagatacaagtagacatgcaagttggaaattttctttagaaaggccatccagaataatgatatctgttgcagtcgtccaaatgcaatatgaaatttcctaggtgctattataaacggtgtggtgtcataccaaatgcaaaagcagttacagtatttccgaagttggagttctctttgtaggcctttcaaatacgtgtttgcattccatagaggtctgctcaccaactgtgcctctcaccactggttaaaattgaatttaagcctcattgacataagtcgtttcttgattgaactcttcagtttttacactggaatttctgtagttgtcttgaaagctgcatgtcacatcactgtacacaaagtgctttggtattactcatgcaccgtggatagtgatttctgtgtcgttttcattttcagttgtacagtaatatggaaggcaggatgtctttcctagaggctggaagaaaagtgtatcgtacattttaaatttattttagaacaagtgcatgagatgtgtcactgatttctgttatttatttgtatgttttattattcaaagtgtatgcacttttaagaagcagaatttatatttttacgtttgaaacgttttatttctgaaacagcgttgattatatagtatacagttggaattaagagaaaagtggaaaatgtaacaaaatacaataaatttattacaagatgtcctcttcaaaaaaaaaaaaaaaaaa

SEQ ID NO: 236644 - DNA, 732 bp, Homo Sapiens
  misc_feature (25)..(25): n is a, c, g, or t
ttcagctgctgatgttgggcccttnccaatacgccttcttgaagataacgctgaccctggtgggcctgtttctcatccccgacggcatctatgacccagcagacatttctgaggggagcacagctctatggatcaacactttccttggcgtgtccacactgctggctctctggaccctgggcatcatttcccgtcaagccaggctacacctgggtgagcagaacatgggagccaaatttgctctgttccaggttctcctcatcctgactgccctacagccctccatcttctcagtcttggccaacggtgggcagattgcttgttcgcctccctattcctctaaaaccaggtctcaagtgatgaattgccacctcctcatactggagacttttctaatgactgtgctgacacgaatgtactaccgaaggaaagaccacaaggttgggtatgaaactttctcttctccagacctggacttgaacctcaaagcctaaggtggatggcttggacaatgaaaggatgctgtactcattagaatacaagattcctttactgtccctcaaccttgaccaaatgggaagcattcccccttgtcaacacaagctggcagatacatttgactctacagatgaaggtgaacaatgttaggataaaattgctttggatcttgcctggaaggtgttttaagttttgtaataaacaagatgatgtctgaaaaaaaaaaaaaaaaaa

SEQ ID NO: 236645 - DNA, 658 bp, Homo Sapiens
gaaagtattccctggggtttggattattttcacaagggttatgccgttttattcaagtttgttgctccgttttgcacctctgcaataaaagcaaaatgacaaccagtacataaggggttagcttgacaaagtagacttccttgtgttaatttttaagtttttttttccttaactatatctgtctacaggcagatacagatagttgtatgaaaatctgcttgcctgtaaaatttgcatttataaatgtgttgccgatggatcacttgggcctgtacacataccaattagcgtgaccacttccatcttaaaaacaaacctaaaaaacaaaatttattatatatatatatatatatatataaaggactgtgggttgtatacaaactattgcaaacacttgtgcaaatctgtcttgatataaaggaaaagcaaaatctgtataacattattactacttgaatgcctctgtgactgatttttttttcattttaaatataaacttttttgtgaaaagtatgctcaatgttttttttccctttccccattcccttgtaaatacattttgttctatgtgacttggtttggaaatagttaactggtactgtaatttgcattaaataaaaagtaggttagcctggaaatgaaaaaaaaaaaaaaaaaa

SEQ ID NO: 236646 - DNA, 756 bp, Homo Sapiens
  misc_feature (84)..(84): n is a, c, g, or t
  misc_feature (89)..(89): n is a, c, g, or t
  misc_feature (157)..(157): n is a, c, g, or t
gaacagttcgcatatccgaggaggccagttccagctgagtgcttgcaggcgtgagcgcagggcacggtggtcagcgtgcagcgngacgngactggccctgcccagccatgaatcgcttggccatgcctggatctgttttgttttggtttttggtttntgggtcagggtttcactgtgttgcccaggctagagtgcagtggtgccacagctcactgtgaccttgaccttctggactcaagtgatcctcctgcctcagcttcccaagtagcggggatcacaggcatgagccgccacacccggccatcacacctggattttcagtgggaggtttttggtttggagacatccaaagcctgaagccaggtgggtgtgggcaggggctgcattttatgaaactgcccagcaagctgcgctccctggggccccaggatccacctaactggcctggcacctggtgccacgtgctgctgccgccaggatatgcgccttcccacaggtgccctgcctgagttgtgtgcatccaggggcctggtgagcccccaggctggtggcatggcccccctgccccgtgctgaatgaatgtacagagccagacaaagctgtgaatggcctaggggctgagtcccacaccagctgtgaattctcctgcagacaggagggccctggctgtgcacctggggaagtggttgccctggggccagggtgcttgttctgttcaaataaaggtacctcttttccacaaaaaaaaaaaaaaaa

SEQ ID NO: 236647 - DNA, 728 bp, Homo Sapiens
  misc_feature (25)..(25): n is a, c, g, or t
  misc_feature (191)..(191): n is a, c, g, or t
cgaccaggagtcctcgggagctgtngcgggcgagctgccggctgtgggggccctgatggagcgtctcggtgtgctgtggacgctgctggtgtcccgctggttcatctgcctgtttgtggacatcttgcccgtggagacagtgcttcggatctgggactgtttgtttaacgaaggctcgaagattatcttcncgggtggccctgaccttaattaagcagcaccaggagttgattttggaagccaccagcgttccagacatttgcgataagtttaagcagataaccaaagggagtttcgtgatggagtgtcacacgtttatgcagaaaatattttcagaacctggaagcttatccatggccaccgtcgccaagctccgcgagagctgcagggcccggctgctggcacaggggtgagcgtgcctgtcccctgcgttgctcgtctctacactgacgatgcccctttccagagttgacactggaccaactttcactgctttcctttttagtgttgtaaatacttgacatcactacactttagttgtgaattttttaaaagagcagtttaaaatcaggtcattctaccagcttttgatgattagctatgaagtcatactttttaaagaaaacttatttttacctgagagatcaataatatataaaatgtgagtgtgggtttgtatctaataaagtatgccaacacctgtgtttgtgaaaaaaaaaaaaaaaaaa

SEQ ID NO: 236648 - DNA, 712 bp, Homo Sapiens
cagtgtcagctccaagtccacatccttattatccatgattcaaaagggagagagagaacttcctttttcagggtccacaaatcaaatctataaaaggactctggtcttcccaggatcacctgcccttgcattggaccagtccctgtggaagaggggatgggggcctgtgatcttggccaggcctgggctatctatctgcactgtcattgctaactcctgtcagaatcacatggatgagtagtgggctgaatcccaaaaggaaaggggtttagagcaagtggaaacaacagatgttcactatagaaagcaagaatgaaaaccatgaagtggttgaagattagccttacagtaattttattctgatcacttaatacagtagagtcaaacaggaatccaagtttccaactttattatttttggcactgaagaattacaaagaactctagcgtctttatacctccgtggttcactggagttaaagcaatcggggcgttgtacagctcacttgagtttttaaaggttctactaaaaagtgagaattccacagcaatatgggtcattgttgcagaatatcacaaaggtctgttgtgtatactccttttcaccaggaaagggacaataatagtttttttcaatgtatatatatataagtgatctaactttttattaataaaagtaaacaactctaaaatgtaaaaaaaaaaaaaaaaaa

SEQ ID NO: 236649 - DNA, 762 bp, Homo Sapiens
  misc_feature (226)..(226): n is a, c, g, or t
gtgtgataaaggcaaatccaccctgttgctgtctactgtgcagtatatcagtagcttttatgctagctgtctgtctggagaggagtcctattggtggatgcagttcacagcagcagtagaattcattaaaaccatcgatgaccgaaagtgaccaagaccaaggcccaccaaggcagcagactgttaatcagacaaacagatctctgagaaggtgcatcagctgctntgaaggctgaagattgttttgtatgatactgcacagcatcaggcattttaaagcagatctttactaaacaggttaatgagctaacaagcaggttctctcgtctttgggctctttcctttctgagttgcatattctattttcttgtccccaagtagagactagtactacaaaaagggaccacatttttcaagtatttctaagtataaaaaacaaaacaaaaatctcttaggaaatgtctagacctccattcttggattccctttctttccttttattttaaaaaagaacagtacccctcttttaagatgctgtcttacattaatgagcatctaatggaaagaaggtatgagttgcactgaggattagaatagtggtgcgttagtggcattatctataaatacactcacctaaattgaaagctaagaaggaaatgtaaatataatatatatttatatttgatgtaatatggacatctgcagattctaataaacaaggactattgctgatagtaggctgtgaaaaaaaaaaaaaaaaaa

SEQ ID NO: 236650 - DNA, 767 bp, Homo Sapiens
  misc_feature (105)..(105): n is a, c, g, or t
  misc_feature (132)..(132): n is a, c, g, or t
ctagccctcttccattcatttctcacacagcactttgctctgttaaatcctctctctgtctcagaccattgcttgccccttcaaagggtatggttcaggctcctntcaagacatttggagtttctctctggngaaagagagccccctactggtttggcttcagtctaggtccaccatccctctcgatctggcatcttggagattaatttaaaaggcaagctcaccacaatgtaagcctatggtctggccaaccttgcttttgggaactgtgacaccaaagcccccaggactatctgcctctccaggagccagatagaatgacatgcctttttcctaattgtccacattccacccccaacccactgccactgtgggccaagccatccatcttgcaatcttcatctaaaacagctctcatttcatgccagttttgctcaaacctgcaccgtcacaagatattcagaagatgaaaacgtagaagacacccctgaattaaaaacacttacatagcagtggctggaattactccaaaacgtgcccagtgatcgcactgtaacatgggattttctcacccaaataggcaactcatgcttcctgagtgtaatcaaagcatgtggtgttttggggccatatgcaccaggtttctattttagaaaccttcagctgtcttgcttatgtaccgtatgtaaatttattctttttaaaaatcacttttatttgattttgacttattaaatgctttaaaagccaaaaaaaaaaaaaaaaaa

SEQ ID NO: 236651 - DNA, 708 bp, Homo Sapiens
  misc_feature (42)..(42): n is a, c, g, or t
aaaaggtccagtagaaaaggagctggatgtgggtgctgattntgtggaaaagtcagagttacggagctcgcctctgcattcagaaactgctataccctcttcagccttgcagaggtttgcagcagatgccaggaaagccaagtacattccaatacccaatcttttccctcagattttccatctccagagcttccctttatggagctttctgaggatattctgaaaggatttatgagtaactaaaatggaaggccatagaagaagggagaagaggaaataatactaagtcatacagttaatccagcaacaaaaaatgaaaagggaaagccacaggcaagggtaatcctggaaatgcctcgtcatctggtgtactgtaggagaagacgcattgccaggatgtggggaacagtcgctgtgaagcgtgtcacatacctgattcactgacttgagctgatgatgccgacctggcagacactaaactcgtggagggtcagtttctcttgacaccaaccaaatggctgcctgaaagaattttttcaagcaacaattatttttcttatcttcagggttaaaatgtataaaagtatgttatgtataattaatctgttatgtcataagtgatcatgcaaaacctaaatattatggcagcctgaggggctgcttcgtatttgaaacatgctttgtctcaggaaaaaaaaaaaaaaaaaa

SEQ ID NO: 236652 - DNA, 652 bp, Homo Sapiens
ggcacgagggatacttcgtctttctggacttttcttttagccatatatcataaaccaacacagtaattgccttacatgacttgaaagatataaacagatcttctatcagtagcagtattgttacttctttccaggatgcaaggtctattatcccaacagaagagaaaatatttttatatttaaggattatgctgcactgtactacaaaattgtagtacttttttttgttttcttttttaaagaaatggaaaatgtttactattacagggacctcaacactgccctcccatacaggctggataaaactgtttttaagtcagtgattttagactgacctccatttaaattatgtttatatatgaactttactctgacctgtgatcatgtttcaggaaggaatgaaagagagttctttcttaataaagaaaaacactcaaggactttgttcatttccaaagctacttgtttacattgtacactgcgaccaccttgccgcttttcatcacaagcttgaatatttaaattctgtacttatatctgtaaaatagccaggaatttcctgtttgtgatctattatgcctttttacaaaaaaaatggctgtaaattattgtaaatattaaaggaactttccttaaaaaaaaaaaaaaaaaa

SEQ ID NO: 236653 - DNA, 706 bp, Homo Sapiens
  misc_feature (204)..(204): n is a, c, g, or t
  misc_feature (226)..(226): n is a, c, g, or t
cgcaagcacagtgaggccaaaaccctatgtgtgcaatgtgtgccaccgtgctttccgctgggctgctggcctgcgccatcatgccctcacccacaccgaccgccaccccttcttttgccgcctctgcaactacaaggccaagcaaaagttccaggtggtcaagcacgtacgcaggcaccaccctgaccaagccgacccaaaccnagggtgtgggcaaagacccccnaccacccccacagtgcacctgcatgatgtgcagctggaggatcccagccctcctgctcctgccgctccccacactggacctgagggctgaaagcctgccccacctcctgtataggaagagggtatggtctgagatgtgcagactgggaccagcgctagcctgaggagctcagagcctaaggaaagactggcttttggggtacaagggtgactagaaccttcctgggactctggctatagtactttgaaattatcacccatataaaagagggacatggactataacgttgatttcttattgctgtacattgcgtttttaacctgcaagttctcagtttcttcaccatcactccatcaaagtccctggctataagatctggattttacccactccatcttctctttccttcttactgtgtcaattcctattttctttcagaatcttctaaaaacagttgtatctaaaaaaaaaaaaaaaaaa

SEQ ID NO: 236654 - DNA, 468 bp, Homo Sapiens
tcacccaaacagcaaaggtggtggcctgcccctctctctgggagctctgtcccgtgaacacttcaaatttctattggccaaggaatgctggtggtggtagctggaggccccatttgggaggtcctgtacagtgatgtgcaacaaggtcgggggcctgcttacagaagcattctggccatgatttggtaaagcagctagctgtgctgtgggatctcttctgccccttgtcggtttatactctccaaagccctcaggctggaatgactaagttgcctgaacaggaaagatggcggcctgccccatctattctctcagagttcatcttgtttgatggagcttaatttttagcctgttaattttactgtctacattagacttgttcggaaagaatctgctatattttaggttagatatatgagaattcattgttttctgtaaataaacctgttcatgtcttgttctctggaa

SEQ ID NO: 236655 - DNA, 694 bp, Homo Sapiens
caggcacagagacactactggggacactactgggatactggccacccccctgccctgtgcctgggtcacagcctacacactgcagccctgtgcccctcacacccagcaggttcctgctccagcgtggctcctggactggcgccagatgctggccctgggggtttcaatccaagcataattcagtgaagcatgtgtttggcagtgggacccagctcactgttttaggtcagcccaagactaccccgtcggtcattctgttcctgccgtcctgtgaggagccccaagccaacaaggccacactggtgtgtctcatgaataactttatccgggaatcttgatggtgacctggaaggcagatggtaccctcatcacccagagcgtggagaagaccacgccctccaaacagagcaacaacaagtacgtggccagcagctacctgagcctgacgcccgagcagtggaggtcccgcagaagctacagctgccaggttatgcaagaagggagcaccgtggagaagtcagtggcccctgcagaatgttcataggttccagcccccaccccacccacaggggcctggagctgcaggatcccaggggaggggtctctctctgcatcccaagccattcagcccttctcgctgtacccagtaaaccctcaataaatatctttgtcagccagaaaaaaaaaaaaaaaa

SEQ ID NO: 236656 - DNA, 742 bp, Homo Sapiens
gtcagcttggaacttttttcctgggtagtatctgggagagggaaaggctgtactatatatttatttctaaatgttttgactgggcatttttcttttaatgaaatatgtggactgctctagcaaaccctattttcagctactatttgaatattcttgaacaccaccactgaagagtttcatatacaccaaataatgtctcatctctatagtacagggaatataaaattggtttcctgtggtcatgatcaagatagtagtattattacacaagaaacttggtctgcagtctggaagcttgtctgctctatagaaatgaaaatgcagcatgaagttgacattgtggaaatgaaagtaattgggtattagaaatctgaaagtactgtcatctaaaagcaattgtgattttattgtaattggttgtcactgttgtacggtgtctagaattaaagaatacatgtaaactttcatggtatttagcctttcttaaatttttttaaaatttaaactttctaacctatgtattcaacttctgtatttatatttaatcagtggttcatgttatataatacacccttaactagttaaatggaatgttggtatggtacagagtaccatattgctaagaaaactgtcttataaaagatgtatatgtgtgaagacatgaaagtttaatgtacagaatggttggagaaatgcctatggtgaattaaagcttcatatctgcaaaaaaaaaaaaaaaaaa

SEQ ID NO: 236657 - DNA, 712 bp, Homo Sapiens
  misc_feature (20)..(20): n is a, c, g, or t
  misc_feature (37)..(37): n is a, c, g, or t
aggacacgcttccctctcgngatgtgtgatgaactcncaggagagggaagatggagccagggcaagataggaagctctgcctgagctttccactaggcacgccagccagaccaataaaaagcgtctgtcccactctgctaagcctggttttcttgagcagagggatggaacagagggtgagagaggcagtggccgtctccacctcagctcctgctccctctgcatcagagcccttcctttcttgggggatgggccttgccctcttctcttttcccttcctgtacctttgactaacgctcagcttccgggcctgcatgcagtagacagaagaggaagaaagaacagatgttcacagctgaatctcagtgaacagaatagcagtccctggatggcagtctgcctaaagattcctttccctgccttctcccatacattccaaaaggaagttcaacagtaagcagcacctccaagactgtctcctttcggccagtatcataagatggacgccataatcctgaggcctcctagaggctgagggggcaacggtgtgatccagctggctcatcccagcccaggtgggccaattattcaattttcaagaattttgttgcaagccagttgtcaaacacagccattataattatgtaaatttgcaaattatgttaaaaacaaggacaataaatattcaaaatgcaaaaaaaaaaaaaaaaaa

SEQ ID NO: 236658 - DNA, 750 bp, Homo Sapiens
  misc_feature (25)..(25): n is a, c, g, or t
  misc_feature (140)..(140): n is a, c, g, or t
tcctggcaagatacccataagcatntcgccaatcagaatctcattttatagtttttcccattggtctttaactaagactttcttgtagcaatctcgtaagcagtgaaccccctcagatcagtagaatatagtatctgggngagaagacttacttccttcagggcagcagccacagccaggcttctgtcatacaggtagatcccgaagcacagagacataaaaaaggtctcccagaaaactatagaccattctccaagtggaattcccacttagggctctggtcactagattgcaacctgtgtgtttgtcatcatcctcatctcaccattgtattgctatgccctcccataaaaacacattgatccctagcaagattattgcattccagattttactgcctttgctaggcttttgcttagcaaagggctgactttccattgttatcatggtgtatatatttttgtcaccattcccacaagtatacttgatgttgtcatagaacgaacatcctactctatgatttactaaccaattactttcccagatcatagacctctctgcatagtagtcataggtcttgactttggggaaagaaaaggaagctgcaggaatatttatctccaaagtcgaatgagaaagaactccagcaaatccaatggctacaaactaaaaatcagcattatttcatattgctgtttcttagctgaatatggaataaagaactattattttaaaaaaaaaaaaaaaaaa

SEQ ID NO: 236659 - DNA, 787 bp, Homo Sapiens
  misc_feature (93)..(93): n is a, c, g, or t
  misc_feature (147)..(147): n is a, c, g, or t
tcgtctttttgtctcaaaagtacttgaggagcccaaggacttttcttgtgaaaccgaggacttcaagactttgcactgtacttgggatcctgngacggacactgccttggggtggtctaaacaaccttcccaaagctacactttatntgaatcattttctggggaaaagaaactttgtacacacaaaaactggtgtaattggcaaataactcaagactcacaagaaacctataacttcacactcatagctgaaaattacttaaggaagagaagtgtcaatatcctttttaacctgactcatcgaggtgagactagagttgtcacagcccaccgtggccactaacgtgtctttgtttcacagactgtgtgatcaagtaaatgtgctgtagatctttgcctcattcacagcggaggtgagagttagaatttatacctattgttcatgccacgtttctcctcatggatgcacgcatcccctattatttgtttcttttaataatgtcacgagcaccaatgagcttactacccaacttcaaaactaggactctaacaataacttctgtcatatctcatcctgtaacgcccccaccttcgctccttccgccaagataattatcactttaaattgtgtgcgtgtgtattctcatttcttatgtgatggtaaaaatgcctttattttgtttggttttaatgcatagaaaggacatcaagctgtatgtaataattcagtaattatgtttatataatattaaattgctaatatttgcccataaaaaaaaaaaaaaaa

SEQ ID NO: 236660 - DNA, 775 bp, Homo Sapiens
gagattcaaaagaaggaagtagttcagataaaaagtcttgtctgcaatcatcaacaaaacattattccccgacttacagactttgtagaattcctttgggatcctttgtcaacctcacagacaacaagtttaataacacattgcagagtgattcttgaagaacattccacttgtgaaaatgaagttagtaaaagcagacaggatttacttaaatccattgtttcaagaatgaaaaaggcagtagaagatgatgtttttattcctctgtatccaaagagtgctgtagaaaacaaaacatcacctcattcaaagttccaagaaagacagttctggtcaggcctaaagctcttccgcaatattcttctttggaatggactccttacagatgacaccttgcaagaactaggactagggaagctgctaaatcgttaccttattatagcacttctcaatgccacacctgggccagatgtggttaaaaagtgcaaccaggtagcagcatgtctaccagaaaaatggtttgaaaattctgccatgaggacatctattccacagctagaaaacttcattcagtttttattgcagtctgcacataaattatctagaagtgaattcagggatgaagtcgaagaaataattcttattttggtgaaaataaaagctttgaatcaagcagaatccttcataggagagcatcacctagaccatcttaaatcactaattaaagaagattgaataaactttattggaaaatgctaaaaaaaaaaaaaaaaaa

SEQ ID NO: 236661 - DNA, 581 bp, Homo Sapiens
ggcacgaggcggctgtaggccttttttttttttttttttattttttttttttgaggagtttcgctcttgttggctaggcggaggttgcagtgagctgagatcgcgccactgcactcaagcctgggcaacacctgggtgacagagcaagaccccatctcaaaaaaaaaataaaactaggtcaagtgcaatgacacacgcctataatcccagcaccttgggaggctaagacaggaagatcacctgagcccaggagctcaagattgcagtgagctatgaacaccactgcactccacctgtccacttgttcttgtgtgacagaacaagaccctgtctctaaaaaataagataaaaccataaagaaacacagtcagtactatacaagaataatggctacttctagagggaaggagttgtcattgtgatgaggcacttggaggggttctggggtgcctgacaaagttctgtttcttcacctgggtggtagttagaagggtgtccccgtatttcaaattgtacctttgtgagattgtatgttttgtaataataaaattttttttgtaattaaaaaaaaaaaaaaaaaa

SEQ ID NO: 236662 - DNA, 590 bp, Homo Sapiens
ggcacgaggagactctccagtagtgcctttgatgctctacatgcctgccaaaattggcgcctttggacgggagatgctgaagcggaacatcggtgtcgttgtggttggatttcctgccaccccaattattgagtccagagccaggttttgcctgtcagcagctcataccaaagaaatacttgatactgctttaaaggagatagatgaagttggggacctattgcagctgaagtattcccgtcatcggttggtacctctactggacaggccctttgacgagacgacgtatgaagaaacagaagactgagcctttttggtgctccctcagaggaactctccctcacccaggacagcctgtggcctttgtgagccagttccaggaaccacacttctgtggccatctcacgtgaaagacattgcctcagctactgaaggtggccacctccactctaaatgacattttgtaaatagtaaaaaactgcttctaatccttcctttgctaaatctcacctttaaaaacgaaggtgactcactttgctttttcagtccattaaaaaaacattttattttgcaaaaaaaaaaaaaaaaaa

SEQ ID NO: 236663 - DNA, 722 bp, Homo Sapiens
  misc_feature (702)..(702): n is a, c, g, or t
ggcacgaggtctggcagaaactcgcatgtatccaagtaaagtagtttagctaaagaaaggttcttcattgcttttctgttcacagttgtggctctgttttttaagaatgtaacttgtttttagattatacttgcatctgtgactttactaccagccacgttgacacaaaacaggttctggttcaggtaaagttgcgtcagtcacctgcagcagaaatccctcttcattcctcttctctgtgttcattcctcttctgtgctgttctgaagcttctaccaatactctttccatattgtctttttcagtgaagagaaatgcattcaagattaggtccctcctgtctatccagtttcaggattttatgttgttttatacacagttatttcagtatagaaactggctttattgccaagtgtttttttaaacatgttttaactctcatatgagcaaactgtccaacttcagtttttcataagattaaacttcttacgatcaaatttgtctcttgcaatgatgtgatgagttgccaaataattgagattattttaaaatgttttgttcatattcttgttttataattaaaatttacattcagtgtgtatgggtttttttttttattttgactcttaatgtaaggtggatatttctgtcattttacatggtttcttactgagattttatatataaattataaaatgtttnccaaaaaaaaaaaaaaaaaa

SEQ ID NO: 236664 - DNA, 691 bp, Homo Sapiens
gtaataacagatttaggtaagtaaaaaatgagaatctcatacagttctgaagatctaagtttggttgagaatttaatgtttcatcaccagtaaattcaattaaagacttttgattcaattaaagactcagttctgcctacacctgcaagaactgagttgatctgtacatcaacatttctgatgtttctttggtagttgctgctggagtcagaagttaggaacaaatctaatggcctttgtaatgtcctctgtcatttcacggaggaatgacttagaggaacaaagctttcctgtgatttctttcttcaacagatggctaatggcacagcattgcagttagaatcctgtttaagatactaggagcacgtcctggactaaaaatttctacataagctttagcaacaaccttatagcttcctttgacttttttgtagagcttacagaatgtatggctgcctaagtaatagtctctgaattaatgggtaaaaaatatattatgagttttttatcctcacgtatggtgctaggctatactggatttgggctaacaaaagcttgttaacttttttttgtctcattgacagaagtattttatatctcatattttacattacataggtgtgtgtgtgtgtatgaaataaaagtttgaaaataaagtgatatactcttttttaaaaaaaaaaaaaaaaaa

SEQ ID NO: 236665 - DNA, 785 bp, Homo Sapiens
  misc_feature (110)..(110): n is a, c, g, or t
  misc_feature (113)..(113): n is a, c, g, or t
  misc_feature (203)..(203): n is a, c, g, or t
tcacactggtctccaggggtctgtgatggggcccctgggggtcagcttctgtccctctgccttctcacctctttgttcctttcttttcatgtatccattcagttgatgtntantgagcaactacagatgtcagcactgtgttaggtgctgggggccctgcgtggaagataaattcctccctcaaggactccccatccagctgngagacagacaactaactacactgcaccctgcggtttgcagggggctcctgcctggctccctgctccacacctcctctgtggctcaaggcttcctggatacctcacccccatcccacccataattcttacccagagcatggggttggggcggaaacctggagagagggacatagcccctcgccacggctagagaatctggtggtgtccaaaatgtctgtccaggtgtgggcaggtgggcaggcaccaaggccctctggacctttcatagcagcagaaaaggcagagcctggggcagggcagggccaggaatgctttggggacaccgaggggactgccccccacccccaccatggtgctattctggggctggggcagtcttttcctggcttgcctctggccagctcctggcctctggtagagtgagacttcagacgttctgatgccttccggatgtcatctctccctgccccaggaatggaagatgtgaggacttctaatttaaatgtgggactcggagggattttgtaaactgggggtatattttggggaaaataaatgtctttgtaaaaaaaaaaaaaaaaa

SEQ ID NO: 236666 - DNA, 611 bp, Homo Sapiens
ttttttttcacacatcatacaaagcattacaggtgaaaagaaatgtaagtaataaaaaaagtctcccaagaaaaaaaatgtgcatgtgtgtgtgtgtgtgtgtgcgtgcgtgtgtgtgtatgaatgaagagacagagccagtatgaagaaagtaaaagttgaagattaggccattgccaggtatgacatagaactttaagtaacaaagtgctgggattataggcgtgagcccctgcacccggccaaaagttgatttttaattacataaaaatcgtaaaaacttctagtaaaaacttgatttggtgaatacagttatattttaaaaccttaaggtgacaagcattttctatgcctaaatcttcattggtttgcctggaaagagtctctgttaaaagattttccatattcaaagtaaaaggaaagatttcttgctttctaattgtcttttggacacatgcctattttctttgaggtataaacctttagatgtgaaaaatgtaatttcattctgctattgtgtgtgcttgtgtgtgtgtaattgaaaaaactgggaaatcctgctttgttggtaataaatcaatatttttatattcaaaaaaaaaaaaaaaaaa

SEQ ID NO: 236667 - DNA, 765 bp, Homo Sapiens
cagccaacatgatttgactggaccttttacaggaagctagagataaatttctgaagagaactatctgctattatataataatgttttaaattcaaactagtaaattttagtttgtcttcagagtttaaaaggttttcattttgtacataattatacaatatttatcatttgtattttccacttcatttcttttaaaatatctttaatactgaaatgttcttttaattttaaaaagaactgagatattgtcttgtatacttatattggccaaagttttcttttcctccaccatacatgtctatgtgatttaatcagtaaattgtactgtaatgagttgctaagaagacaaatcagaagattggaggaacaaaagatatctttacagatttttcatttgagcatggagtgagaatagaaagaccagtttcaggcttatgcacttacgtggctcatgcactttatgtatatgttccaggaaaatctggcttaaaaatactggtattgtttacatgaagcagtgaaaggtttttgaataactacaaatgtagttctatatgtatataccaaatgaatttctgttctgtgtctctctgttttatgttatgaagccattcgctcatatacaataatctgtcaaggactttaatcatacttgttccaaagagtagtaaccggatggaattctggtatttacaggcattggtgctagatggtacattttatgtgttaaaataaacattgtttttgagaaaaaaaaaaaaaaaa

SEQ ID NO: 236668 - DNA, 690 bp, Homo Sapiens
gttgcttctggtgagaaggacatcccattgacccctggccaccaggtccagtattccatccttccttctgtcccagcctatcgccctccccaccaggcccacccccacaacttctcctcaagggaggttgctcccgcagctggagggcttgcacagaccagcagtcacagaaatcattcttcctgctgtactgggccttaactgcctgcaaatgtccagcactactgcataggatgccagagccaccgaaggaaaacacagccaagtttaataataataaaaggaaaaatctcagcctgcagaactctggttttgacccaccatcggccagatgcacatcttcagggcctgttgagcaccttctgaaaagcagggctcgtaatagactccagcacattccatcagagtcaggaaaactgcggtgagtcccagagaatctagggtgcagggcagggagcaggagtcataaggagtgataacctaaactgtgtgtagtcagcggggagggtcttatgttatcaggtgaaatgagagccagtaagttagttgatcctgtcacagatataaccctgataacaccccatagatacgcgacacgtgtgtcctgcccctgctttccccatccaacatggttcttctgttccacagacattaaaggggctttctgcaattaaaaaaaaaaaaaaaaaa

SEQ ID NO: 236669 - DNA, 754 bp, Homo Sapiens
aacagatattttcagaaaaatcaaccgattgttttttccagaaacagaacagaaaatgttcagaatattttcaaatttgtcagattcttttatgtttcctttgaaatttattatttaagcctattactaaacctttataaaaatatatttggcaaatacaccaaagaaaccagcttacaaaagattatgatcattaatgaactgcaaacctcatctttcgaaaacaaggttttgtgtttttttttttttgtaaatatttgtgtttataaatgtacagcagagtaagagtgttttttagattatttaattcccatatttctaaactatttactacacagtaatccatgcctgttagtttggaggacttgactgtctcattttttaattcattgtcagtcatgcttggaacagcatttccactagagaatccagcgttctggcagtagcaagagtacacatctggagcatgagggactctagcatgactcgtcagatgcacaccccaagagacaagaatgtgtagtttaatgaccggcgtggaccatacgaaattgagattctaactttcctgcaggagtgctcatgagcccagaatgtgattgggataaggccatttgcccacaaatttagctttcatgtaactcctagtgtgttatatcataatgtattttgttcttcctttttaatgtaagttttgctttgggtcaatttgaattaaaaaaatcaaatctgatttaaaaaaaaaaaaaaaaaa

SEQ ID NO: 236670 - DNA, 735 bp, Homo Sapiens
  misc_feature (54)..(54): n is a, c, g, or t
  misc_feature (88)..(88): n is a, c, g, or t
tattttagattgctagaaaagacataatcatggattatgttggcattttctttntaaatttttgtttaactttttttttttttttttntgagacagagtctcactctgttgcctaggctggaggacagtggcacaatcatggctgattgcagccttgacctccttgactcaattgatcctcccatctcagcctcccaagtagctaggactacagacatgtgcaaccatgtttggctaatttttttaatgtttttttgtagagatgaggtcttattatattgtccaggctggtcttgaattcctgggctcaagcttcccaagtagctgcaacaacaggcacacaccaccatgctcaactaattttatttctattttttgtatagacaggggcttgctatagtgtccaggctggtctgaaacccttgagctcaagtgatcttcccacaccagcctcccaaaatactgggattacaggcttgagcctccatgcctggcccaggtaacatgtttattgagctgtacatgcatatgagaaataagaaacttttttttcctactatcatctcttaaattttgttttctttttcttttgcttcctcttcttcttttctattttttataaatatcatgcacaactataacctatgggaatgatgtagtaacacagattattcatcttgttagagttgtattaaaaataaacaagcatttcaaattaaaaaaaaaaaaaaaaaa

SEQ ID NO: 236671 - DNA, 756 bp, Homo Sapiens
  misc_feature (39)..(39): n is a, c, g, or t
cccagaagttcatgtgtgacacttaaatctccagatatntatcccacgtgggtctgatgcgggctcagcactaaattaactgtatgtggaaagtgtcaattgcagagccttctgtatcgatgaggcttccgccacttgtccatgcttagcccccttgcctcttccttgggagcatgctttctattcctatgtgaaacagcctgacataagtgaaaggatttgggctcaagcaaacatgagatgtgggttcatatcttggcaccactcctgatagctgtgtgatcatggcaaacctcgttttcatcgtctgtcaggtggagatgaagagaaatggtgcatgtaaagtgctcagcatctgtgcttagcaggccatagtctccctgcctcctttttcttgagtaagcctttagaactttctgactcctctagagaaggcagagaaacgaatatattttgggtgccatttggagtctgggtcttttgttaaaattgtcctgtattatgttgaaaagtgtcggttacccccaggctctgggggcatctgtgatcatagaatactgccatgcttattttgcctttctatgttgagattaattcactgacgcctcattttccacgtgcatctgtcatagtctgggtaccagattgtatttagagaatggctcttgccactgttatgtacacacagatcgtgtgtgtaaacaagcaaattaaagtaaactgagataatgaaatcccaaaaaaaaaaaaaaaaaa

SEQ ID NO: 236672 - DNA, 711 bp, Homo Sapiens
aaattcggcacgagggtgagcatagagcctgcctgtgcccagttccttctggccctcaggtggccaagcccatctcttcatccttcagatagggtcccactcccagaagaagctgctggggtgggggtgggaggctgcctaagcctgtctgtgcttcagaggcccctccagtccctggctgtggggtaactgggggtatgagctgtggccacaggtgagcaaggcagggaactgcaatccagccctggccgcgggaggggccatctctggccaatgctgctgtgccttcaaggactgacaagttacgtaggggcagaggtcgccagctagccagtgtctcctccatctggggggcgtctgtccacttgtcaccttaggttttcactcatttgtcaccttggggttttgctctgtgtgtttcatatccaacggcaatacttgcagggggacagagtcctctaaatactccaatcctgcggtttttacaaacataaagggggagaccccaagtggaggaccctgggcctggagctccctcccaaactttgtccagcatccagcctgttccctgggctcactggggagggagttgtcttcatagcacacccagagccagggatccctttgtagttttttgacaacggagcatttctcttctgtacaggacccaataaaaacttccttatgatttgcaaaaaaaaaaaaaaaaaa

SEQ ID NO: 236673 - DNA, 729 bp, Homo Sapiens
atcttccctccttgtgatattcatatcaaaatgagttcctttcccaaaccaataacaatctgagtggatgcatttgattactgtttttctaacattctgatttttctattcctttacagagcgaatggtcacagttggtcgctgggcaaagggaatgagtgcagactatgaagaaattttggatgtacctaaaccgcaaaaacccaaaacaaaaatacctaaagttgttaatttttgataacagctagcactatcatgagttactacctcattgttactttctaaaccaggcccgcttcacgagttagagttgagctcccctgtagccaggactatgctgtagatatcagtatgatctgggtgtggccaaaaacaattttctttattctgtctatcaaatagtacttctaccactgtttggagaaaattgaagaaaagaataagatgattaaatgaattctctaaaagaacatattttaagagacagaacttagacataaccaagtagttgtatacctgattgtaacaatcatcttttataaaagcaaaattatgcataaatgtaaaacacccctaaacaaagggaacaaatgaatttttggttatattgttttcttggctcaaagtatcaatttattattataatagaaatttataagttgctagaaagtctatatttttaaagtacggaataaaaatatgttttctattaaaaaaaaaaaaaaaaaa

SEQ ID NO: 236674 - DNA, 793 bp, Homo Sapiens
  misc_feature (96)..(96): n is a, c, g, or t
  misc_feature (107)..(107): n is a, c, g, or t
agctgcgactgtgagtgtctggcggcgggcgcatctcccaccagagtcaggacaggaagattcacgtgtacggctattccatggtgagccgcagcnccgtcccgccntgccggaggccccagtaccagcttcgaggcccacctgagcctgctgccctgacccgtggccccagctgagcacgcaggcttcctggggttctcccagggtcggcggcagagccctccctccagggcccattgtgttcctgcattcccccatggagcacacgccagacctgaggggtgggacggacacccccaggcatggccggctgtctcctctccctgccttgggaggccttgctgggctctagctgtcctccagcactttgggccctgggcccccagaggcagtcagtacctgggtggagctcagagtccccacctgtgctcttcacaaaaaccaccagcagatgagacccacgtgcgtccctctgggcgcctcaggccccaggatccaccatcaaggcctatggtcctgcccagcacgccatttcaactgagaaaatcaaagccaagtaccccgactacgaggtcacctgggctaacgacggctactgagcactcccagcccggggcctgctgcctccagcagccacttcagagcccccgcctttgcctgcactcctcttgcagggctggccctgcctgctcctgcggcagcctctggtgacgtgctgtccaccaggccttggagacaggctagcctggccacagaattaaacgtgtgccacaccaaaaaaaaaaaaaaaaaa

SEQ ID NO: 236675 - DNA, 519 bp, Homo Sapiens
ggcatggtgatatgctccactttgcattatccatggtctcttaccagcgcacaagtcagtggggaggatctaaccacgcctggtggtgaggaagctgaatttccaggcctgcgtcccatgtagcctctccatgaactgcagaaggcatgttctgcatggttaccagtaagtggctccctctcaccgtgttcattgtcaaatgagagcaaactttaggtgttggctccattgtacactctacttgctctgctcccctccctcctaccagggttcatgtcagtgcacaccccatgtgccctggcgaagctggtgctgtgagtgatgtttcccatacaactcagggatgccaggtggcttaccctgagatagtcattttgggcacataacagtgtaggaatgaaacatggatttcattgatatttaaatctgtcaatttcattttttgttaatgttttcccctgatgactttttagcaatttaacaaataaaatggacaattgtcttaactgttttattagc

SEQ ID NO: 236676 - DNA, 394 bp, Homo Sapiens
ctaggtgctgaactgagtcctagttcaaatggctattatttgtttttaatttgagaatatttgaaaagctctcattgtaaaagagtcaagccatacaaaagtataatgagtatgattgtcataccacagatataattgtactagaaagatcatgttactttatttatttattttttttatcaaatctaacaccaaggtcctatcccattagctgcatagacatttgttttcaagggcacttctcctcatagagtagcacaaaagtcccagagttttatgaaaaccaagatatccaagggacccctctgatattcatccatgctggccaccacagatatgtttcttgtccaaacacaggcattcccttgaaatccacgcgagccctatgtagtct

SEQ ID NO: 236677 - DNA, 515 bp, Homo Sapiens
ataaatttactggggaaagaattagcagattgggatgcaacaccgtttgtaaaatcttggtcaaattgcaaccacaggttggctacagatacaagagttcggcaaaagtcaacaaaagtcttccatgagaatcaattggctatatggaacttaaaatagaatattgtatacgttttttgtcatctgtaaattatgtactacacatcctttatatacataaaggtctttttttttttttttggaaagccagttaaacttttatcagcatgttgctgtttaaaaggcgttctttaagaagataatcttgaagattggttttagaagctatagttttttagagattggcccatgtttgctagagtgggtcataatacatattccatgaagttctgtacagaacaaacaccgtttataattttgtactgttttactttaagtaaggatgcaaaaaatagcaggactcagctaagttctaagccctggaggttatattaaataaaagagaaatggaataa

SEQ ID NO: 236678 - DNA, 745 bp, Homo Sapiens
  misc_feature (116)..(116): n is a, c, g, or t
cagttatttaacctgtaaaatgtcaatagcaaatgaaggatgaagtatatctctagatgcaaatacattgagtttaagagtgcctcaaaataattgagatcacatttcaggacatntggaaatcaggtcgatttgtggtaactgtagtcatcttaaatttcaaaccatttaccatctgaaagttttgatttgaatgtaaaacaggaaattggaattcctttgtccaggagaaacctcacaaaccttctttaaggcatagttttgttgtttgtttgcttgtttgttgcaggctgtaaggcatggctgcttgtttacaaagcatctcattcatattacctgtggagttgcatatccaaaccttagtgagttttgaagctttaagcaaattcttttaaaaaattcttgtatttctagcattactagatattaaaagttaagcaaatagattaatgacgtatacataggcatcatttcacaaggtcagtaatgctgcaggaaaagcaaaattgcaatctacgtatctatggtactaaggaagtcctgtttttcaaaaatggaagcccacttctcagatttttctgaagggcatacaatgaaaagtgaaggggaaacacacacacacaaaaaaacaagtatttggcttgtcacaggaatctgattgcattaagtgaaaggattatttagaatatgttaatgcaaagctaaaataaaattttccttggcaattaaaaaaaaaaaaaaaaaa

SEQ ID NO: 236679 - DNA, 585 bp, Homo Sapiens
ggcacgagggtgaagaagatcttccccaccccaaagcccaaaatcgagcttcctgagcgtttccgcatccggccggtgaccccagtggagaagtacatcaaggtctttccatcccccccagtcccacagaccacccagggcttcatcggctggagatctgcagtgccaggcctgaacaagtgcctagagctcgacgatgcgatcagaagctgcaaaggtgcttttgcacgagagctgtgctggcccaagcagggcgtgcactgaatccagacggagttctgcccaggggtgctgcatatcggtcaccaggcacccagggccatgccagggaaaggaagagctcccctgaatcccgaggacacagtcccctgcgtacttgctcatgggatgttgcaaagaacacaaagtgtgccttagacattctcaagtcatcagcgtcacccttccagaatgttcacgtccacacccattcttggctaatgtaatgaataaggcttctctcatttgtttttgataccttgggaatttctatgcagggctttaaaaaaaaataagtgattcaattttaaaaaaaaaaaaaaaaaa

SEQ ID NO: 236680 - DNA, 508 bp, Homo Sapiens
ggcacgagggtcacttaaggatggagatatgttctgagaaatgtgtcattaggcgattttgtcattaaacatcatagcatgtacttccacaaacctagatggtatagcctactacacacctaggctatttggtatagcctgttggtcctggggtacaaatctgtacaacatgttactgtattgaatacagtaggcaattgtaacacaatggtaagtatctaaacatagaaaagggacagtaaaaatatggttttataatcttctgggaccaccattgtatatgcggtacatcattgaccaaaacatcgttatccagcatatgactgtatttggttatgaaagccaactgttacttgattctgcttttagttcttaagaggatcaggcttttaaatactcatttacaagttttctatcctccttcagtgttaaagtagaaagtaaaaagagtatcttatacatgcatgaaattaaagcatataccaaatgcaaaaaaaaaaaaaaaaaa

SEQ ID NO: 236681 - DNA, 465 bp, Homo Sapiens
aactcgaggtctgatgttcaagggcaggaagtatccagcacgggagaaagatgtagcctgggaggctaagccagtctagccttttcacattcttctgcctgctttttaatctggccactggccgagctggcagctgattagattgtgcccatccagattaagggtgggtctgcctttcccagtccactgactcaaatgtggcaacaccctcacaaacacacgcaggaacaatactttgcctccttcagtgcaatcaagttgacactcagtattaaccatcacaacctccttccttatacaaccttaacattgtacctgcattaacagttgccctttttctggcccattttttaaagcattctttttgctcctcctccccacatgttccagcactcctgttgtgtgcttcttggtaatactttgaaagtgctcaagttcattgatgagaattttaaaaagaaaaaa

SEQ ID NO: 236682 - DNA, 512 bp, Homo Sapiens
gcagatgccagcaccatgcttcctgtagtctgtagaaccataagccaaataaacatcttttctttataaatttataaattacccagtcgcagatatttatagaaagaacagcctaatacaggtgctaaatacatatctgacaataaatggtagttatctcttagaactgttatgaggattaaacgagttacagtgtccatcttaaaaagataattctgaaaaaaatctcataggttcactttgccttgtcaagaatatgattaccattaacttctgtagataggaaaaaaatgtgctgagctccaaaactgacagacattttgctaaaacaatatcaaatctcattaaaatgatgacagttatttcaatagttgacagtagctatcccaatacaacctaacaaggcattttctcttcagaatcactcgatcatatggccatttccctaagctcttatagctattgcccagtgtacactgaagacaactgctaacgacacacacctacgtgtg

SEQ ID NO: 236683 - DNA, 603 bp, Homo Sapiens
gaaatgtttagctgactcattgcaggaagttacactgtaaaaaagtgaatcaaggcagggaagacagatttaagtaccatgcagctcaaaatgacaattacattgtcattttcattgtgaatacttttaggttctatattggctgtgatctttgtactaactggtatcatggagaatgtgttggcatcacagaaaaggaggctaagaaaatggatgtgtacatctgtaatgattgtaaacgggcacaagagggcagcagtgaggaattgtactgtatctgcagaacaccttatgatgagtcacagtgagttctgataagagcatcatatttaataatttaggaagccaaattgctctgactggttacttatttattttaaaataaaaagcagatttttttctacatttattatacacttacattacaaattccttttcatttttctctttttccctttttacctacccttcaaaatttatcttgcttcatagtgaatgtttgagacacattggggaaaatgtggtttaatggtagatttgattcttcaatatgtaacatagaaattaatgagattaaaatagcctgacttgtttggactttaa

SEQ ID NO: 236684 - DNA, 542 bp, Homo Sapiens
  misc_feature (528)..(528): n is a, c, g, or t
ttttttttccctctctcgtggtttttcttttccccatttttttcccctgttgtttgcaaagttgaatctggggtcaggagttctaattgtaacctcagactggaattccagatggtgcgctcaggactggaagcaactctcagttcatcaatttcatgggcctacgtatctgctctggccacggcctggcctccatccccactgtggcattaatgcagaacaaattgagacatatcctctatataattagttccagaatttaaaaagatttacggtataataatagaggcagtgccgcggaatcctttcactgaggactctcggggagctcggggaccatctcgcggtggcatcagaacagacgagtaaccccagcggctccaggcactgcgaactgggggagagggggaaattttgcaccgcattcggcagtacctaacggttccgggctcccagatagggtcagcgaggagagttaggacagtaagtggggactggttaaaaaaaaatcgacttaattttgaaatnatcagaagaagctg

SEQ ID NO: 236685 - DNA, 606 bp, Homo Sapiens
agaaaaatcaaaatattagttcactttgaagagacaaactgaagcccatccttctgcaacttttgtagaaacagactgacagacttaattcaattgaccccaggctagttgattgtttttataccatctaatataaaatggtagcttaatcctgcctgtgcctttgttcatgtaatttagttgagtacagtgaaatgagaaagaaactggaagtcactgggtgtcaatcctcatctctgcccctaactggctgtgtaaccttgagcaaaccatctacctcagtctgggaccacactagatcagcaggccttaacctcttagagatgatgggcctttttgagaatgagaacgaggaacccaattcccctcagaaagacatgctaaatgatacacacaatgtcaagtgattcacaagttccttgaaatccatccatgaacttcaaagggcaacaaccctgaactaaaaatgtctagcctaggtgattcttagggcctttccagctttaaattctatgacttaccctacttggaaagtaccttcttagtctctcgggacaagtctggtcattcatttcttcaagataaggtatgtcatgtcaagggttt

SEQ ID NO: 236686 - DNA, 561 bp, Homo Sapiens
tctgattttacttaagcagctaccattccatggacttgcctcccagagcagcacaatgcccgtctgagccccacgtggcaggagcctctgggacggggcacacacaggcccagcctctgtgctgtctcctcctctgtgcgcctcagactcggggtgagggaggcgggcagcctctcgccagccttcccgtccttcagttcaacgacatctttggagtgtttttgttttctcttccaagggccgtcccgttgtgttaggaagggtgagtggctggttccagggtgggccggtgccagctccggggtggactgaacagcggcggctgtccctgtgcatcctttgattactctcatgctgcatttactgtttacatttgttttattgtacataggtttgtaaacattattgcctgagatatttgtatataacttgggctttgtagcttttatttattcagaacgcatacggcatgttaatgactctgatggtgtcctcctctgggcagctgtataggatcatcatgtggttacaaaaaatacttccctcaaaaaaaattctttt

SEQ ID NO: 236687 - DNA, 492 bp, Homo Sapiens
  misc_feature (8)..(8): n is a, c, g, or t
  misc_feature (50)..(50): n is a, c, g, or t
tttttttntttttttatggagtaacaattttttaaataaagagatatttncaaaaaacttcatgatgtcacctcccgccccccatctcaattttacctctacttaaaaacaacacaaagcattccagtgaccctatgaagtctttttaccaatggccaattctcccggaactattgccaccgggcgaagtcacctccctttccccctcggcgccggtccacaattgaaacggcaatcgagagttttaaaaaattgttaccccatcgctgggggatttcagttattccgaatgggaagtggccgtaaagcctccatcccttttggcccaaactgagagggccatggggtcggacctgaaaattcatctccacctacaaggtccattctaccccatccgggcggtgggaacgccttttttggcggggagaggggggatttcttttggaattaaaggttttggggacttgagatgttttgtttgagctaattact

SEQ ID NO: 236688 - DNA, 491 bp, Homo Sapiens
tgggggctcggaccctgaactcagactctacagattgccctccaagtgaggacttggctcccccactccttcgacgcccccacccccgccccccgtgcagagagccggctcctgggcctgctggggcctctgctccagggcctcagggcccggcctggcagccggggagggccggaggcccaaggagggcgcgccttggccccacaccaacccccagggcctccccgcagtccctgcctagcccctctgccccagcaaatgcccagcccaggcaaattgtatttaaagaatcctgggggtcattatggcattttacaaactgtgaccgtttctgtgtgaagatttttagctgtatttgtggtctctgtatttatatttatgtttagcaccgtcagtgttcctatccaatttcaaaaaaggaaaaaaaagagggaaaattacaaaaagagagaaaaaaagtgaatgacgtttgtttagccagtaggagaaaa

SEQ ID NO: 236689 - DNA, 447 bp, Homo Sapiens
ctggctaacatggtggaaccctgtctctactaaaatacaaaaaattagccaggcatggtggcacacacctgtagtcccagctactcgggaggctgagtcgggagaatcatttgaacccaggaagcagaggttgcagtaactgaggctgcaccactgcgctccagcctgggcaacagagcaagactccatctcaaaaagcaaacgaacaaaaaaaaatttaccttaaagacaaacttatttcttaaagcaatcagtaggaatttattgaatgtttcctgggtccctgtcttgcagtaactaatcatttagatcaatgcttttcaaagcagcagtctgtaaattgttaccagtttgcatgagaaaggagctaatggtagaagtaaatcagtgcactgcttccttctttgagtaagtcttatgaaaaaaaaaaaaaaactctccagcgct

SEQ ID NO: 236690 - DNA, 493 bp, Homo Sapiens
  misc_feature (8)..(9): n is a, c, g, or t
  misc_feature (21)..(21): n is a, c, g, or t
  misc_feature (64)..(64): n is a, c, g, or t
ggcacgcnnccccacaccggntaatttttgtacttttagtagagatggggtttcaccatgttgnccaggctggtcttgaactcctgacctcaaatgagcctcctgcttcagtctcccaaattgccgggattacaggcatgagccactgtgtctggccctatttcctttaaaaagtgaaattaagagttgttcagtatgcaaaacttggaaagatggaggagaaaaagaaaaggaagaaaaaaatgtcacccatagtctcaccagagactatcattatttcgttttgttgtacttccttccactcttttcttcttcacataatttgccggtgttctttttacagagcaattatcttgtatatacaactttgtatcctgccttttccaccttatcgttccatcactttattccagcacttctctgtgttttacagacctttttataaataaaatgttcatcagctgcaaaaaaaaaaaaaaaactctccagcgct

SEQ ID NO: 236691 - DNA, 424 bp, Homo Sapiens
tggcatggtcttggttcactacagcaaaacacacctggacccaagcttgcagtgagcaatcatgtctcaccgcaagctccacctcctgggttcacaccattatcctgcctcagcaatgaaggagaacagaaaggtagagatttctctttaaggtgacttcagacttgagcccatagcccaggagcccctctgctgatgaaggaaccaaagtcagggcagagaggggcgttccagagctggaccttggagtcctggtcctgaaagtgctcagcgctgctgtaacgtctgccagggcttgggagcctccatctcctaccacgttcggcttcttgagtccttccctgggtaaaagggaccaatggtttttcccacatgtcctgcctctgaccccaggatctccttgggtgcagacacctggaacgcc

SEQ ID NO: 236692 - DNA, 488 bp, Homo Sapiens
  misc_feature (46)..(46): n is a, c, g, or t
  misc_feature (127)..(127): n is a, c, g, or t
tcattgagttctctcaggtccttgcatagacataaaaggactcacnggagagatactctataaatgtgtgaaatgtagggaagtattctttaatgttatttcatttcagatagaaataattctcatnggagataaacgctatgaatgtaaacacatagtaaagccttaattttaagcctcagtttctttcaaatacagttatcccctaatatttgaggagcgtggttctaccaccccctgggcatacataaatcgacacatgccaagtccttttttaaaaatgacatatttggtacaaaattacccggatgtgatggcacatgcctgtaatcccagctactcaggaggctgaggcaggataatcacttgaatccgggaggcggaggttgcggtgagccaaggtcgcgccactgcactccagcctgggcagcaagagcaaaacaacctctgtcacacacacaaaaaaaaaaaaaaaactctccagcgct

SEQ ID NO: 236693 - DNA, 469 bp, Homo Sapiens
  misc_feature (24)..(24): n is a, c, g, or t
aatcacttttagaaattttattanctgtggaaggtttttaaacttagtaaaggaccctattaggtaaatatgataagaagcaattaaataagtaaagttgatttcttggtactagcttccttttacctattgtcatcgtgaaaatatttttttaaataggtgtttttctagtgaaagaaaatgctttgatttttctgagaaagttttctttaagatgagttcccataacttgcttatattttgtatattttatttctagggaagtgaatcgtattaaacacagcaagcctggatctgtgccacttgtgtcagagaagaagaaacacgtagtggcagttgtaaaataattggtattcctaacaatcctgatgtataattatttgttacttttgatttgagaactctacaaataaaagtgctgggactagattaattgcaaacaaaaaaaaaaaaaaaactctccagcgct

SEQ ID NO: 236694 - DNA, 453 bp, Homo Sapiens
aggacaaaaatataaagttattaatagccatttgaagaaggaggaattttagaagaggtagagaaaatggaacattaaccctacactcggaattccctgaagcaacactgccagaagtgtgttttggtatgcactggttccttaagtggctgtgattaattattgaaagtggggtgttgaagaccccaactactattgtagagtggtctatttctcccttcaatcctgtcaatgtttgctttatgtattttggggaactgttgtttgatgtgtatgtgtttataattgttatacatttttaattgagccttttattaacatatattgttatttttgtctcgaaataattttttagttaaaatctattttgtctgatattggtgtgaatgctgtacctttctgacaataaataatattcgaccatgaaaaaaaaaaaaaaaactctccagcgct

SEQ ID NO: 236695 - DNA, 484 bp, Homo Sapiens
ccagtagttccttatacgcaaacatatgagaaatctctgaagagcaaattcagtttcgaaaaacagctaatgatatcgaagaaaagtaggcactggtggatactttctagaagacagtattaatacagcaatactttaggaataatgatgaatctgtttaaaggcaaaacatcactaacctaatcagatcacttagagaaataagtgattttctctgtcttatcctgagatcatatagccatttaacctatcttcaaacaaacaaaaatttttaaacattttctatcctttaagaaaatcttctttgcttggctaaatgacaatgttcaagaaatgcctgccacagaagcataaaaaatccttggcaacattccagaagaaattcaccctgcataatgtgttccagcaaacgctcaatagctttctggtgaacctgctggctcagtgtacacttgaacaggatctagagagaacaaaagaaaaa

SEQ ID NO: 236696 - DNA, 479 bp, Homo Sapiens
  misc_feature (90)..(91): n is a, c, g, or t
actacaatctcgtgccaccatgcctggctaacttttaaattttttatagtgatggggtcttggagggttacacagactagtctcaaactnncctcctgaggccatcctcccacctcagcctcccaaagtgttgtgatgacagcataagccactgtacactgcctactttttactttttaaatgtggctactagaaaaatttaaattacattatgtggcttacatttgcagcttgcattatatttctattggacagtgctgaactagagtgttgatctactgtaggttagccattgattttgtattaggcatttagatccctgtaagctgttgggtttaatgattttttcctttggaagattttcctttatgcagtaaaattatggagacacagagtatgtagtattacatattaccagtttgctctcctgaatccctgctggtagcatattaaaaatcagtttaatgttcaaaaaaaaa

SEQ ID NO: 236697 - DNA, 412 bp, Homo Sapiens
atgtttgtaatatgcgtttaagtgtattagcaagatattaccatctctttaggctatgtatactaatggagatttttaagtcacctaactaaagaactaaagaaacttattttttgtattgaaatgttattggtctttgggtcttataccgaaagtgatttttggctttgctgcagattttaacttttctgtccgcagaaacttaattttgtgtatataaacttactgaaattagacaagtcaaattatacaaatattttcagattgtctcatttttcatatttcttgtctaacaatttatgtgaatattttcaggtcgtctaattttacatatttcatctctaagaattcaagccaaaattctcaaccctagctgagaattggcactacctgtagttaattgaaaaaaaaa

SEQ ID NO: 236698 - DNA, 597 bp, Homo Sapiens
aatgtgcctcgagccacgatccagcacgatgatatgtattataactgtaactagtgtatagtgttcactccagagacatcaataatatagtgtatccaaccgacttgtacagatttcagagaaagacaaatctagaagacggaggattctctattatgtgctatctgagagtcagtatgaaatgtcaaatccaaaagtacataatttagaggtctatttcaaagtaatcatttgagcatagtttctccactgtcagagacgactgttattttattttcaatcaaattaaaacttgtttttatgcatgtcttatttttagttatatgttacttgtacataagtagcagcacaatacgtacatataaaccctatgagtataaatcctatagaaatatattaagttgataattatgtctgttctgtttgatcacagagttgcaacaaagaggcctcaattcctaagttgaggaaatgattatctcattttatatgagactcgtggtgtggaattacaagtagaaacaacatgtgtggaagactatatcagtgaagatgtatatatactactaataaaaggaaaaacataaaaaaaaaaaa

SEQ ID NO: 236699 - DNA, 504 bp, Homo Sapiens
  misc_feature (83)..(83): n is a, c, g, or t
cttggcactaacacatttctatttatttttccttcaacggtgccagtggactctggttcaatttaatctttgcaaatttaacngctgcagaactgggaacattttaggttctcatccatggcactggtacttcagtcaaggatttccagttatcttgggtactcacttacccttctttattcatggctgctatctagcaccaaagagataccggatacttttggtgactgtgctgtggacactgcttgtttataggtaagattttatttgttcaaaaggctaaaattttttatgttaccaagaaatcaaattaaattcttcaaaaagtaaactttatgttttggaggtgccattaacttttgttagtgggaattatcttagaagatacaagtagtagtaattatggaggcactagagtgaatactttagatatgtagtttgcttaataaggattacactcaatttttaagaacttggactaattttatttgctttaaaaaaaaa

SEQ ID NO: 236700 - DNA, 492 bp, Homo Sapiens
ttatggatccgatgccttccagtcccatatgccctctatagctgtcattcctttaagtgcagcaagaagcctcgtcaggccgggtgcggcgctcatgcctgtaatcccaacaatttgagaggctgagacaggagaattgcttgaacccgggaggcggaggttgcagtgaggcgagatcacgccattgcactccacactgggcaacaagagtgaaactccatctcaagaaataaaaataaaataaataaataaaatccctctgagtcccagttccagaaattatattaatgcaaggcatgttcacggcaggtggtagtgggagaccttgggggccatcttagaattccatctaccacaggcagtagaacctaaggtaactttttaaaatcttaaaacacctatacacattttacatcttatgttaaaatatagccacgtttattttactattaaaccttccctactccaactctttaaaaaaaaaaaaaaaaa

SEQ ID NO: 236701 - DNA, 501 bp, Homo Sapiens
gcagaaatgcaaatgaggtaagaaagcaaatatagttcatgacctctagcaactgttgaaaactgctctttagggatgacatgctggcccttttttttttgttgttgccaaggctgaagtgcagtggcaccatcacagctcactgcagcctcgaactcccaggttcaacccttcctcctgcctcagccttcccagtagctgggactacagatgtacaccatcatgcctagctcatttttaaaaaaattttttatggcattgtatttatcttctctttataaccaggggttgaccagccacagaacttgtaaagttttttatatttttaaaaggttgtaagaaatagtagtagttggctggtccccgctgctctcctgcattatagtatacttctgttcacctagtttgctagagagaggcagtatagtgtgtatagtgatttccaaactttttctttaaatcagaatcacctgaaagaatgtgacaacgtgtaaaaaaaaa

SEQ ID NO: 236702 - DNA, 522 bp, Homo Sapiens
cagctactcgggaggctgaggcaggagaattgcttgaacctgggaggcagaagttgcagtgagccgatattgcaccaccgcactccagcctgggtgacagagtgagactccatctcaaaaaaaagaaaaaaaaattattttattatgcacaaaaggattaacaaataatatgtccactcatgtgcctaccacccagcctttttttaattattatttgaagaatttaagattggaattaattgctccttgaatgtttggtagactcatctgtaataccatttgagcctagaatattctggtttttttgagacggagtcttgccctattgcccaggccggagtgcagtgggattacacgcgtgagccaccatgcctggccagaatattctttattgtaaaatttaaagctgtaatttcaatgtcttgaagagttatagatctaattagattttccatttctcctggagtcaatttggtacaaacagtcaataaagactacaagaccagttttagtaaaaaaaaa

SEQ ID NO: 236703 - DNA, 732 bp, Homo Sapiens
actaagaaagagcagaactccttggttaaccagcacagagaaaataatataaatcccataagggcagacgtttggtctgttttcttcgctgtcatttccttagtagttagactagtgctgagattttagtggatatataattgatttatgttgaatatatggacttagcaactaaaaataccacagatggttaacctggactggggcaaagcaagataatagtgatgatcgtatgttgctgtctccatccgtctttaatgggtcagggctttgatttccaagggtcttcaggtgatgagtaggggtacccacaagtcagaaggtctgcgttctcctagtttgtttgctgccatttgaactcatgtagggaatgaaagaaagctgcaattatccgccaactgcatttaaaacaaaacaaaacagaaaaatcaaaataacattgactcttccaaccactgacatgttgtttaataatctaagcggcagtcctggaggctaccagacttactgagttctacctgagaaacagccaagcaaagtgtgagagaagggttaagactggcttacaatgagatgcttcaaatgaaaagggaattatgagtaaaattgaactttgatgggggattcagttctggaaaagaatttggtattttccagtctgctaggaccaattaccttgaaatattttaaaatctcagtaaatagttattgctgaaaaaaaaaaaaaaaaaa

SEQ ID NO: 236704 - DNA, 678 bp, Homo Sapiens
aggccccacccagtgcccgactatgagcttaagtacccgccagtgagcagtgagagggaacggagccgctatgtcgcagtgttccaggaccagtacggagagttcttggagctccagcacgaggtggggtgtgcacaggcaaagctcaggcagctggaggccctgctgagctccctgcccccaccccaaagccagaaggaggcccaagttgcagcccgggtttggagggagtttgagatgaagcgaatggatcctggcttcctggacaagcaggctcgctgccactacctgaagggtaaactgaggcatctcaagactcagatccagaaattcgatgaccaaggagacagcgagggctccgtgtacttctaagtgcccctgcagatgggcagagggatgcatggggatgcaggtcccttgcatttcttggtatctctcagcttttcctcttgcagctccccctaccaggggtcgctttctcctggattgcaaatgcctcttcagtttggactcagctctgacagcccctcctccaggaaggccttccaggacttcctcctctgggtcctctagctctgaccctacagggactccagatctcaacctgttccctggaagtagggcctgctctccatccccagtgaaataaacatgtattagacaaaaaaaaaaaaaaaa

SEQ ID NO: 236705 - DNA, 751 bp, Homo Sapiens
  misc_feature (34)..(34): n is a, c, g, or t
  misc_feature (60)..(60): n is a, c, g, or t
caatgtgtctggaggtcccctccttacagccacncgactcagtgaactgcggctgctgtntgagctcgcgacggagccggctcggaacatcagatcaaccaccagggcttctctgctgaggtgcagctcattcacttcaaccaggaactctacgggaatttcagcgctgcctcccgcggccccaatggcctggccattctcagcctctttgtcaacgttgccagtacctctaacccattcctcagtcgcctccttaaccgcgacaccatcactcgcatctcctacaagaatgatgcctactttcttcaagacctgagcctggagctcctgttccctgaatccttcggcttcatcacctatcagggctctctcagcaccccgccctgctccgagactgtcacctggatcctcattgaccgggccctcaatatcacctcccttcagatgcactccctgagactcctgagccagaatcctccatctcagatcttccagagcctcagcggtaacagccggcccctgcagcccttggcccacagggcactgaggggcaacagggacccccggcaccccgagaggcgctgccgaggccccaactaccgcctgcatgtggatggtgtcccccatggtcgctgagactccccttcgaggattgcacccgcccgtcctaagcctccccacaaggcgaggggagttacccctaaaacaaagctattaaagggacagaatacttaaaaaaaaaaaaaaaaaa

SEQ ID NO: 236706 - DNA, 622 bp, Homo Sapiens
tcccacacccctctcctcgtccctcctggtcgtgccccgtctcttttggtcctggctccagaaaacccgcgccccacatacctgcatcttccgctgtgacctccggagccctgcctgcccctgctccccagctcctcctgcctgcacccgactcggccccctcctgacttgccttatttatttgttcgacgcgtctctgaatgtatccgcctcggttcccaccactgccttcgctgcgcacgcccctcgtgtttcagggctgaccgtgtccccacccgactccgcatgtttgcgtctgtttcctccctctctggccctgtcttaccccatcacccgactctggccactgacctcagggccgaaggggaggtggtgtacataggaacgcgttgcggagtccgccccgtcccccgaggggaggggtcttgtacatactgtaacatacagagtatagtgaagaatctatttaaggcgccgcggggagggctgcacggccgggcttgtggttctctagcgcggcgggggcctcctgccggctccacgggcactttctacttgtgcatgggcttggtttatacgaattgccattaaacatcgctgcaccaaaaaaaaaaaaaaaaaa

SEQ ID NO: 236707 - DNA, 736 bp, Homo Sapiens
agcaggtgctgaccccactgtgcaggactctcgggcccggccaccttataatgttgcggctgacaaatcaacacgtaatgagttccgaaggttcatggagaagaatccagatgcctacgattacaacaaggctcaggtgccaggaccattgacaccagaaatggaggcacggcaggctacacggaaaagggagcagaaggcagcccggcggcaacgggaggaacagcagcagaggcagcaggagcaggaggagcgtgaacgagaagagcagcggcgatttgccgccctcagtgaccgagagaagagagctctggctgcagagcgccgactcgctgcccagttgggagcccctacctctccaatccctgactctgcaatcgtcaatactcgacgctgctggagttgtggggcatccctccaaggcctgactccctttcactacctcgacttctctttctgctccacacgttgcctccaggatcatcgccgtcaggcagggaggccctcttcctgatctcttacagctctacctggggccaactcagggacctgagagggcacattcacagcagccctaggttttttcttccccgtgaaaccagagatgatttggaagatgggggtgaaggacactcgggaactagggcaaagacagggctagaggtatgtggagctggtactgtctctggaattttaatcacaataaagtttggcaaggaaaaaaaaaaaaaaaaaa

SEQ ID NO: 236708 - DNA, 735 bp, Homo Sapiens
  misc_feature (20)..(20): n is a, c, g, or t
tgagtctgacagcctctggncccgccagggggccctgttaacaaactgctttcacatcccaacagggtctgcttggccactcagtgcagctgcgattaaccctaaaggctttaaggaacgggccacctgtaacagagacaccagccttcctgtatagacactaaattgttagcaagagtgttgagctagttcctggtgaagtgtttccacagaagacatgtggagcagttgtggggatattaagggaaactttcctctgccttgacccctttgttaaataaaatgactttgggagccattcattgtacagttgcaggaatgagagtgattttatgatgtggtacattgggaccatgttctaaaaccttgggtttctgagtctgctttttgagtaggtgattttgaggttgaaaaaccaggggccttcatctaggaaatacagcattttccagaagcttctttgaaagggaatcctggttttgttgccaaaatgaaacgcccggggttggcgctgaatcccacaactgtgtgatttgcttgttgagttttttgttgtctggtttttttgtttgtttgtttataccaataagaatgagcctgaatgttggtggtttttgaaatcctgacttggaggtaaacctggaggaaggaaaaaaagtaaatatgcaggcttttaggactgagtagccttgaaaataaacctcatttctaaaaaggaaaaaaaaaaaaaaaaaa

SEQ ID NO: 236709 - DNA, 732 bp, Homo Sapiens
  misc_feature (15)..(15): n is a, c, g, or t
tgcatggccctcccntacaaccccatgatgtggtcatgatgcccccacctccacctccagtccctccagcagtgcagcctccgggggcccctccagtcagagacctgggctctgtgcccccagaactgacagccagccgccaaagcttccacatggccatgggcaatcccagcgagttctttgtggatgttatgtagcccactgtggggccaggctgggccgggcgctcctggtgtgtgactgggtgtcctggccgtcatgtgcttgctcttacagtgcctgggctcagcctaccagctgctgccatacaggagattgtggccactgtgactctcaccagcagtgcctggttcctcccccttccctcaggggtagacaagggacctttgattatttttagctttgtttttttataagcctttttgggggttaaaatagagtttcttacatttttgggacttttttaataggcatttcctcttttatatgaagaattcccatccattgggccccttctaaccccagaatgtgacctcctcctccagttacccacagccctgccctttgcagggttgggggtggtcagcggtaccccggggttaggcatcctagacagcagcctgaggaagctgggagatttgggccatgtagctgcctttgttactctatttattttagtcacttgtataaaacaccaaataaagcaatagaggcaaaaaaaaaaaaaaaaaa

SEQ ID NO: 236710 - DNA, 695 bp, Homo Sapiens
  misc_feature (44)..(44): n is a, c, g, or t
  misc_feature (125)..(125): n is a, c, g, or t
gtcaagcttccagccagaatgtttgagtcactacctctacagantaaagaaggacagttgcttcatgtgtatccagtactttttaatgttggaatcaatgaacagcaaactctggctgaaaggtntggagatgtctctttgcaagaaagtattaatcaggaaaacttcgaacttctacaagaatattacaagatatttatggaaaagatgcctcctgattatatttcacattttcaggaacaaaatgatttaaaagcattgctagaaaatctccttcaaaatatccaatccaaaaaaagaaagaatgtagaaattatgtggctggctgcaacgatttgccgcaaactgaatggtattcgtttcacctgttgtaaaagtgccaaagacaggacatcgatgtcagtgacacttgaacaatgctcaatcttgagagatgagcaccagttacacaaggacttctttatccgagcgctggattgcatgagaagagaaggatgccgcatagagaatgtactgaagaatatcaaatgcagaaagtatgctttcaacatgctacagctgatggctttccccaagtactacagacctccagaggggacttatggaaaagctgacacctaagtttaccaacatgttaataaacaggaacacaaatacatttcagttggataatcttcaaaaaaaaaaaaaaaaaa

SEQ ID NO: 236711 - DNA, 734 bp, Homo Sapiens
  misc_feature (54)..(54): n is a, c, g, or t
  misc_feature (136)..(136): n is a, c, g, or t
  misc_feature (313)..(313): n is a, c, g, or t
tccccagtgacccatgtccacccctagtgactcgatcaactcctgacacacccntactaggaacacgaaaatggttgtagaatgtgtttcattgtcctcatccacagatacagacactttggtgactctgtgttcnatctgaatgggggctgagactacaggataccccatcccatttctgtcctctgtccttcatccaaggtgtcaccatttgtatctatcaggaaggaggctttgcagctaaaatttaaaataataagaagaatatatttccgagccagagattagatgcctacatatctcttttggcctnagcattctgtggtcttctatggagaaaggctaattttctgaaggctttgaatggaatgaaaactgcctgttcaaatggttctgaggatactgagagacgctcagtgtgtggtctttttatttttagtaatagtgttggaaaaaatcaggttatgtttacgctgagtgtgtggggggcgctggtgagattgtgtagtctagaaaaggctagaattataaattattataaacgttggccatgtggggaaattcttataccaaaaatactgcaatgtatgtcagcctatagattttcatgtagtttcttgtccaaaactgtatatgagagcagaaatgattgattatgttatgttcaatgtatacctaatatctagtgctgatacataaataaacccatcattttgaaaaaaaaaaaaaaaaaa

SEQ ID NO: 236712 - DNA, 654 bp, Homo Sapiens
gcctctctatgtctctctgtcttttcctgtcttctgatttatctgtccttctttctctagtaaatggcactcaatataaaagtggtggagtcaatcttaaacttatttttattatgattgtattgatacatgcacgaagtccctctgccctactccctattcaaggatattactcactgcacatcataaatctccatcatctgtcttaaagttttatgagtagatttcatctacattatattcaagttcatttattactgagctgtattactgtggagctctaacagtatttgtttcctgatttcaaactcaatgctacagagcactttgaatacatcacaccttataggaaagatagtaaatgtattaatcccattgaaaaattagttttgtacaatgtgctaaatagtattgcattggattacttttatatttaacacactccatcaaaacatcccataacataattttacaatctgcatgtgaatttaactgtgaaattcagtattgtgatattttgaataagtgaattctttctctgcaaatactatgttgataaaattacttgtatgttcccctgaaatggtttgtttcctgtttcttcattattaaaacataaatcaatcatatgtttacagaaaaaaaaaaaaaaaa

SEQ ID NO: 236713 - DNA, 733 bp, Homo Sapiens
  misc_feature (23)..(23): n is a, c, g, or t
atacgacatctcagacatgactnctattgccaggctggtcaagtggcagggtcatgaaggagacatcgataagggtgctccttatgctccctgctctggaatccaccagcgggctatttgcgtttatggggctggggacttgaattggatgcttcaaaaccatcacctgttggccaacaagtttgacccaaaggtagatgataatgctcttcagtgcttagaagaatacctacgttataaggccatctatgggactgaactttgagacacactatgagagcgttgctacctgtggggcaagagcatgtacaaacatgctcagaacttgctgggacagtgtgggtgggagaccagggctttgcaattcgtggcatcctttaggataagagggctgctattagattgtgggtaagtagatcttttgccttgcaaattgctgcctgggtgaatgctgcttgttctctcacccctaaccctagtagttcctccactaactttctcactaagtgagaatgagaactgctgtgatagggagagtgaaggagggatatgtggtagagcacttgatttcagttgaatgcctgctggtagcttttccattctgtggagctgccgttcctaataattccaggtttggtagcgtggaggagaactttgatggaaagagaaccttcccttctgtactgttaacttaaaaataaatagctcctgattcaaaaaaaaaaaaaaaaaa

SEQ ID NO: 236714 - DNA, 664 bp, Homo Sapiens
gaaggtgtttcattttggtgtgcaaccctgtcattacgtcaacgcaacgtctaactggacttcccaagataaatggtaccagcgtcctcttaaaagatgccttaatccattccttgaggacagaccttagttgaaatgatagcagaatgtgcttctctctggcagctggccttctgcttctgagttgcacattaatcagattagcctgtattctcttcagtgaattttgataatggcttccagactctttggcgttggagacgcctgttaggatcttcaagtcccatcatagaaaattgaaacacagagttgttctgctgatagttttggggatacgtccatctttttaagggattgctttcatctaattctggcaggacctcaccaaaagatccagcctcatacctacatcagacaaaatatcgccgttgttccttctgtactaaagtattgtgttttgctttggaaacacccactcactttgcaatagccgtgcaagatgaatgcagattacactgatcttatgtgttacaaaattggagaaagtatttaataaaacctgttaatttttatactgacaataaaaatgtttctacagatattaatgttaacaagacaaaataaatgtcacgcaacttatttttttaataaaaaaaaaaaaaaa

SEQ ID NO: 236715 - DNA, 704 bp, Homo Sapiens
agaacaacagtggtgccagtcatcaaacatacagtgcgtcctattgagtcactgctaatttcatgagcctggtatttgctgcctattgtatttgtggttggtgagaggcattttcaaaccctgtataaataatccatgctgttggtcataagttaactgtattaagaacagtaaaataaataaaaaccaatagtactaattttgctttaaaaaaatttctaatttttttcacataaaacaattatcctaaaggttaatagttgatcgaaacagaataatagaaaaattcttctttaatttccattaaaaagcaaatagcattgacacatttaaagcttttcatttaaagtagtggatgtttttgaagtatctaaaatagtagcagaatattttatacttggtccttgcaatggtgtgagttttaatgattgcattatcgtgattggtggttatgagtttcagaaatctatacttggcatccaactcatgagtggattttatataggatggaacaggaaggtatgtcctgtcagtatcttaaccctttcaacaagacatttacctatttgtctttccttacgttctcaaaatattaactcgaattgtaaattaagcaaaaatgtaaaaagtatatgttgatgggacaagaagaatagtatttatttaataaaacatatattatattgaaaaaaaaaaaaaaaaaa

SEQ ID NO: 236716 - DNA, 616 bp, Homo Sapiens
caaataccccagcaagcaggtaggccagccctttcagctcagcacaccccagcccctaccccacccctaccacggagccatctggaccgaggtgtgggagtgatggagcaggtttactgtgcctgcccgtgttgggggccagcctgagccagcagtgggaggtggggccttagtgcctcaccgggcacacggattaggctgagtgaagattaagggagggtgtgctctgtggtctcctccctgccctctccccactggggagagacctgtgatttgccaagtccctggaccctggaccagctactgggccttatgggttgggggtggtaggcaggtgagcgtaagtggggagggaaatgggtaagaagtctactccaaacctaggtctctatgtcagaccagacctaggtgcttctctaggagggaaacagggagacctggggtcctgtggataactgagtggggagtctgccaggggagggcaccttcccattgtgccttctgtgtgtattgtgcattaacctcttcctcaccactaggcttctggggctgggtcccacatgcccttgaccctgacaataaagttctctatttttggaaaaaaaaaaaaaaaaaa

SEQ ID NO: 236717 - DNA, 777 bp, Homo Sapiens
  misc_feature (40)..(40): n is a, c, g, or t
  misc_feature (126)..(126): n is a, c, g, or t
accccgcgagtgcgctgccgcacgtgcacccatgttcgcntactggaggcgaggaagtcgcgggccgctggacgagagctgtgagcggctgttgcgcaccctgcacgggcgcgtcacatggtccgngacgcacccaaattccgcaaggtggcagcccagcgcctgcgaggattccggcctaacccggagctgagggaggccctgaccaccggcttcgtgcggaggctgctctggggtagccggggcgcgggagctccgcgcgctgaacgctttgagaagttccagcgcgtcctcggcgtcctgtcgcagcgcctggagcctgaccgctgagagcgcagacacccttcttcacacccgggacccccaggtttttgcgaaccccagaagagaccaaaggagtcgtcccaggctcctcgcgcctcaggtggaatcctgccctgtgcctcacagaagaggtggggaccgcagtcagggtcacctggaccatggtgaacatgtgacctgcagatctggcatcagaggccagagttcaaatgtgactccacctcttaaaagccgtgatttctagcagttgacttcacctctgtgtcggcctttaacaaaatcatagccatacagcagctcaggcctgtaatctcagcactttgggaggccgaggcggaaggaaggcttgaggccaggagttcaagaccagccagggcaacatggtgagacctcatctctacaaaaactgaaaaataaaaaacttttaaaaaatgtaaaaaaaaaaaaaaaaaa

SEQ ID NO: 236718 - DNA, 715 bp, Homo Sapiens
  misc_feature (14)..(14): n is a, c, g, or t
accagccctccagntgcgtgtctccgcagaccaggctctgtgtgggctagaggaatgtcgcccattactcctcaggcctggccctcgggcctccgtgatgggagccccccaggaggggtcagatgctggaaggggccgctttctggggagtgaggtgagacatagcggcccaggcgctgccttcactcctggagtttccatttccagctggaatctgcagccacccccatttcctgttttccattcccccgttctggccgcgccccactgcccacctgaaggggtggtttccagccctccggagagtgggcttggccctaggccctccagctcagccagaaaaagcccagaaacccaggtgctggaccagggccctcagggaggggaccctgcggctagagtgggctaggccctggctttgcccgtcagatttgaacgaatgtgtgtcccttgagcccaaggagagcggcaggaggggtgggaccaggctgggaggacagagccagcagctgccatgccctcctgctccccccaccccagccctagccctttagcctttcaccctgtgctctggaaaggctaccaaatactggccaaggtcaggaggagcaaaaatgagccagcaccagcgccttggctttgtgttagcatttcctcctgaagtgttctgttggcaataaaatgcactttgactgttaaaaaaaaaaaaaaaaaa

SEQ ID NO: 236719 - DNA, 727 bp, Homo Sapiens
actcgctccagaaagctgccgcacgagctgtgcacgctcatccgcaacgtgaagccggaagatgtgaagagagtcgcttctaagatgctccgagggaagccggcagtggccgccctgggtgacctgactgacctgcccacgtatgagcacatccagaccgccctgtcgagtaaggacgggcgcctgcccaggacgtaccggctcttccggtagaaccgctccccggcctgacagacccagggagctgcagctggagcccgttcccgtgcgtgttagtttggacacgaatttagtctaaaaagctgtctggttgtataaacggtgcaaacaatgtcgccacagcacccacgcggtttgcattcttttggaactcaatgtgccgatcagtggagtcagtatcgagcctgaccaccgcaagccaggaagcaggtgaagtgcccagcgctggagtgcagcgtgccacgaggagggcggtcggtgcttccctcctcgggctgtgggcacatggggccccgcaggttccttggaggagccctgagctgggaggcagcaaaggctgacctatcaaagcctcccggaggccaccgtgctgggtaccaggactcacctctgacaagcaggagaaggtaagggcccggtcagctccaaggagcgcgctccacgcgcgtgcacacagcttccctggtaataaagagctggcatctttcttaaaaaaaaaaaaaaaaaa

SEQ ID NO: 236720 - DNA, 735 bp, Homo Sapiens
  misc_feature (44)..(44): n is a, c, g, or t
aaatagctagctcttcaggagagtatctaaggcccactccatcntacctgaaccagttggtaagggtaaccatgacatagagtgaggcaaggaagaagacgaagtggaaggcagaatagttgtaggaaagatgctggacttggactggaggagctggaggggtttcttggtcagctggcctcgcagccccacccctttgccctggagagaggaaatggctgctgggagcagagctgctgaaacacctcttcccctctcccccaactacctttgttaaggctcttgagggttcttatggcactccacagagatctaccacttcttatggttcctcacttggcactcacctttgtctgcctccactgtttcagggcagcagaaacacagtgagggcttctgcaaaacagaacgcaggttttggaatggtcttaaaagatgtgagggtgttaatctaggaaacttcccccgtgaaaagattggtctagtattaaaaagtggaggcacacctgggttcaaattctagctccagcatataagtggctgtgcagactttggtaagatgtttaatcttttgtgcctcgatttctccatttgtaaaatggagcaaatacctacctcacagggttgttgtgagggttaaattaaatgagattatgtaaaagtatctagcacagttgcctagcacattgtgggtactcaataaaaggtaacagcagcaaaaaaaaaaaaaaaaaa

SEQ ID NO: 236721 - DNA, 756 bp, Homo Sapiens
agcgaggagtccggcctgcaggcatggtgtgtatagcatcctcaaggacaccaaaatcacgtgtgaggagaagatggtgtcaatggcccgaaacacgtacgggagtccaagggccggtgagggagggtttgccctccgtgagcacagagactctccatgggagggggagcagtattctcctggatcctggggcctgggtgggctgggggacagctgaggatgggcctagcagatgaagcttgccagcaaggccaaagcaaacggtttctcctgtggatagtggacagagacctttgtaaccaatggaattattcatttttctctatcttttattttttcaaagatattatttgactctatcaaaagtctctcctttttaaaccttttcttatggatggctgtcaatcccgaggcagaagttttcaggtggagaccaagcggcctttgctcttcttccttcttcctgccacactctgctttcttcctgccatggacccctggaggagacctatggagggacagttttgacctgacccctagaggagacagttttgacctcttcagcaccaggaaggaagctctgaggatggttgcagtgaggaagcatgggtctttaaggacttctctctcttttttgctggacattattgagtttgtgggaccctgcctcttcctgctacctgtgggtctgcccagagtccctgcaggcctgtccatgcattaaaaattcctattgtcaaaaaaaaaaaaaaaaaa

SEQ ID NO: 236722 - DNA, 702 bp, Homo Sapiens
ttttccacttgtcacgtcacataagatgattgctaaaatattgtactggtgttcggtggtgagtcatatttttgaaagttaataattataaataggtaatttccttctaatatgttggtactgtctatggccataccaccctgaacatgcctgagcttgtcataatatgttgagtacccaaaagatttgtttatattgttaatcttagggaaaaaaaattaaaatccagtagatcagaacatcaggctttcagatacaaattgatttactggtttttattttgctgattataatatttggtatatttaaggtaatctagttaactagatgctatttcatagattatattgaatgatttaaaactttattttcaaggatagtttattttaaatggcatattgaaaacatcattattaagatccagtaggtaggacatttattggattaaaatgaagcatttatctatgtctttaggtgtcattgttccctttctgaattagctgtacatataagccttcctttggttttaagtactgatttttttttaaaaaaaagagggactgtttaccattcttccactgtgctgttataaagttgtatttgaaaggtaatgttgtttttattaatcttttgtcttaaaataatttaaagtgctttgaattttaaaacattaaacaaatccttaaataacaaaaaaaaaaa

SEQ ID NO: 236723 - DNA, 710 bp, Homo Sapiens
  misc_feature (22)..(22): n is a, c, g, or t
  misc_feature (247)..(247): n is a, c, g, or t
  misc_feature (250)..(250): n is a, c, g, or t
tcgtggtggtggtggtgtcctnatcgtcgtggtgattgtgggagccctgctcatgggtctccacatgagccagaaacacacggagatggttctggagatgagcattggggcgccggaagcccagcaacgcctggccctgagtgagcacctggttaccactgccaccttctccatcggctccactggcctcgtggtgtatgactaccagcagctgctgatcgcctacaagccagcccctggcacctgntgntacatcatgaagatagctccagagagcatccccagtcttgaggctctcactagaaaagtccacaacttccaggccaagcccgcagtgcctacgtctaagctgggccaggcagaggggcgagatgcaggctcagcaccctccggaggggacccggccttcctgggcatggccgtgagcaccctgtgtggcgaggtgccgctctactacatctaggacgcctccggtgagcagggtcagtggaagccccaacgggaaaggaaacgccccgggcaaagggtcttttgcagcttttgcagacgggcaagaagctgcttctgcccacaccgcagggacaagccctggagaaatgggagcttggggagaggatgggagtgggcagaggtggcgcccaggggcccgggaactcctgccacaacagaataaagcagcctgattgaaaagcaaaaaaaaaaaaaaaaaa

SEQ ID NO: 236724 - DNA, 630 bp, Homo Sapiens
  misc_feature (15)..(15): n is a, c, g, or t
  misc_feature (49)..(49): n is a, c, g, or t
gtgaagaacccaccntgatgttgatggggtgataggggagatccggctnagcgtcgtgcacactgtacgcttctctgagatccacttcctggctctggccattggctctgcctgtgcactgatgatcataatagtaattgtagtggtcctcttccagcattaccggaaaaagcgatgggccgaaagagctcataaagtggtggagataaaatcaaaagaagaggaaaggctcaaccaagagaaaaaggtctctgtttatttagaagacacagactaacaattttagatggtaaggttcacaaataggttgatttctttcttcagctttctgacatgtccagcccatctctaatgaggactcccagatcatcactttatggctgttaggtgtttcccatatgaaattagaggagctgggtcagggagacaaaagtcttctattagtcttatggatagctcctccttgagtgtattttgtgcaaaagattaagaagctggactctactgccattaaagctgagagaatcctaaggttatttgtggcttcggggttatatttattactactactactaataaatattcaacaagtaaataaatcttttttaaatcaaaaaaaaaaaaaaaaaa

SEQ ID NO: 236725 - DNA, 687 bp, Homo Sapiens
  misc_feature (104)..(104): n is a, c, g, or t
  misc_feature (594)..(594): n is a, c, g, or t
tttggccagggaggaattccctttgttcttccccctgagaagccattcctttgtctgccaacctccctggggtcctgcctgtttcctcccaatggagggttttntggggggtggtccccgtctggggggcccctccagccagtactccaggtctccctgtctctcccccgctgccattttgatagtataatctatttttaaatggggcttttcaataggggagagggagtcatctcttcctatatttggtggggtgggtgggaaggaagggatttgggggggaatcttcctgccgcctcccccactccaagtgtttatttttgataccaaacatgaattttcagttccctccctcccagccccccaatttcctgcgggcgggtacaaaggaccctttcaatgtccctggagttgggagggaggaatgggggacataaagcctgtcctgtctctattctaggcaagagagagtgggttcaaaagactcctgggctcacctgttagcgctggcccagcccaggccttgggacctgggggttggtgatttgggggacagtgctacactcgtctccactgtttgttttacttccccanaaatggaccttttttttttctaaagagtcccagagaatggggaattgttcctgtaaatatatatttttcaaagtgaaaaaaaaaaaaaaaaaa

SEQ ID NO: 236726 - DNA, 672 bp, Homo Sapiens
gcacactgtgattataacagcaaatatatatgcatgtggacaaagattagatggcaagatagaaaaataagaacagatgtgatagcaagaattatagttggcctgaaaaaatgtgatgatcaggagaaaaaataaaaaaagggtagaaatattagacggtgcgtagggactttctatggacttttattaattaggaaacattatcaaaggaacttttcacgtatttttctttaaattctggttagatgttattaataattcttcatctaacctactgactagaaaatatagtcagtactaaattagaattgtggtttataaacttttggttagctctggatctgtataactgcatttttttggataaacagtttttggtaggtggataccgggagacaagtgtgggtccctctcactgggcttcattctgtggaccaggatcattatttcatgctcatgatcatgagagttaggactgagtggctcctgtgactcccaccatcttagatgatactgttttcttgtgagttctttcttttggtgtggattagtatatcagttgatttgtgtgaattgtggtgaaacaatcatttcattttgaaaagcaagtaatgaaaatgtcaacatcataggaattaataaaatgtttttactaaaaaaaaaaaaaaaaaa

SEQ ID NO: 236727 - DNA, 641 bp, Homo Sapiens
accccaggcactaggggccacctgcctgggagtctccctgcctcactcctctaggcaggggagtgatgcttcaggacgtgacaggctgttctaacatgtgtctacctgagggctagttgaaggatccaggagtattttcttcttgggtgggccctgaacaaagccaaaaattgtagaaaccagtctagaaaaagtcctgctcatctgtggccactgccttctagccgtcctccaccttgcagaaagaatctagcctttggtctctctctctctcatcggggtcatttgctattcccctctgatattcaaccctatagaaggagcctggactctgatccctctgtacaggctggatggaaggggccctccacacttcctgggaggtcagagacaaactgtttcagagagtcagatggacttcccaagacttgttgagagatgtgacatggttcttggatttcctctgtagcagcctcctggacttcctgaggactcgacattgtccacagatgtactggccattacatgaaacaagaaaccaagcatctttgctgttgttaattattatatgtgccattgttacaggagattataggctagtctgtaataaattatcttatagcaaaaaaaaaaaaaaaaaa

SEQ ID NO: 236728 - DNA, 665 bp, Homo Sapiens
  misc_feature (20)..(20): n is a, c, g, or t
ggaaagtaaaccaagaaggngaggaagacagattccaggcccactccaaactgggtaatcggaagctgctgtggcatggcaccaacatggccgtggtggccgccatcctcactagtgggctccgcatcatgccacattctggtgggcgtgttggcaagggcatctactttgcctcagagaacagcaagtcagctggatatgttattggcatgaagtgtggggcccaccatgtcggctacatgttcctgggtgaggtggccctgggcagagagcaccatatcaacacggacaaccccagcttgaagagcccacctcctggcttcgacagtgtcattgcccgaggccacaccgagcctgatccgacccaggacactgagttggagctggatggccagcaagtggtggtgccccagggccagcctgtgccctgcccagagttcagcagctccacattctcccagagcgagtacctcatctaccaggagagccagtgtcgcctgcgctacctgctggaggtccacctctgagtgcccgccctgtcccccggggtcctgcaaggctggactgtgatcttcaatcatcctgcccatctctggtacccctatatcactcctttttttcaagaatacaatacgttgttgttaactataaaaaaaaaaaaaaaa

SEQ ID NO: 236729 - DNA, 714 bp, Homo Sapiens
  misc_feature (48)..(48): n is a, c, g, or t
  misc_feature (121)..(121): n is a, c, g, or t
tagtctctggtaaggaggtgtacaattctctgattttatttcagtttntagggaattttattttgttcatttcaacaagaaaaattacataaacaggtaacagctccactcaaagctgttntaaatgaacaaaatattggactttgtgaacaaatatgatactttttctttctgcaattattggctagcaatcttattttactaaatctatactgacaaatttaatttggtccatttatttgagtttaaagactatttcaaactctccccagtgaaacagtcatgggccattgctatcctcaaaagaactaaatatataaatagcagctttcctcaaaaaagatgataaagtcttcttttccctttagagcataaatttcagtggcaggtaaaactattttagcaacaatatgctcacttcttccatgatatgtttttcttccctactaagttgaaagtttttctcagtttccatagccactcacaagtttttctctacctaactgaagttgccctcttctgctggtcattaggacattaacttttagaatgatttctgtttcagcctcttgttttgaaggcaggcttttaatttcctcagagaaattgcaatggaacgaaaatttgttctctcttttacatatgtacacttgtataagagatgtaatgtttttaaataaaatttttaattcatgcaaaaaaaaaaaaaaaaaa

SEQ ID NO: 236730 - DNA, 691 bp, Homo Sapiens
  misc_feature (107)..(107): n is a, c, g, or t
  misc_feature (273)..(273): n is a, c, g, or t
aggcaaggcctaggtgtgggctgggcattgcctacacgtgaagagatcactccgcgtccctactgcacctgtcacaaagtgccttctgatatgcctggcaaaccaanatcggtgagcgccagcttgcttccctagaagacatttctaaatattcataacatgcttgctcaaatcaatcaccttattttacatccgctccagggagaaatgaagacatggtcctacgttgttctgtaattattttctatgtaaattttgttccttgttacaatnatatatgtcttaggggaaaggaccatttcacatgtgtcacctcatgtgattctcaccacagccctgtgattgctcctgttttataaataatgacatagttccagttgatggccaaagccacagctaacgagaggcagagagagctcaggctcccaggagcttccactctcagaccttgcctcccgggctgccctgagtgaaacccctgcttagcatttggcacagccagaagcagcaagctagggtcacaacacagagaggggctgtgtaatactggctgcctctgtgctaagaaaaaaaaaaaaaatcactgtgtgtttgtttattttggtgcaggcccagtgttcttgcttagacttaatactacccttcatgttaaaataaaaccaaacaaaaacccaaaaaaaaaaaaaaaaaa

SEQ ID NO: 236731 - DNA, 669 bp, Homo Sapiens
  misc_feature (34)..(34): n is a, c, g, or t
acctccccaccgagaactccagagacccagatgntgacaccaggaagggccccacagccgagacgacgtgtccagtgaccatctcagaagccgtccatcagtccaaatgggggttctgagaaggaaagtacccaacattggcttcggagtatttgactttggggaaaagggctggctcggagtctagactcttctgtaagactcacagaacaaaagcaaggaattgccaatttggggggtgcctggtgatgaggaggggatgggtttgtcttgtcttctttttaatttatggactagtctcattactccagaattatgctcttgtacctgtgtggctgggtttcttagtcgttggtttggtttggttttttgaactggtatgtagggtggttcacagttctaatgtaagcactctcttctccaagttgtgctttgtggggacaatcattctttgaacattagagaggaaggcagttcaagctgttgaaaagactattgcttatttttgtttttaaagacctacttgacgtcatgtggacagtgcacgtgccttacgctacatcttgttttctaggaagagggggatgctgggaaggaatgggtgctttgtgatggataaaaggcattaaataaaaccacgtttacattttgaaaaaaaaaaaaaaaaaa

SEQ ID NO: 236732 - DNA, 481 bp, Homo Sapiens
  misc_feature (71)..(72): n is a, c, g, or t
ggcacgaggaccattctgatgttggagcggccgcggctgtaggcttttttttttttttttttttttttttnntgaggcggaggttgaagtgagccgagattgcgctattgcactccagctcgggcgacaactgcaagactccatctcaaaaaaataaaaataaaagaaaagaaagaaatatgtgcactacctaagttttgtctttagaaaaactatccacctataaaaaattaccttgacaaaaatagttccggtttgactaatcattttgtttctttaagtggtaagtgtatgcaaggtggatccttgatgagccaacattgcactgtggatacatatctatgtttacgcgctattagaacagaaggcgctgtatatagaaatgttgctttgaagcaatatttgcaaaacacgcagacttctgtatctgtatttggaaaaaataaaacaggttcttgttgctaaaaaaaaaaaaaaaaaa

SEQ ID NO: 236733 - DNA, 721 bp, Homo Sapiens
  misc_feature (36)..(36): n is a, c, g, or t
tgagaaggctcacttcagtggaccggatcacccgcntggaaaagggcaagatctatcggcagggaaacctgtttgacttcttacgcttgacggaatggcgtggcccccgcgtgctctacttcggggaccacctctatagtgatctggcggatctcatgctgcggcacggctggcgcacaggcgccatcatccccgagctggagcgtgagatccgcatcatcaacacggagcagtacatgcactcgctgacgtggcagcaggcgctcacggggctgctggagcgcatgcagacctatcaggacgcggagtcgaggcaggtgctggctgcctggatgaaagagcggcaggagctgaggtgcatcaccaaggccctgttcaatgcgcagttcggcagcatcttccgcaccttccacaaccccacctacttctcaaggcgcctcgtgcgcttctctgacctctacatggcctccctcagctgcctgctcaactaccgcgtggacttcaccttctacccacgccgtacgccgctgcagcacgaggcacccctctggatggaccagctctgcaccggctgcatgaagacccccttccttggtgacatggcccacatccgctgagggcacctttattgtctgggacaggccctcagcccctcctgccccatccacccagacaagcaataaaagtggtctccgcccctgtgaaaaaaaaaaaaaaaaaa

SEQ ID NO: 236734 - DNA, 720 bp, Homo Sapiens
  misc_feature (79)..(79): n is a, c, g, or t
  misc_feature (100)..(100): n is a, c, g, or t
catcaccatgtgttctgctggcactacctggctgccctcagcattgtggccgtcaactattctcttgtttactgccttntgactcggatgaagagacacnggaaggggagaaatcattggaattcagaagctgaattcagatgacacttaccagaccgccctcttgagtggctcagatgaggaatgagccgagatgcggagggcgcagatgtcccactgcacagctggaatgaatggagttcatcccctccacctgaatgcctgctgtggtctgatcttaagggtctatatatttgcacctcctcattcaacacagggctggaggttctacaacaggaaatcaggcctacagcatcctgtgtatcttgcagttgggatttttaaacatactataaagtctgtgttggtatagtacccttcataaggaaaaatgaagtaatgcctataagtagcaggcctttgtgcctcagtgtgaagagaaatcaagagatgctaaaagctttacaatggaagtggcctcatggatgaatccggggtatgagcccaggagaacgtgctgcttttggtaacttatccctttttctcttaagaaagcaggtactttcttattagaaatatgttagaatgtgtaagcaaacgacagtgcctttagaattacaattctaacttacatattttttgaaagtaaaataattcacaagcaaaaaaaaaaaaaaaaaa

SEQ ID NO: 236735 - DNA, 726 bp, Homo Sapiens
  misc_feature (53)..(53): n is a, c, g, or t
atccgaaaacactagaacaagagtgtggcaaagaacacccgtgctggggtcgngacgaggttgaagggtcttggtcaatgtacgtaatgagcagggtgggccccacgctgggaggacacgggctgggctgagcagggcctctagtggaacacatgggggtctcattgaaaagctctctgatgagcacctccttttgtgcaaagttaattttttctcgacaataaagatattccgtgtcttcacccctgaactaagacacagggagtatttcagaggccagcgtaggagtcatcgacaacgaaaagccgagaacccagggccagcagtggagcctcagcagaccagggcctggtccttgctaattgctgcagggtggagtttgatctggcagacccgatcctccttcatgaacacccagcaacctgagcaagtcccggccctgccctcagcgagcccggcaggcgtcccgggacagctcagtgttggagggccacctgaaccacgagccagggctggggcttgcatgtcattgtctatgacagcgtcaagactggcccttggcaccgtgctgtgtggaaaccctcccctctgagactccactgagacgtggctgagtgaaatcttcctcgtcagtggtcaaggtgtgtcatccatacagctccatgcctttgtcttttttaaatgtaattaaaaaaggaaccaactggcaaaaaaaaaaaaaaaaaa

SEQ ID NO: 236736 - DNA, 547 bp, Homo Sapiens
ggcacgagggcgaaaggaaagaggtcgggagcgctcgcgagatctcggaccacccaacctgaaaggtgcttaggaagttgaaaggcccagaggaggcctccgggcaaatggccggagctggaccgaccatgctgctacgagaagagaatggctgttgcagtcggcgtcagagcagctccagtgccggggattcggacggagagcgcgaggactcggcggctgagcgcgcccgacagcagctagaggcgctgctcaacaagactatgcgcattcgcatgacagatggacggacactggtcggctgcttcctctgcactgaccgtgactgcaatgtcatcctgggctcggcgcaggagttcctcaagccgtcggattccttctctgccggggagccccgtgtgctgggcctggccatggtacccggacaccacatcgtttccattgaggtgcagagggagagtctgaccgggcctccgtatctctgaccacgatggcgcttacctttcagacttcattaaacttatgaccgaaaaaaaaaaaaaaaaaa

SEQ ID NO: 236737 - DNA, 735 bp, Homo Sapiens
  misc_feature (90)..(90): n is a, c, g, or t
agcgcttgcagctagactgggatgtacttggctgcatcttgctgaatatgtcaccgtcagtatcccaaggtgagcaatgtatgtcctgtngtctctcacccatgccataggaatctgtgtgtctggcggtatgtgctggcctcattctatagtgagacagtcaaggacttgggggtcagtggccctgaagacagacggtaccaacggaaatactgtagctcctcctgctgccaggccatgttttccccctctttcaaaatctaacttgagactcgcatttcctagaaggttttcttagaaaaactgtgttaccattcactctggcttccagtatctagcaatgcccagcccaaggggaggaggatgctctctctaagcacttttattcatacctccatgttactccatcagtttgcattttatatatgttctttttttgtttgactttgccatcactttgaaaaagtaattttttttctttttagtacaaactatatgtggcaagatctttggatttgctaataattatttttcagtttcccctcccaccgggggctacactgtcctctgcagcttcttctggacattttgggcctttcttaccgttgcctaaggcaagaatgaacactatgtctggaagatatttttaacttagttttgtctcttgttttgtttcttttcctgggtgtgagcaaaaagtatccttatctgcttttcaaaaaaaaaaaaaaaaaa

SEQ ID NO: 236738 - DNA, 667 bp, Homo Sapiens
aaacagctgggacagccggctgtcccttcaggctgtgtgaccttgggaaagtcatttggcttctctgtgcctgtttcttcatgcatgcagtgggattccagtaagtaccaactacctcacaggcatggcacggaggcaaaaggaaaaagcagcccgcatcaagcaagccctcctgggccacctgctgatctgacagtccatcgtagtaacaagagtggcagtctgcacaacctagaagtggccagaagggttgagacacgcccctgccctctctcctttgcccctcagtctcacagaggggcttctacaagacaagcagataacgatagaatcttgggcatcttggctttcggattctcagtgtggagggacgtagtaccccacacaccccttcctgtcatccttcctggcccataaagcccactagttggagagtaagtaccctcctggaagcagggagagatgatttgctggtggggctggggaaggcccatccctgagcctctgaaagtgaactccccgaccaggttggggaccagacatgcagagcccctggaagtattctctcaaatggaggcaacagaggtgattgttattttgttttagtttctgtttttcatttttttaaataaaggcattccctgcttttaaaaaaaaaaaaaaaaaa

SEQ ID NO: 236739 - DNA, 661 bp, Homo Sapiens
  misc_feature (65)..(65): n is a, c, g, or t
  misc_feature (579)..(579): n is a, c, g, or t
ctgcttcaatgagaaagcaactgaattgaggctaggagaggtagggagagctgagttctgacttnacctgtgcagaactctctgcccccatgttacctggactggaacagactgtgaatatagcagaaggttccaagaactctggtgtctgacctagaagaggcacagttctctctactggaaagaaaacgatgtagccgattgcacaagggtgccaagggaagacccaggatggcccatcaaaggaacctgggggaggatgcaggaggctgaagggatgcacctggcatttctctcactgtgctcttaccgcatcagcaacccccaacttttgggcctactctgccccccatgcgtgaataccctgcttggatgctgtgcttttccggtttgtctctaagcccctttctccagggcatgttggtttccctggcctctcagtgtcctaactggagcccagagtgccttgttctgagccaggagacggctgagcactggccctccacacctaagcgtcctttacattaacttattggtcttgtataacacctggtgccattgccaagtggctgtgtcctnagctacagagctggaattgtgtggggtttagtgctaaatacttcaataaagtctgttttttgtgaaaaaaaaaaaaaaaaaa

SEQ ID NO: 236740 - DNA, 666 bp, Homo Sapiens
  misc_feature (81)..(81): n is a, c, g, or t
gcagttcattattattttaaatatggaattattttatatgaaaaatagttgtcccacaggttatttttatctttaatagtnatatatgagaggaagggtcaaccaaaacaatatagataacactggagtctcgctgtagtatactcatttggttctgttaaaaagagttttgtattatagaatgtacagtgatgcgtcacttaatgacaaggatatgttgtgagaaatgcatcatcaggtgattttgttgctgtgcaagcatcacagaatgtacttacacaaacctaaatactagagcctaccacacacctaggctatgtggtagagcctcctgctcccactacaaacgtgtacagcatgttactttgctgaataccataggcaattgtaatgcaatggtatctgtatatttaaacatagaaaatgtacagtaaaaatatggtattgtaaccttctgggagcaccattatatttgtggtctgttattgaccaaaacgtcataatgcagcatgtgactgtatgtagaacaactgtgtaaactttcagaaccatcaacttagtcccataacttgggatattattgaaataaagttcccagtattgtttttacttttaaaggtttatttctgaaataaagctaaaaatctgaaaaaaaaaaaaaaaaaa

SEQ ID NO: 236741 - DNA, 586 bp, Homo Sapiens
gcatctccacagaaggaggaaagagccttgcgagggccctgcagcagaacacgtctctagaaatactgtggctgacccaaaatgaactcaacgatgaagtggcagagagtttggcagaaatgttgaaagtcaaccagacgttaaagcatttatggcttatccagaatcagatcacagctaaggggactgcccagctggcagatgcgttacagagcaacactggcataacagagatttgcctaaatggaaacctgataaaaccagaggaggccaaagtctatgaagatgagaagcggattatctgtttctgagaggatgctttcctgttcatggggtttttgccctggagcctcagcagcaaatgccactctgggcagtcttttgtgtcagtgtcttaaaggggcctgcgcaggcgggactatcaggagtccactgcctccatgatgcaagccagcttcctgtgcagaaggtctggtcggcaaactccctaagtacccgctacaattctgcagaaaaagaatgtgtcttgcgagctgttgtagttacagtaaatacactgtgaagggacaaaaaaaaaaaaaaaaaa

SEQ ID NO: 236742 - DNA, 675 bp, Homo Sapiens
gccctgaaactggaacacattgatgggtcaatctcacagttccagtgaaggccccatcccgaaaggacatcctggaaggtgtcaagaagactctcagtcactttcgtgtggtagccacaggctctggctgtgccctggtccagctgcagccactgacagtgttctccagtcaactacaggtgcacatggtactacagctctgccctgtgcttggggaccacatgtactctgcccgtgtgggcactgtcctgggccagcgatttctgctgccagctgagaacaacaagccccaaagacaggtcctggatgaagccctcctcagacgcctccacctgaccccctcccaggctgcccagctgcccttgcacctccacctacatcggctccttctcccaggcaccagggccagggacacccctgttgagctcctggcaccactgcccccttatttctccaggaccctacagtgcctggggctccgcttacaatagtcctccctctgttcctgaccccctcacacacactggaaagtgagggtgggggctctgcagtcagacaaacctaagatcacatcctggacaggccacttgcttgctgtgtggcattgggcaagtaactttacctctctggacttgtgataataaaagttcctacctcaaaaaaaaaaaaaaaaaa

SEQ ID NO: 236743 - DNA, 825 bp, Homo Sapiens
  misc_feature (150)..(150): n is a, c, g, or t
aaatcttctttctcttctctctccatgaaaattaaaacacacaagtgaatgaagtaattacatagtccaagattagaaatacaagtaaaatatataggtataggtagatagagtgcctttctgtttcttttcttttcttttttctttttntgttcttccttcctttcttccctcctccccctcatccttccctttctccttcttttcccttttttttttttttttttgacctgggagtaataaagttactttttaaatgcacgtatgcaatcttttattcctcttgttttatggataagagatttgttcaggtcaaaagttgcaaaactgttctgaagcttaatattagagacccaagtaagattgtttttagtcttgcttgaggaatgcacactccatttaaaaaattgtgcgctctgtagatttggattttacagcagcaattacttggctaaattagagtactgcaatcttgtaagtagaaaacagccaccatgacaataaacaaaaacacttaaaaatatttttagcttgttttacctacatctagtttcatttcatcttgctttgctttgttgactctgctaccgctgatgtttgccttgtcaatatcagaataggggcatcagtgtcccgtgaaatacattttgttgtgctatgagcctctgtaatcaaatgcttgtactcagaagagagtgtaaaatcagcatttctatgtaacatatatctctaattatctgtgtaattttataacatactttgacaaccccagtgagttacttaataataaagatcttaaaataatgcaaaaaaaaaaaaaaaaaa

SEQ ID NO: 236744 - DNA, 642 bp, Homo Sapiens
gaggccccgagagaggcggcccgtacccaaacactggctgctggcattccaccaagtgaccccaggggccaggccttcgatcacccacctcccatccatgcacacaccaggatgcagctgccaacttcacaccagccccaacccgctttgggggagcttagccccctgcgtcacccactccctgcacttctgctgcaatcaaggtggttctggtgcgggggtggggtggggggtgaggccttgtggccaatgggggaccccccaagagccagcttggacaatgctcttcttgccccttagttactggctggctgtggcttcagtggtgtgtaagcaggtggaatactcacccaccaagctctggggtaccccgagggcctgacaagaggatggggtgggggtggcatcctccaaagaccagcctccacccccactccagcctcagcggggccccagcgatgttttcttgttgtacaagaaccaggtccgagtgttgcctcctcttccttccggaagccaaactgctcctttattttttagagctgctgattgtgaatctcagagtcttaagagagaagccaaatatattcctcttgtaaatgaagaaataaacctatttaaatcaaaaaaaaaaaaaaaaaa

SEQ ID NO: 236745 - DNA, 725 bp, Homo Sapiens
  misc_feature (26)..(26): n is a, c, g, or t
  misc_feature (62)..(62): n is a, c, g, or t
ccatatctggaagggcactatatttntgggaggagccatagattcctggttatcctattttnaaacaaaatgtagacaaagtgaactctattttgattattgagaaaggagtagttttctatccctctaagagtatacttgaatcagacattttaaggatgtcactatggcactgttgtcatttccaaattcctagaaaagtttgttttactttgtttttattctgttaatgcattctttcttctctttacttcctttcttaccagtacactcctatctcaactctgtttatttgatgagttctgtcccgtaaatcatatttcccttacaattaataaatgtcacttcatattttataataaaccactcagtaaaagcaaaagcttgtcctgagaagtagagtgagttctttttcactctgtgtctaataatgttaaggtgggaaaaaaaaaagtgtggcatagctacctgcccatccccaaccctcagcaaagtagaatctcttttctggtaattttgggtttccgctctgggctctggcaagttgaacaatcctagccattgacaatcgtgatagttattattttcccatttgctgtctttttgtatctaaagtcttcctattgtactgcacaaaccatggattgtacatatttttatatattatgtcttattttattatttctaaataaaaaaattaaaaattgaaaaaaaaaaaaaaaaaa

SEQ ID NO: 236746 - DNA, 630 bp, Homo Sapiens
aaataaatcagcctgattttaacattttacatattacattgcctttaagcactatgattggatggctttttttctatttgtttaataatccttggctaaattcacatgtatctaaagtaaaatagctgagttactgaattctataaggggaagaaaaagcatttattttcacatgattaactgaaatggaaaagtaagacatttagcagaataattcatttaaaaataattttaaaaaatcagacatatttaaaaatctaggttgtctatccagtatgtgaatgcttaattataattgttacatgttgaatgggtattaagagtaagtcaccaggtacacaaaactgccatcatagcaaaatgagacagtgttgaaaagacaaaatattttctggaatgaaaatatattcaagttgatccatattcagatgttttctgtttaatacttcagattggtcctttgtccacatttgtttaaaacttattgtaatgttaatttatacttttggattgtgcctttgtcatgagttgagaaaagtagtcctacaaataatgtgaaagttgttaccaccacagcatgaatgtataattgtattaaaattgatcatccacagaaaaaaaaaaaaaaaa

SEQ ID NO: 236747 - DNA, 613 bp, Homo Sapiens
gccctttgaccctgcacaatgacctttgcatcagccaaactcattgccatgacaactctttgtactgtgtccgtgccacagatctgttggtcacattgttaatagtaaaggggacaagttggagacggtcaatttttacattttttgttgcaattttttcttcaatggttgtaagtagtttttttttttttaataataaaagggttcactagttaatactctagaaatatctgtgtgttgcaattcaaatgtatgttgagattgtgaaaagcgcttcagtgccactagcttaccggtacactagactaagcccttgatgacttattgcatgatacagtaccaggaacaacaggtggcctaaatacatgaaaagcagtgtaagctagtgacactaaagccagtcttgtattactgtatttttgacagaatggttttgaaaactgtgctacagggactgatgtggcaaatatatctctttatgcagaaggaagtctttttttttcttttttttttttttaagaagtatggctttttatgcatccttcatcgagggcattgaagttgcatggactgataaaagttgatgcaaaacaagaaagaaaaaaaaaaaaaa

SEQ ID NO: 236748 - DNA, 601 bp, Homo Sapiens
  misc_feature (81)..(81): n is a, c, g, or t
  misc_feature (98)..(98): n is a, c, g, or t
  misc_feature (101)..(101): n is a, c, g, or t
atcatttccctgagccccgtttatccttttccttcttaaaggcgaccatttcattaagtttttaagtgcctggtaattctntggttatgaccggtgtntgntccatggcagcctcttcctgaagaaatgctgaggcagtgtcacgctggtgtctgtcctccttacagaatgcctgaacagtcccattgactcaaagtgaagatcaaaagaaccaaatgacagcaatacccaagtgtaatcatcagtaaccctgtgttctatccacaggtaaaaaacaatcatcctcttcattatgggtttcaattttaaatgtaatacatttttagaaatgcctatttccttttataatctctttatataatctaggttattctggctcttaggtcttcatttagctactgaaaagatttgatctcaaatcaatgatctaaccacccatgaccatctcccacctctctccccgtacaccccccagcatgaattctgggaactcaggtaaaatgctttctggaaacctgcctgtattagtctgttgtcaagctgctaataaacacatacccggaaactgggtagtttataaaggaaaaaaaaaaaaaaaaaa

SEQ ID NO: 236749 - DNA, 527 bp, Homo Sapiens
ataaagaaacagaaaaaatagaacatactgaaaataatctaagttccaaccatagaagaagctgcagaagaaatgaagaaagtgatgatgatttagattttgatattgatttagaagacacaggaggattgcttgaaccctggaggcggagattgaagtgagctgagttcgtgccattacactccagcctgggtgacagagtgagactctgtctcaaaaaaaataaaataaaaagtcaatttagaatgtgaaattctgaccaccttttggctttgagtattttccaaaagatatttgaaatcctaatgaggaaatcagaaaaagctatggaaaaatagacaaatttcatacatgaacaatataaattgtgtatattacttaacatcaaactaaacaagattcagaattgatggttgtataagaactagctcatgtaaaaataaaataacattattacattgcctcaaaaattggtcctcggtaagtgccttttgataaatgatctcaaataaatgactcatagcaaa

SEQ ID NO: 236750 - DNA, 551 bp, Homo Sapiens
tgaaccttgcaagatcaaagaatagcagtctctggcctgctctgttctctttttcacagtaacttaaatggaaaaatgctgagttagcttaagtttctgtaacaaacattaagcaaataaaattttctataacagaaataagccatagctttgagatgaaggcttatatacgtgtaaaccattgtaaccaagaaaaaaaaaaaaagtcagagtcacagtgaaaatacttaacaaactagccaggatttaattcagtgatgacagggaacagaggaagtcttgtgagaaaggatcttgcctctgcctagtatctttcacagataggcttcaagtggtttgatttgcagatacaccctttcttggcctttatttcggcaaagatgtgatgggtaggtaaatgccgtgttctttccctagcacgtatgtcagtttctcatccactctttgttcttgctattgaaagttgtagcttctggctacaacagagatagttgaagaatatggagttcgccataatttatcattaaatgtggataatttgagattaaaaa

SEQ ID NO: 236751 - DNA, 452 bp, Homo Sapiens
ataatatgcagcatgcatactgggaactgaagagagaaatgtctaatttacatctggtgactcaagtacaagctgaactactaagaaaactgaaaacctcaactgcaatcaagaaaggcaagtcactgtttaccggaaaccactgattccagccaaactgcctgaagagcaactagctgtcatatcttatcaaaatctcatcaaatgagagattgataagccaaagtatatatagtacattcgcagcctacccattctctgctttggcttcagtctcatactggtcaacttcacacataaaggtgttgctgatgtgttttttcttcagtactgtattcttttccccttgtggcttttctcagccaagtgttgcttatgtgtataagactgaggtgttaagtttgctctagttgaccttttaccacagctacttcatatatttgaaaaaaaaa

SEQ ID NO: 236752 - DNA, 548 bp, Homo Sapiens
gaaaaaaagttgatttcaataattcatcctgcttcaagattcaaattcagaaatatactatcatcttgaattttagctgaagaatcctatgagcatgtatgtttctgctgtaaaaacgtagttactgtatggcactcaaaaactatgttaaatgatccactaactttttttttcttggcccatgattaatggaatgtatgtaactaggtagggttcctttcttagatctagaggaagtacagccacccactgacatctgaatttatatacctgttgagttttgagtgcacccaaacactcgataaaccaggtgaagaaatttagcttccatgttctacttcagctaaaacagctacatacaacctagtacacttgaagtcagacagacatttcagttgcttacctccagtactgagccttgctttgggaaactaaaagatttagaccaagtcactgccagtttttgcctttgttgcattttgtacagtttttatatttttgatatcttgtaaataaagacaaccagcttttccaggttaaaaaaaaaa

SEQ ID NO: 236753 - DNA, 465 bp, Homo Sapiens
  misc_feature (210)..(210): n is a, c, g, or t
tcctacttgctaatttatctagttgcctttaccatattttattatatgtttatttacttattggacataaaattattagccttctaaactttgatttaaatgtggactggctgaatgcggtggctcacacctgtaatctcaggactttggaggttgaggtgggagggaattgcttgaggccaggagttggaggctgcactaagctgtgantcgtgccactgcactccagcggtgacagagtgagaccctgtctgaaaaaataaatgtgggccagaccatagaccaagtagttatagcaaaagagagtttctaaattactcacaacagaacttccattcttaaactagtcttttgctttaatccactggtacccaatccttagcagttataaaccaaactcatgagctatgaggggaaaatgaccatgggaaacatagatttaatgcaaaataactgaaaaaaaaa

SEQ ID NO: 236754 - DNA, 507 bp, Homo Sapiens
taattctaaaacttacactgaatttaactttgaaggtcaacatatggatttttttaaaaacaatatttactctatcaaaagattagttgtatttttgacttgaggaaatagcttaatctgaacagcacgaaacttgacaaaaaagtttgctaatacataaatattggctattttaatctgttgaaaacggaaggctagtaccaagggagacggtagtaaaattatagaaggagctagtgaaaagtaaacattatgcaacatgaaaagaatactaggggaaaaactgacagagtagaataacaggaagattagtcacttctggaaggaaaaaagtaggtaggggcagggggatgaagtactttaaacaggaatgtggaactggaagtgctagggctaaaagacagatgtgagcttatttgggagctaaactgggctttgaaaaaggaataatactggtagcatttaatatcaaaatttaaattttatgttaacaataagaaaaaaaaa

SEQ ID NO: 236755 - DNA, 535 bp, Homo Sapiens
gcattcaagttccttagcttaacataaaaaggcaacagacatcttagcacaccacaggacagattttagagggatgatttcagagcactttgagatttaccctcctttagaatcccttacatggtcgatataaaagggaagcaattctgaatcctattactagcctgcaccatgatcccaaaaacctatacaggaagtaggagcatcacaacaaccaaaatctagccagaatggggaaaatagattagatatcttattttgttcccaagatccactgcatagtcccagagctaaagtgagagcctttattcctggttacattcacttccctatgaatctctccaaaaaacctacaatagtgtgacagctagtagctatgcacagtctatcagcaatggctcagtgaacctctattcaaaatagtttgaagtaagaatatggagtaaggtagaaaaattatcttctctcctcccacagttctacaagatatatactgttgcactttagaaggcagaaagcaaaaaaaaaaaaaaaa

SEQ ID NO: 236756 - DNA, 498 bp, Homo Sapiens
ttttcttatctataaattaataaatgaatgaatcgggttgagtgaatatttagtaaattcttagtacatactagttatttgtaactgtgagactggttttttggtatggttttcacatttgggagtagaaataccacttcctaaagtctgttttatctcaaattctctatccaggcatagtgtaaagtgaaatacctagatttcttgattaatatacagataatggccagacgccatggctaaaacctgtgacgctagcacttcggaaggctgaggcgggcggatcacttgaggtcaggagttggagaccagcctggcaaacatggcgaaaccctgtctctactaaaaatacaaaaattagctggatgtggtggcaggtgtctgtaatcccagctacttaggaggctgagacaggagaactccttgagaattgctccactgccctccagcctgggcaacagagtgagacacttcatctcaaaaaaaaaaaaaaaaaaa

SEQ ID NO: 236757 - DNA, 480 bp, Homo Sapiens
atagcaaaaccccagtggttgcaacagcagaggcttattgcttgctgtgctgtgtgtctactgtgggtctgctatagttctgctccttcctgtcttctgtcctatacccaggaagggtggaggaggaaaggcaaacctggcaaaccattcataggctctaagcttatgcttggaaataacaggtgtcacttgtgcccacatttcattggccagtgcagatcacatggccacacctgagtttgcatataaggaggcatccttcttctgtagagactggtaccacaagtcatgtggccaaggctgaggtcatggggcaggcagatgacacatagtcctcttctagggaggggcagtgaatcatctaccaagacagcaatcaagaagggcaataatgatgcattgacaggcagggtttcccacttaaaatgttttaaaactgaaagtctcttgttcaagttggtgtttggattaaaaaaaaaa

SEQ ID NO: 236758 - DNA, 430 bp, Homo Sapiens
agtaaaaaaggatactgtttgcacattgcgtattggaaaacaagtagaaagtccaaaaacaaaataaaaacttacagcaggaagaaaaaaaaaaaaaagccccacaaactctacagcttaagttagcctaaccacagctgagatatttcttccgaaagaactaaatgacaagttgagagaaaggccccattgtcaggtcagctgttcctgagaagaactaaattcaaaactagacaaaactctctcactactaaaaacgcatatagacagggaagcattttttcaagttatactaataagttgacttggatgctttaatagctttcatgaataattctgaaaattgtttagcatatttgaggaactccacaactacttagaataaaaagaaaagcaactttttaaaatttagtagtatctcaaaaaaaaa

SEQ ID NO: 236759 - DNA, 578 bp, Homo Sapiens
tttttttttttttttttttttttatttttagtagagatagggtttcgccatgttggccaggctggtcttaaactcctgacctcaagtggtccaaacacctcggcctcccaaagtgctgggatttcaggtgtgagccaccacacctgacctcatttacctatttggtaacaataagaaaatagctacccccaaattagtgccgtattgacagtaagttatgtgcaaataatattctttaaaagattaagatgtgaatgtgcttacatacaataggagaggtcatccacgattactcaatgtatactttaagttggaaaatacacaatactgatgaaataattccatgatatagattatcatttttacattacatggcaaaaataagaacaagttcaagaagctaaaagctaatgatgctaacattatacataaacaaaaaagaaaaaaatcattgtaggacttggaaggagtttttgagggagtgaagaggagaagtgaaatagaagaagctgtctactgcttctgattattctttcattaacaagtcggagggacagtgttcaccaaatctcctgtac

SEQ ID NO: 236760 - DNA, 424 bp, Homo Sapiens
aatattacttttaatctcaaaactgtttctttgaattctgcctgcctatccgattggttttactgaagttttccttgaggggctgtctgtcatcttttagggccctctgcaagtttttttcaaaaataacaactgcttagttgtgtgcagtgtaggactctttataggtttttgactactcttcttttcttgtagaatttcactgtcttttaatgtttacagactgcaagcaggataaaattaaaaattcaaccattattaatattgctgctttgtaggagctggtaaaggagtagaaggtaaagatctattaattatagtgtctaatacacccttgaggaaaatctgttaactccaaattattaagtacctaaagaaatctggagatcttaatttatttgccctatttcaggccttaccaaaa

SEQ ID NO: 236761 - DNA, 501 bp, Homo Sapiens
gatctaatagtttataatgcctgaatggaactcatttattggttaacagctcatatcaggagctgtgataagtaagtgtttacatacactgtctagtgcataaaaaccttagtgtttgctatcattcattctgtagccaatggcttacagtttctgtctggtcatctggaacttgaaaaatcctcaaatgccttcactcttttacctaactccctagtctttttgggaagtagttaagatatgcctgctatctttaactttggaggtagtatcaaaattttacttctttggttgtttagtgaattaatgttgaatattttctactgtcatcaaaacatattcccaaaaagtattaaaaaggaaccttagcacatttattttattaaaacaagaaaacccaaaatatataaaccttttcttattatgataataagcttatatatgtgaataagttataacctagtgtataaaaaattatttctaacaaactaaaaaaaaaaa

SEQ ID NO: 236762 - DNA, 442 bp, Homo Sapiens
taggaccacttcatttatctgagatgatggataccaagaatcagtgtataaaaatagtctaaatggctacaacagccgtcctgggaggtgcttaagcaatcccttttctttactgacccctcattcaagtggagactttgcgtaactctaacgcagctgtgaacacgcagacaaagctagaaagtgatgcaaatatagtaacctctggggccccgtgctgtgtccgtgtgcttcaagatgcgcatgtctttcatggagtatgaacagtaacatttcttggattatatatactaagcgaaaagcttaatacttggattttgttagtatctttaggcagagtctctttaatgtctagagtccactagtgttttagatggtagaagcctccttctggttcctgcttctgaaagtaatttgcacagatgagcaagttacgtcgacc

SEQ ID NO: 236763 - DNA, 410 bp, Homo Sapiens
ttaaaaaaaaaaaagtgatgggattctagatatatatttgaaggtgcagccagtaggactttataagtcttagtgcctgaccatttaaaaattgtgatgtttgtggccctttttcttaatacataatttaagatgacagtaggtcatcgtacttatcacgtcttttccattctcatgtttctgtacacaaggagctggcatcttctgaagaatcttatctaaactttttgggctttttttttttttagagaaaatcattagtcccattcttcttttgaatgctacttttccttctctaaaaactgaccatgaattatattctcattcatcaatttcttatttctttgtcagaaaagcagttagcattttttattattatgcaagtattcaacattcattgtaaaaaaaaa

SEQ ID NO: 236764 - DNA, 644 bp, Homo Sapiens
  misc_feature (14)..(14): n is a, c, g, or t
  misc_feature (26)..(26): n is a, c, g, or t
ctcagctcttgttntgctgctggttntaggggccaaagtaaatgggtggattctggaacctcaggcctagactaggttgcctttgtgggggcgatgaagcagagtcccctggtcaagtctctcggctcctttaatgtaggattgagagctgggcaaacaggtcccactggggactgtgactcttggagattaaaggacagggcattgatggaaggtaagggccaggagaagaggcctttctgctgtgtcccctcacggccttgccctcgaattctgcaggccctgggctcccctgacacctgtcatatttatggaccagacactggggcagcatcaggcacagtctgtctgggtgcaacttcttcagctgtctggccgcaccttaaaaactatttattcaccaaaagccccaggcatttcagaaggtggcactcaggtcaccctgaaaagcccccaggggcttgcaattctggaaaatattttgactagctgcttggctggatgtacaaagaaataggcattattttattgctgtaatattgtatgatactttaactgtacaataatgttgtcacttactgtaaatgtactatggttttattaacaataaacactcattaacaatgaaaaaaaaaaaaaaaaaa

SEQ ID NO: 236765 - DNA, 756 bp, Homo Sapiens
  misc_feature (158)..(158): n is a, c, g, or t
agaacacagcaggagtgtcgtgcggcccacagcgcagtgcatggtgatccagggcgctgaacaactcccctgaccccttgggcctgcatctgactcccggctgcagaatcagaagctgagtccaggcaaccgctcggccactcccggtcactcctctntggacacccagttactaaagtcagcaaagaagatgcggtaatcaccgcctgatctccacatggtgaacacaacactctcactaacacctccttgaccagtcagtcttcagcactgggggtggacaggcaggttttctgtgtttaccagaatcgcacaggctaagcacaaacatggaaccagagttccaggtgaggaaacctcactcgcagaagcccaggctgcaccccaccaggtgatgcagtgcgcctaggctgtgggtgctaggagccaagtgctagggactcgtcatgagtgggaatccccacgttcctgtcactgctgtcaaacagaaggtaaacagtcttacgaatgtaattccttaggaagacttgtacaaacttttattaggatatctatttatttaatactgaactttggcctactttgtgataagactataaacaaattgaggaaatcactatttctcacttctgtatttctcaaaaaataattttgttacagagttcaatatactgtgtactactgatcttctattgtgaaagcaaagcatttcatcaaaacaaagtattttaaattatgaaaaaaaaaaaaaaaaaa

SEQ ID NO: 236766 - DNA, 721 bp, Homo Sapiens
gaggacccggcagaaatgcagaaccatccatggactgtgattctgaggctgctgagactgaacatgttcacattgacagaaaaacaagctgctctttataatatgcaccttttaaaaaattagaatattttactgggaagacgtgtaactctttgggttattactgtctttacttctaaagaagttagcttgaactgaggagtaaaagtgtgtacatatataatatacccttacattatgtatgagggatttttttaaattatattgaaatgctgccctagaagtacaataggaaggctaaataataataacctgttttctggttgttgttggggcatgagcttgtgtatacactgcttgcataaactcaaccagctgcctttttaaagggagctctagtcctttttgtgtaattcactttatttattttattacaaacttcaagattatttaagtgaagatatttcttcagctctggggaaaatgccacagtgttctcctgagagaacatccttgctttgagtcaggctgtgggcaagttcctgaccacagggagtaaattggcctctttgatacacttttgcttgcctccccaggaaagaaggaattgcatccaaggtatacatacatattcatcgatgtttcgtgcttctccttatgaaactccagctatgtaataaaaaactatactctgtgttctgttaaaaaaaaaaaaaaaaaa

SEQ ID NO: 236767 - DNA, 690 bp, Homo Sapiens
ccaccattggagggccgccgccccctctgacaccacctggcgctccgctccatttaggagctagaacgaaaaggaggcccatcccccagtaagtcacagcccacgccaagatgagttctggagcctgtgcgaccgaagtttcttcaccgcagggcgaggtggacaagggtgtgagttactttgacttcaagacgtctcagtggcggctggttctggagagaggctttatgctggagcacttccagcaaagttcggctggggcctccttaactcactggctggtcacccttggcctcggttttcaaccaaagcctaaggcctcagttttcaacgctgtaaatggaaataaatgagagaagaaagtacagcccgtgtgacaagtgcagcaagcaatgcaacttccttgggacctaccctttgtggtcccttgctttaaaagtatagattcacatttagttagacctgtttcttcctcgcatgcaatttcaccagtcttttcccagacttctgtactcaacagaggaagttccttcctgggagaccatagctgtttgtatgtaaagagttgcgaaaaaacaaaagcaaaacaaaaaactccaacacctctctgtcacagaagtattgaattatatagactggaaaaatggaagtatccaagaaaacgcgtgtggtaagaaaaaaaaaaaaaaa

SEQ ID NO: 236768 - DNA, 765 bp, Homo Sapiens
tacgtctatcagttgcttctagacagccggtacgaaaacttcatccgatgggaggacaaagaatccaaaatattccggatagtgatcccaacggactggctcgactgtggggaaaccataagaacagaacaaacatgacctatgagaaaatgtccagagccctgcgccactactacaaactaaacattatcaggaaggagccaggacaaaggcttttgttcaggtttatgaaaaccccagatgaaatcatgagtggccgaacagaccgtctggagcacctagagtcccaggagctggatgaacaaatataccaagaagatgaatgctgaaggaaccaacagtccacctcagcgggccagcagcccagggaacccctgcccaccaggattgctggaagtgtgacggagcaggcgggctgaggagagtggaaaaggaagcgacccagaaatggcagggacacttctcttgcagaccaagagggaccctggagcaccttagacaaactacccagcacaggcggggctggaattctggcggagggcacgagcctgggactccatgtcacgtttccttctgatttggaatctctccatctgtaattcctcaccctcacccttccaccgttgttagtatcatggtgtttttgtttttgtttttgttttaagaacctgcagtttgactcttcatcgttcatctaggggaagacatctgatgttgttttcctatggaaatatatatctattatatataaaaaaaaaaaaaaaa

SEQ ID NO: 236769 - DNA, 772 bp, Homo Sapiens
  misc_feature (46)..(46): n is a, c, g, or t
agcagaactacttagcagagaacagaaatatgaagatgaattgctntgctgaggaacgcactggctaatcagagtgactgtgtcctgcatcggatcctaggagatttccttgtagctgtcaatgagtatcaggaggcaatggaccagtatagtatagcactaaggtaggcactagcctcccttgggggaaggccactgaggagggtagaggaggcagtgagctgtgtcacaggagttatggaaacacacacacactttgtgtccatggttgaaagcagaataataatagtaatggtagaagagttatttgtgaattcatgacttctaaaaattttttcttaaaatatattaacaacattagagaactgtttcactcataaccatcccacaccactataacatctgtgttcatttgtatagctcatcttctgtccttgcccacacacacatatttttatagggctgtacctagtatatattttatattcttctttttcaaatcaaagtattgtaagtactttcccatgtttctatctactgtagtcattaagaacttgaggtctgaagttttgaatactaccttcaccacctgtgatcttgggcaagttactaacacatttccttgtctatatctagctaccttattagatattaaatgatcgaatgagggttaaatgattatttcatgtaaagctcttagccctgtgcctggtacatagtaaatgctaaataaatagtggtattcttactgtttaaaaaaaaaaaaaaaaaa

SEQ ID NO: 236770 - DNA, 689 bp, Homo Sapiens
  misc_feature (106)..(106): n is a, c, g, or t
agcataggccgtgccccgaccggactggacgcatttttatacatagggtaagcgcagccattttggattttgcagttaatgtcttattttggctgtgattcttttnaaaaagtaaaaaagaaaaaaaagtttctcagctggaaaagaagccacacaggaaatgacaacgacgctgaatcccagcctccctccccagagcagaagtcccgcaggacagacagacacagacagcgctagtgaccagcacggttctcatgtaaattacaagccccagccgccagccccgccttctcttcctcctcctccgtcttcttccctggccctggtcaggcctgtggagccccagctctgggtccctagcccgggtccaggcagccaggctccctcctgagctgagaaacggaacctcgcgaaccactggtggcacatccttctcctcccccgcccctgatcacccgcccccggatcagaaatatatctatattctcgactaaagtctcatcaggaaatatttcctgtcttttattttaagcatcaaattgttttagttgatttaaaaaggaaaaaatacagaaaagaccaaaaaaaggccaagggtgttgttggggcgtctgtctaatgtggtgggtctttttttgaggggtctcctaaaataaaatattttgataagcaaaaaaaaaaaaaaaaaa

SEQ ID NO: 236771 - DNA, 669 bp, Homo Sapiens
tgcggacagacctggataggcccagcattcgttctgaagatcacagttcacagaagctttgcttcgtaaagataatccaaaggatctcagacccgctcttccttttcccttcattcccttgagagtcagccatgaacggaatacctgctaggttccaggaatgagctcacctaacagatagcaaatgtgtctggttagatctcagcagagcccattctgcaagacctggctgagccagatgagagggtgggccctgtgctggggggccttgggtcacacacaggaaccgagacctggcttccaccccccagtcacccacttgggttatctgctggaagttatcgataggactgtgtggccaaccaagtgcttgtgagatcactgacactgcaaaaacaaagcaaactgctccgggtaccaggacttcctccaacctggcaagggtgtgcgctgaggcggggcttgcaggtgagggggctgtatgcttcaggaactaactaaatgcatgcagaaggtaagaggcatgatgggaggtgttcaagcacagcaatcccatttgggagttattttgatactgcgatgagtaagggtaagggcgcatggaatggggctaaggtgggagtgaacactggggtgaataaattttaaatcaaaaaaaaaaaaaaaaaa

SEQ ID NO: 236772 - DNA, 702 bp, Homo Sapiens
acaaagcatactggcttctggaagaaatgctaaccaaggaacttttggaactggattcagttgaaactgggggccaggactctgtacggcaggccagaaaagaggctgtttgtaagattcaggccatactggaaaaattagaaaaaaaaggattatgaaaggatttagaacaaagtggaagcctgttactaacttgaccaaagaacacttgatttggttaattaccctctttttgaaatgcctgttgatgacaagaagcaatacattccagctttcctttgattttatacttgaaaaactggcaaaggaatggaagaatattttagtcatgagttgttttcagttttcagacgaatgaatgtaataggaaactatggagttaccaatattgccaagtagactcactccttaaaaaatttatggatatctacaagctgcttcttaccagcaggagggaaacacacttcacacaacaggcttatcagaaacctaccagatgaaactggatataatctgagacaaacaggatgtgtttttttaaacatctggatatcttgtcacatttttgtacattgtgactgctttcaacatatacttcatgtgtaattatagcttagactttagccttcttggacttctgttttgttttgttatttgcagtttacaaatatagtattattctctaaaaaaaaaaaaaaaaaa

SEQ ID NO: 236773 - DNA, 638 bp, Homo Sapiens
tcattcttgcacattggaaaaaccattgtgtgggaaggaaagaatgaaactgaagtgggcagatgtaaagagaccggcaaagttcacgtgactgtggatctcaagtactaccggccaactgaagtggactttctgcagggcgactgcaccaaagcgaaacagaagctgaactggaagccccgggtcgctttcgatgagctggtgagggagatggtgcacgccgacgtggagctcatgaggacaaaccccaatgcctgagcagcgcctcggagcccggcccgccctccggctacaatccccgcagagtctccggtgcagacgcgctgcggggatggggagcggcgtgccaatctgcgggtcccctgcggcccctgctgccgctgcgctgtcccggccgcaagagcggggccgccccgccgaggtttgtagcagccgggatgtgaccctccagggtttgggtcgctttgcgtttgtcgaagcctcctctgaatggctttgtgaaatcaagatgttttaatcacattcactttacttgaaattatgttgttacacaacaaattgtggggccttcaaattgtttttctcttttcatattaaaaatggtctttctgtgaactagcaaaaaaaaaaaaaaaaaa

SEQ ID NO: 236774 - DNA, 777 bp, Homo Sapiens
tgcatgataaagttcataccgtagtagcatcaaacaatgggtcagtgttctcggtggaagttgatggtcgaaaactaaatgtgaccagcacgtggaacctggcttcgcccttattgtctgtcagcgttgatggcactcagaggactgtccagttctttctcgagaagcaggtggaaacatgagcattcagtttcttggtacagtgtacaaggtgaatatcttaaccagacttgccgcagaattgaacaaatttatgctggaaaaagtgactgaggacacaagcagtgttctgcgttccccgatgcccggagtggtggtggccgtctctgtcaagcctggagacgcggtagcagaaggtcaagaaatttgtgtgattgaagccatgaaaatgcagaatagtatgacagctgggaaaactggcacggtgaaatctgtgcactgtcaagctggagacacagttggagaaggggatctgctcgtggagctggaatgaaggatttataacctttcagtcatcacccaatttaattagccatttgcatgatgctttcacacacaattgattcaagcattatacaggaacacccctgtgcagctacgtttacgtcgtcatttattccacagagtcaagaccaatattctgccaaaaaatcaccaatggaaattttcattgatataaatacttgtacacatgatttgtacttctgctgtgagattccctagtgtcaaaattaaatcaataaaactgagcatttgtctaaaaaaaaaaaaaaaaaa

SEQ ID NO: 236775 - DNA, 655 bp, Homo Sapiens
gcgatgatgacccgggcgcaacctggtgggggcccccagcagggacactgacgtcaggacccgagcctccagcctgagcctagctcagcagcccaaggacgatggtgaggggaggtggggccaggccccctgccccgctccaatcggtaccatcccctccctggttcccagtctggccggggtccccggcccccctgtgccctgttccccacctacctcagctgggtcaggcacagggaggggagggatcagccaaattgggcggccacccccgcctccaccactttccaccatcagctgccaaactggtccctctgtctccctggggccttgggttctgtttgggggtcatgaccttcctagtttcctgacgcagggaatacaggggagagggttgtccttccccccagcaaatgcaataatgccctcacccctcctgagaggagccccctccctgtggagcctgttacctccgcatttgacacgagtctgctgtgaaccccgcaacctcctccccacctcccatctctccttccaggcccatccctggcccagagcaggagggagggagggacgatggcggtgggtttttgtatctgaatttgctgtcttgaacataaagaatctatctgatgttaaaaaaaaaaaaaaaaaa

SEQ ID NO: 236776 - DNA, 622 bp, Homo Sapiens
ggttaggttggacccatgggtgcagcaccctccaaactggtgtcagagcctgcagatgagtcccgggaggagcggccctgcaggaagcggatgatcttctcaatggtggcctcctggtattcgtgggaccacctgtgggcacaggagccaatgtggttcagacagctgggcagagggagctgctagtcagctgtttgcccacactctgcctgtcatggtgatttgtaccctacccccctggtcccagggccctggggctcacttgataccgttgaaagtaagcacagcctgcatgtcctcaggcaggacctggggctcaggccactcgaagccatcaatgatgggcacaatgttcttgccgcagcttaaagcagtcacaatctcctggagaaagaaaggaaaggaggaagatacccctgtacccatctagggacccttgtagccaggcaggtgctgggaggcccactggcccgaggctgggcccagggcaggacaccagtcctgatgtccaccttgatgtctaccttaacccttgtagtgtaataaaaaataaatatttttcctttgcccagagttcctggcacagagctgctaaaacccttggaaaaaaaaaaaaaaaaaa

SEQ ID NO: 236777 - DNA, 694 bp, Homo Sapiens
  misc_feature (15)..(15): n is a, c, g, or t
gctcattttctggtntggcatggtgagtgttggggttgacatttagaactttaagtctcaacccattatctggaatattgtgattctgtttattcttcccagaatgctgaactccttgttagcccttcagattgttaggagtggttctcatttggtctgccagaatactgggttcttagttgacaacctagaatgtcagatttctggttgatttgtaacacagtcattctaggatgtggagctactgatgaaatctgctagaaagttagggggttcttattttgcattccagaatcttgactttctgattggtgattcaaagtgttgtgttcctggctgatgatccagaacagtggctcgtatcccaaatctgtcagcatctggctgtctagaatgtggatttgattcattttcctgttcagtgagatatcatagagacggagatcctaaggtccaacaagaatgcattccctgaatctgtgcctgcactgagagggcaaggaagtggggtgttcttcttgggacccccactaagaccctggtctgaggatgtagagagaacaggtgggctgtattcacgccattggttggaagctaccagagctctatccccatccaggtcttgactcatggcagctgtttctcatgaagctaataaaattcgctttctaaagttaaaaaaaaaaaaaaaaaa

SEQ ID NO: 236778 - DNA, 596 bp, Homo Sapiens
gaaatgagacaggaagatctggaataatatgccgaaggatcatcctgtgagttgctgtttgggattattactggaatccttagtcccatatatagttaatgataacatcacaaacaacttctttagatttttatgcatgacttgaaattcatttgatgtagatgaacctgttcactggaaaattacagcaatttattaaaacctcagtaagagcaaaacaaggaagaagattccttatatcttcttgttagacatcttctgtgattgttatggcatattacaccaatcagagaaatagagttttaaagtagtggtttgatattgattttataatctctgtaaaaatgaagataaaaagccagattgtacaaaagtcacctgacaaagactagatgaagctacaactttaagcaaggggtagagttgtaatagccttcaccatcactctgtattttacattcatttcgtttctgtcacttattcagtatctttttatcatctgacagctaattaaattataaagttgctatgatggtaacacaagttcttcaaatacaataataaatatcatcatctggaaaaaaaaaaaaaaaaaa

SEQ ID NO: 236779 - DNA, 722 bp, Homo Sapiens
  misc_feature (16)..(16): n is a, c, g, or t
  misc_feature (31)..(31): n is a, c, g, or t
cccgaaaaacaatttntgttggaggtgttcntaggccattaagggctgtggaacttgctatgatcatggaccggctgtatggtggagtttgttatgcaggaattgatacagatcctgagctaaaatacccaaaaggtgctgggcgagttgctttctccaatcagcagagctatattgctgccattagtgctcggtttgttcagcttcagcatggtgatattgataaacgtgtggaggtaaagccatatgtgctagatgaccagatgtgtgatgaatgccagggcgcacgctgtggtggaaaatttgctccctttttttgtgccaatgtcacttgcctgcagtattactgtgagttttgttgggcaaatatccactctcgtgctggacgtgagttccataagccattggtaaaggaaggtgctgatcgcccacgtcagatccacttccgctggaactaagaatagcaaactggcctctgtttaacaaggaaagaaagggtgcatgtggcttactgtgtctgaagatactgacatgcagaagaaataagtgcattcttctgcttttcaccccagctatcaatacatgcatctttatcagcagccaaaacactacaagcctcttgtttttcaccaaaaccctacatctcaggcttactaatttttgtgatattttcatgttcaaataaaatgtttttttgtattttcaaaaaaaaaaaaaaaaaa

SEQ ID NO: 236780 - DNA, 758 bp, Homo Sapiens
gatcgaaagaaagtcacagaggtaattaaatgtcgtaatgagatcatgcactcttcagagatgaaagttcttctacgtggcttcgagattttcagatgaagatccaaaattttctgaatgaattcaagaacatcccagagattgtggcagtatactccagaatagaacagctgttgacgtctgactgggctgttcacatccccgaggaagatcagcgagatgggtgtgaatgtgaaatgggaacttacctgagtgagagccaagtcaatgaaatagaaatgcagttactaaaggagaaacttcaagagatatatcttcaagcagaagaacaagaggtgttgcctgaagagctctcaaatcgactggaagtggtgaaggaatttctgagaaacaatgaggatcttagaaatggccttacagaagatatgcagaagctagacagcctctgtctacatcaaaaactggattcacaggaacctgggagacaaacacctgacaggaaggcctgaggttgcccgtcaacaaaaatcaggcatgttctgtgaaagtcagcatggcttccatctcagacatccttttctgtgcaaaaggaaaaagttaccagagtattgtacccaaacaaaaaggaatttttgttgttttgtcctggactttcctctaactctttggaactattttaatatttataaacttggggttgtataatctattgcaataaaaaatattagatactctatgccaaaaaaaaaaaaaaaaaa

SEQ ID NO: 236781 - DNA, 645 bp, Homo Sapiens
  misc_feature (48)..(48): n is a, c, g, or t
tttttcttataagtgataagcttttataaagatcataggaaaactagnaaaaaatgtaaaatgtagaaaattgtaaaacaaacttcattagagatattttgatagataccttttcagtgtctatttacaaattttttcttttaatatagatagggtctcactatattgcccagctcactcctgagctcaagggatcctcccaccatagcctcccaaaatattggaaatacaggcatgagccactgctcctgaccaattcacaaatttttttaaagaacaaacgtgctatcatcgatacatactgttaggttgtctttttttaaaaaacctaatgtaatttgttcatctttttatatctgtaaatatagctcaacacagttatattctttttgtgaatgtattatatctacaatttaccttttttcttagattttacatgcattttcccaaatctttgtgtttgcctatctgtaaaggtaatacattctgattacaaaaaatgaaaatgttacatagaaatgtaccgttatccatctaccagataactattattaataatgtgtatttatttttccaggaattaaaaaacatctatcatataagtattgcaaataaaacttaaaaagcaaaaaaaaaaaaaaaaaa

SEQ ID NO: 236782 - DNA, 678 bp, Homo Sapiens
aaccctcaggccaggatgcttgccatggcacttcatggtccttgaaaacctcggatgtgtgcgaggccatgccctgggcactgacgggtttgtgatcttgacctccgtggttactttctggggccccaagctgtgccctggacatctcttttcctggttgaaggaataatgggtgattatttcttcctgagagtgacagtaaccccagatggagagataggggtatgctagacactgtgcttctcggaaatttggatgtagtattttcaggccccacccttattgattctgatcagctctggagcagaggcagggagtttgcaatgtgatgcactgccaacattgagaattagtgaactgatccctttgcaaccgtctagctaggtagttaaattacccccatgttaatgaagcggaattaggctcccgagctaagggactcgcctagggtctcacagtgagtaggaggagggcctgggatctgaacccaagggtctgaggccagggccgactgccgtaagatgggtgctgagaagtgagtcagggcagggcagctggtatcgaggtgccccatgggagtaaggggacgccttccgggcggatgcagggctggggtcatctgtatctgaagcccctcggaataaagcgcgttgaccgccgaaaaaaaaaaaaaaaaaa

SEQ ID NO: 236783 - DNA, 762 bp, Homo Sapiens
  misc_feature (45)..(45): n is a, c, g, or t
tgccacaaatgtagagtggctcaaagtacttcaggattaggaatntggtttgtcatagatgtattctctggtgagggtggctgggatatacctgacccaccatcttcagaaggacccatgtcaggtctgaccattgggagcaaagccatgttcacactgacctaatgcagagtatggaagcattgggctggttatacatttctgtttcttagatttatcctccgcctctgtaggcatggacaacctttaatcagagcatctagagtggcctcttgtttatcctgaagatactgatgggtcttgttttctgttagtctgttttgtaatattcttttcccttccttcatggggaggcttagtttgtccagtccttccatgcccttctatcccagattacctaaatgttcccttctcaggaattctgtctcatcagttcttcacagtgagaaaagaggctagatgatggtgtggggggttggagttttcttctaataccgagggttcctggctgtgaggaaacagccacatgttcgtcatgattgagctgtgaagtcttcttggacctgttgtctgaaaataaagttaatttgtttgaggcatctctcttaagtaggtggaaactattgaagttcagctaacaatcacagcataggttctgatgcatggaaaggtggttggtgaatgaaaaagttgcgtagagccactactttctttttccctgagaataaatttggataaaacagtaaaaaaaaaaaaaaaaaa

SEQ ID NO: 236784 - DNA, 617 bp, Homo Sapiens
aaagagaggataaaggtggccgttgccatgttgacggtgagaggcatcatccggttcatcattggcttcagcgcacccatgtccatcgttgctgtcagttatgggcttattgccaccaagatccacaagcaaggcttgattaagtccagtcgtcccttacgggtcctctcctttgtcgcagcagccttttttctctgctggtccccatatcaggtggtggcccttatagccacagtcagaatccgtgagttattgcaaggcatgtacaaagaaattggtattgcagtggatgtgacaagtgccctggccttcttcaacagctgcctcaaccccatgctctatgtcttcatgggccaggacttccgggagaggctgatccacgcccttcccgccagtctggagagggccctgaccgaggactcaacccaaaccagtgacacagctaccaattctactttaccttctgcagaggtggcgttacaggcaaagtgaggagggagctgggggacactttcgagctcccagctccagcttcgtctcaccttgagttaggctgagccacaggcatttcctgcttattttaggattacccactcatcagaaaaaaaaaaaaaaaa

SEQ ID NO: 236785 - DNA, 716 bp, Homo Sapiens
  misc_feature (15)..(15): n is a, c, g, or t
cgtcatcgtcatgtntgctccacagttggcctaatcatatgtgtgaaaagaagaaagccaaggggtgatgtagtcaaggtgatcgtctccgtccagcggaaaagacaggaggcagaaggtgaggccacagtcattgaggccctgcaggcccctccggacgtcaccacggtggccgtggaggagacaataccctcattcacggggaggagcccaaaccactgacccacagactctgcaccccgacgccagagatacctggagcgacggctgctgaaagaggctgtccacctggcgaaaccaccggagcccggaggcttgggggctccgccctgggctggcttccgtctcctccagtggagggagaggtggggcccctgctggggtagagctggggacgccacgtgccattcccatgggccagtgagggcctggggcctctgttctgctgtggcctgagctccccagagtcctgaggaggagcgccagttgcccctcgctcacagaccacacacccagccctcctgggccagcccagagggcccttcagaccccagctgtctgcgcgtctgactcttgtggcctcagcaggacaggccccgggcactgcctcacagccaaggctggactgggttggctgcagtgtggtgtttagtggataccacatcggaagtgattttctaaattggatttgaattcggaaaaaaaaaaaaaaaaaa

SEQ ID NO: 236786 - DNA, 689 bp, Homo Sapiens
cttccactcatggaagcccctctactgcttatgaagattaagggtagtattttctaaggaagtggaaagaattaaactagaaatccacaacctcggaagaagtgtttcgagtttaacatgcgctgtttctgcttatgtggttccttctctagagctgctttcccatggctttcaaaacatcaggttattgtggggcttcaggtgtaaggtcctggaagttcagcaaagtttcgtggacaagacatgggcacagagagtagaagcagaaataaatggttctatgttttcaacttccagggttggggcaggccagagcaaggcggtctcatcgaggtgggtgctacctgtgtgtgtgtagatgagtgtgctgaaggtggggagggcagcacacagcagctcatggcagagccgcctcctaggtcttggcaaagaggcaagctgacgatagacatctacctatattgttaagaaaggggtcggggggatcagccaaggtccatcattgcttttttgccgcgcccccccccccccgcccccatagattgtcagctgtaagtgaaactcctagtgaaaaagaggggagccctgtgttaggagtccccataaacatgtactgtaattctttgtatatagaaaaaaaatttactgtaaagtaaagtttaactttactcataaaaaaaaaaaaaaaa

SEQ ID NO: 236787 - DNA, 729 bp, Homo Sapiens
tggattggagagcagcagaacccagggcctggcccaccaagctggagtgggaaaggcacaagattcgggccaggcagaacagggcctacctggagagggactgccctgcacagctgcagcagttgctggagctggggagaggtgttttggaccaacaagtgcctcctttggtgaaggtgacacatcatgtgacctcttcagtgaccactctacggtgtcgggccttgaactactacccccagaacatcaccatgaagtggctgaaggataagcagccaatggatgccaaggagttcgaacctaaagacgtattgcccaatggggatgggacctaccagggctggataaccttggctgtaccccctggggaagagcagagatatacgtgccaggtggagcacccaggcctggatcagcccctcattgtgatctgggagccctcaccgtctggcaccctagtcattggagtcatcagtggaattgctgtttttgtcgtcatcttgttcattggaattttgttcataatattaaggaagaggcagggttcaagaggagccatggggcactacgtcttagctgaacgtgagtgacacgcagcctgcagactcactgtgggaaggagacaaaactagagactcaaagagggagtgcatttatgagctcttcatgtttcaggagagagttgaacctaaacatagaaattgcctgacgaaaaaaaaaaaaaaaaaa

SEQ ID NO: 236788 - DNA, 671 bp, Homo Sapiens
ctgatcattatgctattgagtcacaactacaacttcacggacttaacattgaagaaagtatgcggatgataaagccaagagagggggaagaaaccttaagaatagaggatatccttgaagtaattgagaaggaaggagactcaattgcagtgatcctgttcagtggggtgcatttttacactggacagcactttaatattcctgccatcacaaaagctggacaagcgaagggttgttatgttggctttgatctagcacatgcagttggaaatgttgaactctacttacatgactggggagttgattttgcctgctggtgttcctacaagtatttaaatgcaggagcaggaggaattgctggtgccttcattcatgaaaagcatgcccatacgattaaacctgcgagatcggagttctttaattaggaatggaatgcaacagatttggacaagtcaaggacaagagctttagagagaccaaagagtttttcactgttaaagtgtccagtatgtagccgagaaccatatggagaacatcaaatacagtggaacaaatgtaactgctattgatgtcacactttgtgaagtagtctttgttgcttaaaaagggtgacatctagtggctaaacatgttatttcaaataaataatatcgaaataacaaaaaaaaaaa

SEQ ID NO: 236789 - DNA, 694 bp, Homo Sapiens
  misc_feature (63)..(63): n is a, c, g, or t
tcttggccatggagagacatggagttgatcatcaagtaatttctgtaaccttcgagaaagctntgaatgccggcttcatccaggccactgattatgtggagatttggcaggcataccttgattacctgaggagaagggttgatttcaaacaagactccagtaaagagctggaggagttgagggccgcctttactcgtgccttggagtatctgaagcaggaggtggaagagcgtttcaatgagagtggtgatccaagctgcgtgattatgcagaactgggctaggattgaggctcgactgtgcaataacatgcagaaagctcgggaactctgggatagcatcatgaccagaggaaatgccaagtacgccaacatgtggctagagtattacaacctggaaagagctcatggtgacacccagcactgccggaaggctctgcaccgggccgtccagtgcaccagtgactacccagagcacgtctgcgaagtgttactcaccatggagaggacagaaggttctttagaagattgggatatagctgttcagaaaactgaaacccgattagctcgtgtcaatgagcagagaatgaaggctgcagagaaggaagcagcccttgtgcagcaagaagaagaaaaggctgaacaacggaaaagagctcgggctgagaagaaagcgttaaaaaaaaaaaaaaaaaa

SEQ ID NO: 236790 - DNA, 753 bp, Homo Sapiens
  misc_feature (27)..(27): n is a, c, g, or t
gaagcaagggtttatccaccacatctntgtctgccatagcatttagtcctctgcatacaatgggctgtccataattactgtagattggactgaaaatcaaaaagtaccacaagataaatgcaaactcttggtgagcagagggagaacatgtactgagtttcttaggtttcatggctaatgcattggcacagctttcagtgtatccctgcagtccttccagatagtccctgccccatgcattgcagatggttgccaaggcccccctctgtcctggcacccagtgttcctccatcctgactccacgtattgcccccttgccactgcctgagtgcaccatagtgtccccatccccccactgcctggagttccccttgtgtacccccttatcagggcacgacctaactgtgccctgctggctgtgacctcctgaagacagacctggcttctccctgcatccagttccccagtatgtgctgtgggcatcctgagaagcctgaaaaagacagggccaggttaggcttgggtgagctgctttctgccttcttggtacacacagtaagcagtggagaggcgtgttacaccgtatctgttctatcctcatctaaatactgagaggctagttgggatagtaaatctttcttactacatatgcattaagtttaagtaaaatagaatattgtgtgaaaaaatgcactgttactaataaatggaataaacagatccatgaaataaaagaaaacaaaaaaaaaaaaa

SEQ ID NO: 236791 - DNA, 655 bp, Homo Sapiens
ggccactaatttcgtttaaataccattgtgtcattggggggaccgtctttacccctgctgacctcccacctatccgccctgcagcagaaccttggcggtttataggtaatgatggaacttagactcctcttcccagagtcacaagtagcctctgggatctgccaacacacgtccactcccaagccactagcccactccccagttggcccttctgcccttaccccacacacagtccaactcttccacctctggggaagatggagcaggtctttgggaagctcccacacccacctctgccactcttaacactaagtgagagttggggagaaactgaagccgtgtttttggccccccgaggctaaccctgatccatagtgctacctgcacctctggattctggattcacagaccaagtccaagcccgttcttacgtcgccataaaggcccccgaacggcattctcggtacttctgtttgtttttgtacattttattagaaaggactgtaaaatagccacttagacactttacctcttcagtatgcaaatgtaaataaattgtaatataggaaatcttttgttttaatataagaatgagcctgtccaatttctgctgtacattattaaaagttttattcacagaaaaaaaaaaaaaaaa

SEQ ID NO: 236792 - DNA, 676 bp, Homo Sapiens
ctcccatgttgctggctgtccgtacatcaccctgtcccctgcaggagggggctacaggccatctccctcctgtaggcctctgactcccctccacttttgggccctcagcttatctcgggcaggggaccattgcagcatcctcccctcctcggactcaaggtgctgaggtataagccctgggccccagatccctggtgacaccttcctggagaagactctcaaaagtgactgtatatttgagttcaccagcaataactccccacactcgaagcaggtccaaacccaggatctcagggtccttgggctctgtggcactgtcttcccaagatccttcctgttgcacaatgggaaacctaagaggaaaaagacaggggcctgcttgcccagccatgcgagggattccatgcccacctgccctctgtctgcctcgctggaatgtgggcccctgctccccgtcaggttgtgctgtctctgacctatgtttacatccccgaggggtttctgcctcctccccacccaggtcagggtgtggtccagcagcttgctgtggggtgctgacatgtgtcaccactgccccccttgcccccgggggggtcatggtctcctcctggatgctgctccttgaatcttttttcttgataaaccttttacaattaagataaaaaaaaaaaaaaaa

SEQ ID NO: 236793 - DNA, 870 bp, Homo Sapiens
  misc_feature (80)..(80): n is a, c, g, or t
  misc_feature (166)..(166): n is a, c, g, or t
acagagtatgagccagccgggagacatctacaagcggaacactgagctgaagttgaagtgagagcttgaaacgagaactncaggacaagaaacagcatctggataaaacatgggctgatgtggagaatctcaacagtcagaatgaagctgagctccgacgccagtntgaggagcgacagcaggagacggagcatgtttatgagctcttggagaataagatgcagcttctgcaggaggaatccaggctagcaaagaatgaagctgcgcggatggcagctctggtggaagcagagaaggagtgtaacctggagctctcagagaaactgaagggagtcaccaaaaactgggaagatgtaccaggagaccaggtcaagcccgaccaatacactgaggccctggcccagagggacaagtaggtgccttcggtgctctttttgtcgcttgtcttttgcccattctcaaggcatacagcagctgtcctgttccctttcaaggactgacagtaggagcttcactatttctaagactttatgggcccacaaccgaagacattcttttcagggttgaattttcagtggtatccattatgaaaactcacttcatggattcagtgggcaaatagcggcaagcaagagacatggattcacttattcggcaaacatttactgggcatgccacatgccagataccgggctaagtatctggcatgtgttacagaaacaaaagacctaaatcttgtcaccaagaaacatgttacatgattttaataagttccctgatagaagagcatggggtgctctggggaaatattggagggtcatccattccacattaaaagagcaagttgtctgcaaaaaaaaaaaaaaaaaa

SEQ ID NO: 236794 - DNA, 740 bp, Homo Sapiens
aggaggtggatgcagtagacacgggtatcagcagagagacctcctcggacgttgcgctggcgagccacatccttactgcactgagggagaagcaggctccagagctgagcttatctagtcaggatttggaggtgggcggaaaccagggtcactgagctacagaggaggacatgccctgggatgtagtagtatcatgcagaggtgtgtgggcccttttgttcacctctgcagactgtgaatcctagctgccagtttgcctattatatgccaaggcatttgcaaaaatctcattaatctaaatcaaaatagctttaaagaaaaatgcatacacttcctcagatcatcaaacagactctggtccaaggttggtaatgaaatgactgttcctgacagggaggaatagcagggcccaatcttctgagatggcttctgggtctttccatggtcagagaagatctatagtccgtcctgaggtctgtcaatgtcacaggaaaaggcaaacttgaggggatcgtcgcctgctggctaagaccagggagctaaaaacttgaggaagggaacctgcctgggtgggtgctacttctgattcattgtccttgtccctgtcataagtacctccctattgtagatagaagggaaggaaactgttgacttgagcttggctaaatttcctgaaggtggaggaccttagagttgctccaaagtaaactttccaaggacttaaaaaaaaaaaaaaaaaa

SEQ ID NO: 236795 - DNA, 733 bp, Homo Sapiens
  misc_feature (17)..(17): n is a, c, g, or t
attaggtgactcccatntggtttctacagcttttccccaatatcatgttaaagttttggcttttatcttatttcacttatttcattttgagtcatgtcttctggctccagctcagcttcctagagataattcattaggcccgagagctgctccagagtgggattagaacccgtgtagtacatagtcacattaaactgagatcggctaattaatcgctcttctccgtgtaactgagcgatcgcgctccttccccgaggaattgcaatttcatggttcctaatgatggtgcgattacattatgtggatcacttaggctgtgggtgtcaggagcggtacttggagcctctctcggtggggatgggagaagtcacttctaaaaccggggagatggaggaaagcagttagaatgtctgttactaatttttgttaacgtgctgctgtttcctacatctcattcaggcattagtttcaagttccattttcccccagcaccgtgtggcaccttccccagaaccctcacattttttttctaatattcacagggttattgtttgtaaaaaatctatttatttgctttattccatcaagtaatttattttcatgagatttcttggaaatgtggctctacatatcgttagtacaagtaatacattttgattgttgtttcctggaataacttgtattatttgatgagttaaataaaatgcctaattctaaaaaaaaaaaaaaaaaa

SEQ ID NO: 236796 - DNA, 668 bp, Homo Sapiens
  misc_feature (35)..(35): n is a, c, g, or t
tcaaagagaggggcagaagcaagaagagattgttntgaagccaaaatggtacaccgatatttaagaaggaaagcgaatccaaacggttgtgatctaaagaatcaataagcctcaagccttatgtttctccaatgttacgctcgcttgcctagctttacgaatattgctttgttttctgtttatgcatagccttgatttgtttgactcccctccccccatttacatgcatgcaatcagacaggccactaaggtaaaagagtctgctctatcatagtgttgagagcgtgtgtagtgctgcatcttatgacaaggggacagacaagctgggacgtcagggaaatgaacaaaagggacgcaggttatttggggtgagtgggtggtgggagcctggagcaaggtggagggtgcagaggggctggggtagggcatgtaggagggaggtgggtgggtcaggtgagtggaaggggtgttgtatattgtgttgatgacgtacgttatttccatggaagatagccgctgtggcagctgtcacatcaccacagctccctagggtctgccgagaaggcaggcagtctttgggttctgttctttgtcacgtcccctacaagtaaattttgtttctttgaacgtttattaaaatgccaagacccaaaaaaaaaaaaaaaaaa

SEQ ID NO: 236797 - DNA, 763 bp, Homo Sapiens
aatactgcagcaaaggtgtgggattcgtccccccatggcctgcagtctcagtggatgttccaatttagccagaaaggcgacctaagaattgccgggaggatggatggctggcgcgcgaattgttgcttttgctcttggctgatggttgaggaatgtagagagactgtgtggggtttgtgtgacactgcggtgccttgcagattaggtgagctttcaatctctctttaaaaggggcggcgaagaggacccgcaggctgcaaggagcaacagcgatggaatataatatccctagatgatggctacagtttctcatcttcccggctatgtcctatcacaatttgcatgctggaattgctcggtcttaggaacttctaataagaatactattctgttatctgaggggggaggggggatggggcccctgctacctgaccttaaacgatgattgaaaaaacgaaaaatggactgaaatccttaattggcagaaatgtagtatgacaactatccaaaaaggcatctctataagaaatgactaattgacaatctgctgtaccaaaagttggcatttgagcaagatatgacaagtccttagtgagcaacctactgtgtactagatgtcctgctaaacccttgaaccctactaataccttggcctgcacgtctctctcactctgttctgcaagtcaatataagtattaacattcgtgataaataaaaattctctgcatgtttcagcaatccctgtaaaaaaaaaaaaaaaaaa

SEQ ID NO: 236798 - DNA, 786 bp, Homo Sapiens
  misc_feature (69)..(69): n is a, c, g, or t
tatcaacagttaggcactactttgtagaacgattagcttcaccctcttagctgccaggagatcccttcntaaagatggactatgtgaagattcgggagtcctgaaacatggggactccgggatggtctctagccctatcgatgatgaacactggccttctggaggggaaatggcagtctgggctggcgtggtaggaagggctttggtgttcatggaatgggcctgctgctctcagaccttcaaaggatggaaccaacgaaggaccaaatgagaaagcagatgctgtgccttgcagagggccatgaatgtcagttattatttttctccttatacaattattttgtggttattattacaatgtacatggctgttgcatagaagacatgactggtggaggctgaggaaagccatgacattctacaattgccatcaggctaaggccccgtgagcatttctctcccttgtaatattaaccctgtatttctgggatcacatcacggaatattctttgcctttccactttccaggaaatctctcggactgggctaccctccttgtgtgtgatgaaagatgagctatatttcagaacaaagtgctgtgttgtcatgatttgcctggactcccagggcgtctcttacccaacttgataacgatgctgttcattagcagcctttgttaactgataaccaagagcggtaatgtgatactcataagcaattttctgtgtgtaggataaaataaaccatcttgtatgggatctgctaattgaaaaaaaaaaaaaaaaaa

SEQ ID NO: 236799 - DNA, 452 bp, Homo Sapiens
catggctcaggatgcgccagctcagctaccttctctctgtcccccaaaaaagcctctttttttcctgcctacatggccttggccctccttctccctagaccagtggcactgggaacaggcatgctcccagctaggaagaagccggggacataaagctagcagctgtggtgaggataccagggtgagtgctgagggtgagggacctgggcttcctgtttttaatgattaagcctcagcctcaaaaagcttttgacagcctggacaacatggccagaccctatctctaccaaaatggaaaaaattagccaggtatggtggcatgtgcctgtagtcccagctactcaggaggctgaggtgggaggattgcttgaacccaggaggtcgaggctgcactgagctgagattgtgccactgcactccagcctaggtgacagagtgagactctgttaaaa

SEQ ID NO: 236800 - DNA, 339 bp, Homo Sapiens
gccgtggaatcttgggccttaaagccccttcgtctccccagcacccactctctgggggcaggtgggcccggtgacagtaaccttcagggagccctgaagaccatggaggactactgaccaacaacctctgaccttcacccctctggatgggggacgaatcactaggcaaaggggaacaatgggaaggagacaaaatggctgcctttacagctgcagcaagatgtggaaacactggttccctaggcacctccattgtcttcccgccttgggagcatgaaataaataaagtgtgaaggggaacatgaggaagactgatccaagtcaaaaaaaaaaaaaaaa

SEQ ID NO: 236801 - DNA, 481 bp, Homo Sapiens
cagctttattttcacactgtaaatatcaatattgtataaacttgtcattattgggactaatcagcaaattgttttgtgtcatgctagagatagcaaggtacaaacctttctattaattaatgaagtaatttttaccaaagacattaaatatgggtggaccaaaagtgtatagtctagcacttctataaacatagtgtctgggaggagcttgagagatttgtaatgttacttgtaaacagaccgtgtggggaagaccgcagacagcacatcattttttgtctttattggtctttatgactaacacttcatctctgcatcacttctgctttgctgtaaaacttagcaagtacattaggatagtggcaaataaagattaagattgaggacagatgtttgtaaaataactgggcgattttaagattataggtgtaacttgttaagaagaagataactggtgtggaaataaaatctggcagccaaa

SEQ ID NO: 236802 - DNA, 540 bp, Homo Sapiens
attctttatttcagaatgcaacaatagattccattaatatagactcaagatcaaaacagcatacctgctaagctaagatagatggtgttgattccactgggttttgatcaatacaataacaaacctttttcctttgacatactctgaattttgttgtttggggggagggggtgtgtgtgtgtgtgtgtgtgtgtgtgtgtatgtgtgtgtgtgtgtgtgtgcacgcgcagtgtccatcagtatcagtgcctgcctgagttaggaaaattacattcctggttctgtattgaggagaaggatgtataaagcaacatgaaacattagccctccttttattttaaagactaatgttaattgttcttaaaactggattttttttccttaaagcaatttttttcttttcgatttaatgaagtattgctagctgaagccagtttgacatagagagatgtcagattgatttgaaaggtgtgcagcctgatttaaaaccaaaccctgaacccttttaaagaacaataaaacatattttacacgctcaaa

SEQ ID NO: 236803 - DNA, 496 bp, Homo Sapiens
  misc_feature (82)..(82): n is a, c, g, or t
ccatatataaacataactaatttatatatccataaacagagcacagtttctgcttggtttcctttgattcttgtttgtcctntgatcttcagccatcagacctgggtagggagccagtgccccaccggatttctttgtctggttccactggggcgtaatgagtaccctttatccccttccatctcattaggcagaattcttcccctagatcctggaatggttatggaggcaagttttaagacctctagcactgccctagcttactttagccaagatggagtaatttacagcccattaggcccttaaaatttggcttgcttctgtgttctcctggagtttcccagctccttctaaagaggtttcaggaggctgggtgcagtagctaacatctgtaatcccaacactttgggaggccaagacgggtggatcacttcaggtcgggagttcgagaccagcctgggcaacatggtgaaaccctgtatctactaaaaaaaaa

SEQ ID NO: 236804 - DNA, 479 bp, Homo Sapiens
caaataattttttcactattgtcaatgccaatgcattgaaaggcccagaaaatgagaaaaggataacaaacttttgataaaaaggtaagaatttctgtgtggatgttcctcagtttctgggaaaattttgctacaaaagagatttaaataatttaggaggcagtcttttgcatgtatttttggcttacctttgaatctagtggacctgtaatatgtaagaatgaagaatgtgcttagcaaactgaaatgagaagacttctatttcttaaatttctattcctgagattatataaaatttcacgcaaagagtaagcattagctttaaatacttcttccaaatgttcctagaattttgagacaaagattgttaaaaattaatgtatgtctttgttttaggcagaactggaaatattaagtagtgagagtactatagtttcccttttgcctacataaaagcattttaaaattaaaaaaaaaaa

SEQ ID NO: 236805 - DNA, 354 bp, Homo Sapiens
agacccaccttgataattatcttaaggtcagctgattagctaccttaactccatctgcatccttaattgccctttgccatgtaaggtgtaacatactcagattctggggctatgacagagacatctttaggagctgttattttgccttaaaaaggaggcaattatttaagtatataaggtgaatagttaggtctttctctccaggaaacctaacttgtcattcagcggttaccatgcatgggtatcttcttccaattgcctgagccagccagactttcatgtttgagcattcagattgggctttatttctcaaggcatgtggcaaacctcacaatgacactgaaaggttaaaaa

SEQ ID NO: 236806 - DNA, 477 bp, Homo Sapiens
atggcagatgtggacccagatacattgctggaatgctcacagatgggacagggcgatgaaagggacatgcaactaatagaccctgaactagctatgcatgctgcttttgatgtctgacaacgcggatcgttgttttgaaacatgtcctcctcgtaccttcttaccagccctttgcaaaatttttcttgatgaaagtgctccagacaatgtattagaggtgacagcccgtgccataacatactacctggatgtatctgcggaatgtacccgaaggattgttggggtagatggagctataaaagcactttgtaatcgtttggttctagttgaacttaacaacaggactagcagagacttagctgaacagtgtgtaaaggtaagtattacttattggctcattacttatttttctcagacctctcagggatgagtattggctcatttaaacatcacttagagactgaaaaaagtatttaa

SEQ ID NO: 236807 - DNA, 664 bp, Homo Sapiens
  misc_feature (62)..(62): n is a, c, g, or t
acagatactggacagatggattctagtgtgacttgtgactgtgagatttcctataacatatntataaatgttactcaggttaaaagtatttaagaatacagttaactaattgtaaatatgctgttaaccaaaagagctttccctccctcactttttcctttgtaaacactcatgactgcttctctgtctcgagtcatctctgcattaactccccttcgtggtcactagagggctctctgatgccttctaaaagaacaactgcttttttacaatgccccccacccccaccccgcccatagagacagggtctcactatgtggcccaggctggtctcaaacttctggccttaagtgatgctcctgtccttggcctcccaaagtgctgggattacaggtgtgagccactgcacccagcccactttttttttactctgaagtgattccagtcatatgtgtgtgtaactgcatcctatgagaagagcacaaatattgctgttccatgttctccactttcattttccactacaaatgaaaagcaatttttgagactgaatctgttgctattttaaaggttattgtgggaaactgagctaaaggagttagcatctttatttttgtatcaaaaataaaggttattttgaaattataaaaaaaaaaaaaaaaaa

SEQ ID NO: 236808 - DNA, 595 bp, Homo Sapiens
gcacgagggggatcaactgagaatatgtttatgtaaaagcaattttaaatattaaaaaaagtagaaattaacacatacagtactgaaaaactgtcacattaaacacatgtgaaatgacaagtgtactgatgtttgatggtaacatccagatgagaattcggcatttaactagtggcactacaggattcctatacaacatgttgaagttctaggcaataaaaaaataaatagcaattgctgttcaacagtaaaataagacacacactatttgcagaacataactttcccctctgggggaaaaagaactaatttgctatttttttttcataaggttccatatcttcaaaatactatataatgtacaaaattgcagatagtggcttactgagtttaagatcaagatcagacttaaactcaacaagatcaccaaaggtatttctactgagttttcctatgtcccacagtaagctgggttagagagaactcaaattcctgatggaaaacaaaaccgaacaaaaaaactagaaaaaaaaggtgtaaaaatgctgtgtaagttgctgcaaaaggggaaaaaaaagcctacagccgcggccgc

SEQ ID NO: 236809 - DNA, 715 bp, Homo Sapiens
  misc_feature (11)..(11): n is a, c, g, or t
  misc_feature (705)..(705): n is a, c, g, or t
tgaacatgacntacgagaagatgtctcgtgccctgcgccactattataagcttaatatcattaagaaggaaccggggcagaaactcctgttcagatttctaaagactccgggaaagatggtccaggacaagcacagccacctggagccgctggagagccaggagcaggacagaatagagttcaaggacaagaggccagaaatctctccgtgaggggcaggtggactccaggcacccggtaccgatggggcagggaccgagtctcccatgaaggcagactcctcctcccagcagagcagcaggatccccagccagactctgtacccacaggattacagccattgcttgggaaggctgggaggcctcccatccaggacactgggggcaggagtgtcatcttttgggcagggcaatcctggggctaaatgaggtacaggggaatggactctcccctactgcacccctgggagaggaagccaggcaccgatagagcacccagccccacccctgtaaatggaatttaccagatgaagggaatgaagtccctcactgagcctcagatttcctcacctgtgaaatgggctgaggcaggaaatgggaaaaagtgttagtgcttccaggcggcactgacagcctcagtaacaataaaaacaatggtagctgaaaaaaaaaaaaaaaaaaaaagtaagcacttgcggccgctccnaagcggccgc

SEQ ID NO: 236810 - DNA, 638 bp, Homo Sapiens
gtcaccagctgtgtgtccttctccatctacacggcctggggcgagcactgtgagcacctgagcatgaaactcgacgcgttcttcggcatcttctttggggccctgggcgccctcttgctgctgggggtcgggacgttcgtggtcctgcgcttctggggttgctccggggccaggttctcctatttcctgaactcagctgaggccttgccttgaaggggcagctgtggcctaggctacctcaagactcacctcatccttaccgcacatttaaggcgccattgcttttgggagactggaaaagggaaggtgactgaaggctgtcaggattcttcaaggagaatgaatactgggaatcaagacaagactataccttatccataggcgcaggtgcacagggggaggccataaagatcaaacatgcatggatgggtcctcacgcagacacacccacagaaggacactagcctgtgcacgcgcgcgtgcacacacacacacacacacacgagttcataatgtggtgatggccctaagttaagcaaaatgcttctgcacacaaaactctctggtttacttcaaattaactctatttaaataaagtctctctgactttttgtgtctccaaaaaaaaaaaaaaaaaa

SEQ ID NO: 236811 - DNA, 590 bp, Homo Sapiens
  misc_feature (26)..(26): n is a, c, g, or t
aaaaattgatccaggaaagctgatgngacccaaaggagtttctgtggaccgcaatgggcacattattgttgtggacaacaaggcgtgctgcgtgttatcttccagccaaacgggaaaatagtcaccaggtttggtagccgaggaaatggggacaggcagtttgcaggtccccattttgcagctgtaaatagcaataatgagattattattacagatttccataatcattctgtcaaggtactacaagcacatgagttgttgttaacttttaactgcttttatggagaaattggtctgcgagaaaataatgcaatacttacatatggcaccaaagggagttaaccagcagagtagactttgttctgctcaaagatgccggttttaacttggacttacagaccttggaaagtcaggaaattgaataaaatgtggtggcaataagttgcttaatttgaaactggtgcaaatgaagaggacttgaaaattaaattttaaaaagcaattcgttgaacttagaggcagaactttctgaagcttaatgttttgtggctagtcaataaattaaaatcactttttcaaaaaaaaaaaaa

SEQ ID NO: 236812 - DNA, 720 bp, Homo Sapiens
  misc_feature (46)..(46): n is a, c, g, or t
  misc_feature (53)..(53): n is a, c, g, or t
catgcctgtccaaaatgaaccacgcaactggttacctttctctgcntaccttntgggctggggaagaggggcacctttctcatcactctcagggaagtcctgaggaactgtgcaagccaggaagcatgagtcgctgaattggtgatggaggggtgtccacttttttctagttcctcagctgcttctggagcagtgttcacaacgggaatgtttttactgtccttggtaggctacaggttcacagcttcaaatcaaggcctccaaggattttattctcttacatcacagttttgacaagtatgcttttaaaaaacaacatttgcaaaactggtctttaagcgacgtgagtcagaggtaacaaaggcatatatataccgaacaaaggtgctccggtgcagtggagagaacagtattagtgtcgcaagcacaggagtgcagacagccccgccttcatcgtgatgcctgcagcacaccacgattatcatgagaggtcaagattttgatttactaatttataatcttatttccaagcaaaacaagtcaatttcatgttacaacttttttcttgtttctttttatcttgtttggcctgagggttgggggatttgggggagttgtcagctgcacaatctttgaagtgtaagttaatttttatgtgatatttcagtatatattttattgattaaatttattggaaaacttaaaaaaaaaaaaaaaaaa

SEQ ID NO: 236813 - DNA, 499 bp, Homo Sapiens
gcacgaggggccgcggctgtaggctttttttttttttggctttattatctatttatttttgctgattagttttttacaactatttaaatgaacagatgtgcctttcttgtgttttaaccattaaataatttgagtgcttaaaagaaccttggcttttcatgcaaattaaaatggggctgggtgtaactctctaggatctcaccttctgactttatagcagactcctgccccatgggcactcatgtgtccatgtggactcaccagcacctagacacacagacaaacatttagactgaaaagatgcacttcgataagtacctgcttactttgttaactttctaaaattgtaactaaataagaatggtctaaaacatatatgattttatgttaacaagttggtattaaaactagcctgctattccacacccttaagcaatctgatttgtaatcaagtaatattcagctctaagaataaaaaaaagcctacagccgcggccgc

SEQ ID NO: 236814 - DNA, 694 bp, Homo Sapiens
  misc_feature (87)..(87): n is a, c, g, or t
gggccccaagtacgtgatcgatgtggaacagccgttctcttgcacctccctggacgccgtggtcaactatttcgtgtcgcataccanaaaaggcgctggtgccattcctgttagacgaggactacgagaaggtgctaggctacgtggaagccgataaggagaatggcgagaatgtgtgggtggcgccctccgctccgggcccaggtcctgcaccctgcacaggtggccccaagccgctgtcacctgcgtctagccaggacaagctgcccccactgcccccactaccgaaccaggaagagaactacgtgacccccattggagatggcccagctgttgactatgagaaccaagatgtggcttcctctagttggccagtcatcctgaagccaaagaagttgccaaagcctcctgccaagcttccaaagccacccgttggacccaagccagagcccaaagtctttaatggtggcttgggcaggaagctgccagtcagttcagcccagcctctcttccccacagccgggctggcagacatgacggcagagctacagaagaagctggagaagaggcgggcactggagcactgattcggacacaccagggaccagcgggctagtcccagggcatggcccagcggccagattctttttcccaggattaaaactctgaccccaggaaaaaaaaaaaaaaaaaa

SEQ ID NO: 236815 - DNA, 676 bp, Homo Sapiens
ccgcccgcctcggcctcccaaagtgccgggattacagacatgagccaccagatgtgaactattttctactactacccacacagaataccagacagacactcatgggaggatgggctctggagggagggctcccagccttgtcagatccgattgtgtggacatatagactcaattgccctgtaccttgaaaggggacccctaatggagataagatcctaggaaagaggggcagagtaggggtcctgattgtcagattgaagctggggtaatacttctgatttgtgaattttcttaaagagaggtgttaaaaaactttgcatgaaagagcgtgggagagtgccctaaacttgagggcggagcaacctgttatcaatacactttcttgagcagagtctgaaggagaaacgaacacagtcacatagtccaaatcatttgagacggtgccctgtatgttcatctcaaggcatctagctcttacccacagagaaccgtgactctgggcttccctcactaaatatgtctgtgacatctgtatccttatgtgcttatggaaatgttcacatacacacctgcagatgtgatgactgaaaaaaacgattatttattcagagctttgtatttagtttatgctataataaattcagttgttataaaaatcaaaaaaaaaaaaaaaaaa

SEQ ID NO: 236816 - DNA, 661 bp, Homo Sapiens
accaagcgcatccaatctcaaggaatctttaagcagagaagggcataaaacagctttggggtgtctttttttggtgattcaaatgggttttccacgctagggcggggcacagattggagagggctctgtgctgacatggctctggactctaaagaccaaacttcactctgggcacactctgccagcaaagaggactcgcttgtaaataccaggatttttttttttttttgaagggaggacgggagctggggagaggaaagagtcttcaacataacccacttgtcactgacacaaaggaagtgccccctccccggcaccctctggccgcctaggctcagcggcgaccgccctccgcgaaaatagtttgtttaatgtgaacttgtagctgtaaaacgctgtcaaaagttggactaaatgcctagtttttagtaatctgtacattttgttgtaaaaagaaaaaccactcccagtccccagcccttcacattttttatgggcattgacaaatctgtgtatattatttggcagtttggtatttgcggcgtcagtctttttctgttgtaacttatgtagatatttggcttaaatatagttcctaagaagcttctaataaattatacaaattaaaaagattctttttctgaaaaaaaaaaaaaaaaaa

SEQ ID NO: 236817 - DNA, 668 bp, Homo Sapiens
  misc_feature (54)..(54): n is a, c, g, or t
gagagccgagaccgggaatgggctacctacacctgtgtgctgggctttcacgtntacggcgtctggccggacggctccgatgggaccgacatcaactccctgtgccgctcccacaacgagcgcgtggtggcggtggccgacgacttctgcaaagtgcatctcttccagtacccgtgcgctcgtgccaaggcgccgagccgcatgtacgggggccacggcagccacgtgaccagcgtccgattcacgcacgacgactcgcacctcgtctcgctgggcggcaaggacgccagcatcttccagtggcgagtgctgggcgctgggggcgcggggccggcgcccgccacgccctctcgaaccccctccctgtcccccgcctcctccctcgacgtttgatcgctgcctggcgggaccgactggcccggcggcgtggccccgccccgccctgcccttccctggcccaatcccccacgactaggggccgactctttcctggactgacttcgagacattcccgatcgcgcattttcctggagggcgcgaacggcgcccctgcacacactgtttagacccgctggctgagccgggcagccccagcctaggccttgactcccgctgcctgctgaggggcaataaaccagaaccaaagtcgcaaaaaaaaaaaaaaaaaa

SEQ ID NO: 236818 - DNA, 673 bp, Homo Sapiens
tgggagaccacacagcagagaagcctcacaagagtggagacatatggactgcattcagaacattgaccattagctgatacatgcagacaagaggatcaggaaggatgagtctgatctggagtaaatcagaagtactaagatggaaatgctgaattctgttccactagaatataagatccaagagggcagggactttgttgactgccaaatctactctgccttttcagtgcctaatacgttgtaatttttcagtagtatttgaaattactgtcatatttgaaattcagtaatatttgacatttttatttatctctagaagtttctctaaaattgtactcagaagaattctgcaaggcttggaggatatataagttagtcatatggcctgattttcccatttttgcagatctcgtggacaagtgtttatcaaactgaaggttgcagcttgttagtgggttcagaaatcagtttctggctagcaactagaagttttgtatgttaacagtactttattgaggtgtaatctgcatgcagtaacatgcacaagtctcaagttcatggctttctgaattttgacaaatgtaatcatcaccaagatcaatgtatacaatatgtctattaaacccaaaaagttttcttgtgcccatttccagtcaaaaaaaaaaaaaaaaaa

SEQ ID NO: 236819 - DNA, 587 bp, Homo Sapiens
aaatattccttgaaaaagcagattttaatggtttaattttatgtggacatatgttaaattattcagcagtaccctattgttaagcatctggttttaaaatttttatgctaatacaaataacgcttcgtaatttaaaattttggaagcatcccgttagtgtaaatttctgagtaaatttattgatcagttggacttttcacgcttttgaaatagctttgctaaaatgctccccctacaaagttgtaggaaatgggaagaggagtaaactagaggcaagggagttgagagagctggaaggcatggtggctaagggctacggttatcaggtgaaatttgagatttgtaggctgactatattttcaagcttctgaacttttgcttatgcaaaatattcatcccaaagcctctagcgtcatagtttcctcacccaaattactatgtttccacaagatttatatagttggtctatctctgcggtccttgaaagtgaagttggtgttactaggctgtgggttttgggggctcagcagtgacctggagtgtgcaaataaatgttaagttgaaacctcaaaaaaaaaaaaaaaaaa

SEQ ID NO: 236820 - DNA, 704 bp, Homo Sapiens
ggaaggcaagccaggctcactcacagagtcaaggcctgctccctgtagggtccaaccagacctggaagaacagcctctccatttctcttcagatgccacttctaagaaaagcctaatcacagtttttcctggaattgccagctgacatcttgaatccttccattccacacagaatgcaaccaagtcacacgcttttgaattatgctttgtagagttttgtcattcagagtcagccaggaccataccgggtcttgattcagtcacatggcatggttttgtgccatctgtagctataatgagcatgtttgcctagacagcttttctcaactgggtccagaagagaattaagccctaaggtcctaaggcatctatctgtgctaggttaaatggttggcccccaaagatagacaggtcctgatttctagaacccgtgactgttactttatacagcaaaggaaactttgcagatgtgattaaagctaaggaccttaagacagagtatcctgggggtggtggtggggtgggggggggtcctaaatgtaatcacgagtaagattaagagcaaatcaattctagtcatatattaaacatccacaataaccaagatatttttatcccaagaatgcaagatttcagaaaatgaaaaatctgttgataaatccatcactataataaaaccgaaggtgaaaaaaaaaaaaaaaaaa

SEQ ID NO: 236821 - DNA, 699 bp, Homo Sapiens
  misc_feature (101)..(101): n is a, c, g, or t
ttgcaatcctagaggaaaaagtggtttaagaaggaattgttttctttttaatatatttaactgaattcaagccatacccacatcagcaacagcacctcttntactctccccgggttagaggggtggcaaaaatggcacggactaaaaggagaaatggatattccagcaaagtctctaactgcagcctgtagacaatttgctattaaagattcagtgcacaaaatatagctaacagcttttaaatttttacttttaaccagtctggggatttgcttgcctggtgagtctcatatgccatattatgaatatgaaaataatgaagttaatttcctgttgcctttctgtgtcagccacaatatcaggtctaaccctaatccagggatgccagtaaactgaaggcaattttaggttgtagaactcagattaattgtagaaaccattaattttaattgctctaattttcatagtaatcataaaaagtatgcaagtacctaatatataaactcaattgacactgtatctgtagaagtaaatttttaatggctggttaattatatcactacattttattgcaatatagtactcatttaagcacttaaaaatggaaggtgtacaaagattaaattaagacacggtaaattgactaaatatttggtttttatataaataaaggtcataaccacaaaaaaaaaaaaaaaa

SEQ ID NO: 236822 - DNA, 678 bp, Homo Sapiens
ttttttttaaaaaaaagaaaatgaaaaacaaccaagcgcatccaatctcaaggaatctttaagcagagaagggcataaaacagctttggggtgtctttttttggtgattcaaatgggttttccacgctagggcggggcacagattggagagggctctgtgctgacatggctctggactctaaagaccaaacttcactctgggcacactctgccagcaaagaggactcgcttgtaaataccaggattttttttttttttgaagggaggacgggagctggggagaggaaagagtcttcaacataacccacttgtcactgacacaaaggaagtgccccctccccggcaccctctggccgcctaggctcagcggcgaccgccctccgcgaaaatagtttgtttaatgtgaacttgtagctgtaaaacgctgtcaaaagttggactaaatgcctagtttttagtaatctgtacattttgttgtaaaaagaaaaaccactcccagtccccagcccttcacattttttatgggcattgacaaatctgtgtatattatttggcagtttggtatttgcggcgtcagtctttttctgttgtaacttatgtagatatttggcttaaatatagttcctaagaagcttctaataaattatacaaattaaaaagataaaaaaaaaaaaaaaa

SEQ ID NO: 236823 - DNA, 685 bp, Homo Sapiens
tgtagaaaaattttactttttcaaatatgcatacaattttaaaacagtagaagcaaattcattttaatgaccatgtaaagagcgaatgtcagacagtattattaccagtttattcaaattacatacatgttcctaccaaggtggaaagaaattcaaacctcatggtaaaacttaagcacgatttaagataaaagcatagtatttcttcagtgtagacttattaagtgccttattgaacaggatcttaacctgctttttctgtttttttgaaagagttaatgcaattgttgaagcttctaaccaagaaacaacttaaggaattgggagacttggtcccctcgttgtcagggttctggctataagtacctccccacctttgggttttcttaaatatgccaaaaggaattctagtttttataaccaatgggtttttttgtttgtgtgcttatggatttgtgtaatcattgatgcttaatgttgtggattcataatataaaaagtggctcctgtcctttatatttattcatgtgctagaaatagtatgcattatataaagagtatgaagttttcataagcctttatatttcaagctctttatttaaacattgttggaatatgtggcataagccttgtttcatttatttaataaactggagtaatatataataataaaaaaaaaaaaaaa

SEQ ID NO: 236824 - DNA, 695 bp, Homo Sapiens
  misc_feature (487)..(487): n is a, c, g, or t
tcaggagcaggagtcttgcagcccccaggcccagcaaggccacagagcttgccccagggcaagggccgcagccgccggagccgcaacaagcaggagaagccagcctcctccttggacgatgtgttcctgcccaaggacatggacggggtggagatggatgagactgaccgagaggtggagtactttaagaggttctgtttggattctgcaaagcagactcgtcagaaagttgctgtgaactggaccaacttcagcctcaagaaaaccactcctagcacagctcagtgaggccctgcccaggctgagctgcttcagggcatcctgaggccctgactgccagctgaaggcgtataatttttccctccgtgtgccccacctacccgtccaagaccctctgtgctccccaccatcctggaccaaccaaaagctgaacggatgccacactgtgctggggccccttgacctcagcagagccgcttcctggtgntacgcagcctccacactcagagcccgtggactgggctggcctaagggccagggctgatggtactgctggcccaacactgctctctttgtgtttggtttttttgtttttgtttttattttgtttttttccaattctttacttttgatactgtgaagatctttcgtgccgaaagataaagcaacatttggacacagaaaaaaaaaaaaaa

SEQ ID NO: 236825 - DNA, 751 bp, Homo Sapiens
cattgtcatgtacatgcaaaacgcactgaaagaacagcagcatgtgcattgtccaggtacctgttccgatgctgctactgctgtttctggtgtcttgacaaatacctgctccatctcaaccagaatgcatatactacaactgctattaatgggacagatttctgtacatcagcaaaagatgcattcaaaatcttgtccaagaactcaagtcactttacatctattaactgctttggagacttcataatttttctaggaaaggtgttagtggtgtgtttcactgtttttggaggactcatggcttttaactacaatcgggcattccaggtgtgggcagtccctctgttattggtagctttttttgcctacttagtagcccatagttttttatctgtgtttgaaactgtgctggatgcacttttcctgtgttttgctgttgatctggaaacaaatgatggatcgtcagaaaagccctactttatggatcaagaatttctgagtttcgtaaaaaggagcaacaaattaaacaatgcaagggcacagcaggacaagcactcattaaggaatgaggagggaacagaactccaggccattgtgagatagatacccatttaggtatctgtacctggaaaacatttccttctaagagccatttacagaatagaagatgagaccactagagaaaagttagtgaatttttttttaaaagacctaataaaccctattcttcctcaaaaaaaaaaaaaaaaaa

SEQ ID NO: 236826 - DNA, 685 bp, Homo Sapiens
  misc_feature (14)..(14): n is a, c, g, or t
cccaagttcgcctntatgcccctaccaactttgcacccatcatcaaccatgtggccaggtttgcagcccaggctgcacatcagggactgcctcgcaatacttcatgctgttgctgctgactgatggtgctgtgacggatgtggaagccacacgtgaggctgtggtgcgtgcctcgaacctgcccatgtcagtgatcattgtgggtgtgggtggtgctgactttgaggccatggagcagctggacgctgatggtggacccctgcatacacgttctgggcaggctgctgcccgcgacattgtgcagtttgtaccctaccgccggttccagaatgcccctcgggaggcattggcacagaccgtgctcgcagaagtgcccacacaactggtctcatacttcagggcccagggttgggccccgctcaagccacttccaccctcagccaaggatcctgcacaggccccccaggcctaggttcccttggaggctgtggcaagtcctcaatcctgtgtcccagaggtccctctgggccacaacccaacccttctcactctcctcagtgctagcactttgtattttttgatacttttatacttgtttctgcttttgctgctcttgatcccacctttgctcctgacaaccctcattcaataaagaccagtgaagaccaataaaaaaaaaaaaaaa

SEQ ID NO: 236827 - DNA, 762 bp, Homo Sapiens
tacatcgttgctttgacccttgctgaaaaggaacatataattgtatggatggtaggattaagttgttgagtagttttgtaatcaagattttatgtaacatttgtaaagggaaaattagcacttttgtggttcttaagggaaaagaaacagaccttgtggagattataatttccttggtttctgttaccactgttagagggagttgtatcatttaacatatagtaggatagtttaagtgtagggaggacaattattgtctgaagctaaaatgggttatttataggactgatggaaatgatttcatctctgccatctctaaagcacttttcattgaacatgttagcctaggatacgtacagtaaattaacaatgatagcagcagatgcctagctcatcctgggtttgcttctgaccttgtcatgtgtgtgccaccaaacacgttattggcacctttttaaataagctctcatgatcaagatggtgatggtagagaagctgcccggaataaactgaatttcatatgttctaaaatgactagcaatggtttaaaaaggaagaagagtggaagtgaagaaggtggtataaatgctgtcaatttttttttaacccaagtattttggtggggaaaagcaagtatctattgcttagcatatgtaaagttgtagtctatatttatggggccattgcttaaagattataaattatgtaaatacattaataaattctaagtttcatttgacattcaaaaaaaaaaaaaaaaaa

SEQ ID NO: 236828 - DNA, 744 bp, Homo Sapiens
  misc_feature (64)..(64): n is a, c, g, or t
tttttctttcattcttgatacttggaagtcgtctgaatcctttagcttcaaaccagcctgagtntgagtgcttgccgtagcagaaactatccttaccacaggtgggaaggaaaggaccagtttctagcagtgtcgggccactcctctttcgaacatccctaagggaggcattcacaaaagctgtcccaagcagctggaagaaaacagcttccgagatgaccaggaggactgggcggcgccgagcccagaacgctcctggcgcagcaccgttggcgttggccgattgctgctggtggggggcgggggtgcaggccccagtctctatgcaaatcagggatcagaagatcggaatttccaccaatcagcgggaagcctcggccctgtaactgctaatgggagacagcagcgccacgccacaggcttttcccctggtttcgggaggggtggggagccaggtggggctcccgcccagaccctttcccgaggtccgccctctccgccttttctctaaattcctcttttgagtgccctcccttccggttgagaggcgggggttggcccgtagttgtacactcagtcaccctgcactgtggaggcgggggcctcccttgtggactgatttgcgtgggatttggttgttttattaagagatttaaaaaattcagatgacttactagtatgactgttttgtcatatttgcttccaggttaataaatgacaaaaatgaaaaaaaaaaaaaaaaaa

SEQ ID NO: 236829 - DNA, 703 bp, Homo Sapiens
agcattgtaaaggaaattgaatggctttctgatatgctgttttttagcctaggagttagaaatcctaacttctttatcctcttctcccagaggctttttttttcttgtgtattaaattaacatttttaaaaagcagatattttgtcaaggggctttgcattcaaactgcttttccagggctatactcagaagaaagataaaagtgtgatctaagaaaaagtgatggttttaggaaagtgaaaatatttttgtttttgtatttgaagaagaatgatgcattttgacaagaaatcatatatgtatggatatattttaataagtatttgagtacagactttgaggtttcatcaatataaataaaagagcagaaaaatatgtcttggttttcatttgcttaccaaaaaaacaacaacaaaaaaagttgtcctttgagaacttcacctgctcctatgtgggtacctgagtcaaaattgtcatttttgttctgtgaaaaataaatttccttcttgtaccatttctgtttagttttactaaaatctgtaaatactgtatttttctgtttattccaaatttgatgaaactgacaatccaatttgaaagtttgtgtcgacgtctgtctagcttaaatgaatgtgttctatttgctttatacatttatattaataaattgtacatttttctaattaaaaaaaaaaaaaaaaaa

SEQ ID NO: 236830 - DNA, 712 bp, Homo Sapiens
gcccgcggcccgacagccctcagccgcggcacggcagccccgggcggcggaaggggcgggcggagcggcggggcgcggctcggcagcggcggcaggtccgcttccgcctgacgccgccctccccgggcggtccgagccgcagcctgcggtgccgcaggagctggagatgcccgtgctgaagagcagcctggccttgggcctggagctgcgggccgcagccgggagccactttgatgctgcgaaggccgtggaggaacagctgagaaagtcgttccagatccgctgcggcctggaggagagcgtgtccgaggggctgaacgtgccgcgctccaagcggctcttccgggacctggtgagcctgcaggtgccggaggaacaggttctgaatgccgcgctcagggagaaattggctctcctgccgccacaggctcgagccccgcacccaaaggagccacctgggcctgggccagacatgaccatcttgtgtgacccagaaacgctattttatgaatctccacacctgaccctggacggtctgccccctctccgacttcaactccggccccgcccttcagaggacaccttcctcatgcaccggacactgaggcgatgggaagcgtagaccccaaagatccctggagggctagttcgtatttttgtgttaaactatttgttagaataaagtaattttgctaataaaaaaaaaaaaaaa

SEQ ID NO: 236831 - DNA, 695 bp, Homo Sapiens
attgaacatgctctaactggcctgtgctacttattaccgggcttgtaatagcggttcttgtctccatagcctgttgagtgttcccagatgtgactcacctttctgctgccctcttcatgcaggcctactgactcataattcacttgtcccaaaagccaccccacaagcctgagccaacctgctgcctgacgccacagtcattggcagaggtctgggcattattaatttataaaaatccatgctttacacctggacagtagacagggacttcagagattgcacgtttgaatacattctcccaagactgaggttgttcggttttaattcctgtagtccaatcacacaatttcttatggaaaaccttttgtgtttctggtatttaataacttgaagggatagcaaaatatactgtgtattcagagggcctctctgcagctgctagctcagacaccaaaggggtaaggcccaggacattcatatctttaaaagctgcaaatctggtaacctttaaacttttaaaacaaatgtcatatggggtaacactgaccttttataatttgatgtctcaaatgtagagattatctaaaaatcgtaacttgaataccttgtaatttttctcttaaaaaagaagacttgtgtaagtctctgcatcaacgccaataaacatgttgcttaataataaaaaaaaaaaaaaa

SEQ ID NO: 236832 - DNA, 642 bp, Homo Sapiens
gcacgagggctgtaggcttttttttttctaagttccagaataatagtgtcattattatagactatatgttttgaagtttgatattataatgggatattcattttttgttcttttcttgactcctttctcaagtgtgtgataaggtctgctgataaaatatttaaccccaagaaagtgaaaactaatataaaattagaaagacctatccaaattagacagtcaattccattaaaataagaagtgagaaaaacaatgttgggcattgaggtgtaaattttgcccagatgtatacccagtgtgaaatatcttctaataaaaatatatttggctcttatccctgcacatgtagaggcataaaaattggtaaacatgtcccgctgtgtagaactttaaaaaaaaggcatttttgaaagtgttgagtggcactgataactggtgaagcctacagccatccgcccaaaagtctgttctgatggcactgagttttcattgttctggatgtataagtctgtgtgtcaggtacagctgggcccagccagcttgagtcactcttgtacaagcttgtttttttctgtcttgtgaatgcacttgataatttaaaaataaaaatatctgtttctctgcaaaaaaaaaaaaaaaaaa

SEQ ID NO: 236833 - DNA, 618 bp, Homo Sapiens
ctcgctcttgttccccaggcagaggttgcagtgagctgagatcatgtcactgtactccagcctgggcaacagagtgagactgtctcaaaaagaagaagaagaaaaaaaatgcagtgagtttatgttgttacattgtaacatctcagcgtagctgtatgcattactctatagcataactacttaagttttatgtcattcttgaactgtgatttttttttctatttgctttcatagtttggtgggccattgttatggactgaatgtttgtgtcccatcctcacccctaaattcccatgttgaagccccaaccttcactgtggagctggggctgctaaggaagtaattaaggttacacgaagtcacagtggagaatctgatctgctaagactggtgtccttatagggagagaccccagagagcttgttcccttcctccctgtgcacacaaacaagagggcatgggagcacacagagagatggcagccacctacaagccaagaggagaagcctcacaatgaacccccccccccaccctgctggcacctatgtcttcgacttccagcccccagactgtgagaaataaatttctgttggttcagccaaaaaaaaaaaaaaaaaa

SEQ ID NO: 236834 - DNA, 714 bp, Homo Sapiens
gggggtggagaacaatttgttctgtgtttgtgtggggcaaggcctgtcttcaggctctctccaaccacgtacgctctggctggagcttctgaaaggacacagttcttgcatagaagttgctttctccagcttgcccaccaggcagtctggcttcagacatctatgttgcccttttaagtcaatttggctgtttaagtggaatgtttgtgtcagtctgataattgttaattcatttgatcctcataccaacccttacttgcctccttttacagatggaaaaatcaaacttggacagtaatttccacaaggaaaagccccacagctggaaagcggtgggagcaggaggccacactgggtacaggagtacccatctccccacaggagccccacactgtctcacccttaggaagcccaaatgctcactccttgagtttctaatgcattctttctgatgtacaggaagaggggaaggaaggaagagcttttccatttggtgctccaatgtctcctgctggacccatctgcctagtggaaggcagcaaaatttcaagaaacaggtgaggttgagcagcttggtgcaaccccatggggcctggagttggagctcaacagcaatggatttcagagaccaccctgaaactcccagtaaaaaagacttgggagacatgttaataaactcaagcatttgatcgacccaaaaaaaaaaaaaaaaaa

SEQ ID NO: 236835 - DNA, 745 bp, Homo Sapiens
  misc_feature (14)..(14): n is a, c, g, or t
aatcagaatgatcnaagggtcaaaccactttcatcccttaaaatatagggactaatatttctttttcttttttttaaaaaaaacatttcttctgtggcttagaaatgtgccagtgtgttcaaaacatttacaccaatttcaccagatttaggacctattaaaaattcaaacaagtttctttttttttttttttttttctgtgtaacagggatttttaaataacggactatatgcattcttttgttatttcacacttcagttaaagtgataacaatggtaaactgtgatcattatcagactgactgaatgctttctgatttccagtgagtgatctagttctacgtattacacaggtgtaatatctgtgagtgtaaataactggaactgtacactgattaacatgacagtttctcttttgttgttcttatctgtactgtattatagtatgtgggtataaatatctacaagtatacacacatatgtacttgtattccactattgtaacctgaaagaaagactatgtattcccttttttaattccgtactggtatttgtgttatttaaaaagcaaaattctgctctatttagttgtataatattagaggatactttgctgtgcacaattccaagtgccttagaacattgtttagctttcctaagtatatataaatgcatatatgtataaaattgggaaaagttacctcaataaaatcattgggaaatccccaaaaaaaaaaaaaaaaaa

SEQ ID NO: 236836 - DNA, 738 bp, Homo Sapiens
  misc_feature (38)..(38): n is a, c, g, or t
actccgactgcagtgcctggccaggggctctgctggantcaaaggacttggcagagtgtttagaattatggatgacgataataatcgaacccttgattttaaagaatttatgaaagggttaaatgattatgctgtggtcatggaaaaagaagaggtggaagaacttttccagaggtttgataaagatggaaatggaacaatagacttcaatgaatttcttctcacattaagacctccaatgtccagagccagaaaagaggtaatcatgcaagcttttagaaagttagacaagactggagatggtgttataacaatcgaagaccttcgtgaagtatataatgcaaaacaccacccaaagtaccagaatggggaatggagtgaggaacaagtatttaggaaatttctggataactttgattcaccctatgacaaagatggattggtgacccctgaggagttcatgaactactatgcaggtgtgagcgcatccattgacactgatgtgtacttcatcatcatgatgagaaccgcctggaagctttaagcacatgacctggggaccaggccctgggacagccatgtggctccaaatgactaaatgtcagctcaaaaaccagaatcgtatttgatttcacactcatcctaatgtttttttctgtgtcaaaatattgcattttctggggccaaaaaacaggcagaaataaaagacattgagtagccaaaaaaaaaaaaaaaaaa

SEQ ID NO: 236837 - DNA, 726 bp, Homo Sapiens
catcattttaattgaaattaaagcaaaagtctaactcttttccacagcaattagaataagtaccgtagtgtaacttctcacattcagtcatcattgcagccagcatttttactttatcttcatgttttcacaaatgatatcacctccttgggaaactgttagttaataccttacctttagaaaaggcatagtaatcatagccgtcaggttttctgatgttgggcagtgatatagctgaggtaaccacatttggaagtcctctccacagtatactcactttaacttcattatgaaggacacctgtaagtggcatgtttaataaaagataccagattaaaaggcaatgtactatcttggaaagagccagacatctgagttttaatctcagttttagccctctgatgtagaactattgagggttatagactggtatataatgttcttggtaagaagtacttgataaatagtattggttataactaacaaacctgaacaaactgctttacttacccacaaggaaaaagaaagtattggtctttggttattcactaaggcaagtggatgagtttttcatcagtaagcttaaattattagggctgtttgatcagtatccatatttcataagccttactgtataagaaactgtattacatctacttatgtttaaggatttttttaacacaataaaaatgttacctttgtcttggtaaaaaaaaaaaaaaaaaa

SEQ ID NO: 236838 - DNA, 730 bp, Homo Sapiens
  misc_feature (23)..(23): n is a, c, g, or t
  misc_feature (53)..(53): n is a, c, g, or t
  misc_feature (64)..(64): n is a, c, g, or t
gggcaccgcgggccatgtgtgtntgcatgaggaactctttagtggcagacacntaagagacggntgcggtcaccccacgcctccgcggctcaggagccgtcctgggtgcataggaccagtttctgtgacttttctccagttgggcatgttgacagacatgtttcccctcctcccaccctcattttctggtcctcgcgactgagagccaggggcgacatcatgaccttctgtcccggccgccttagccccgggcacagggaaggcagctgggccgtttctgtctgtgtcccatcctgctgtccttctgtcctggatgtttcatgggcccggggccccccagggaagcttacccctcctgtgctgggtggaggccacgggacacctcaggtgccacccaccttggccctaaaacagccaccaggaaagcagccggagagccggacagcaggcagcctgtctgggttcctgaggcctgggggtggcagacgagcccacggcgccgtggtcccagcagcagggttgtcagtcggagcatcctggggctccctggctcctggccgtctgtgaggtaggcgcagtaccgtgtatcgtaggtagcagtaggaacgggggccgccgcggccctgcagccgctcatggcggtgaggtgtgtgccaagcccacccggggtgcagggcgtgacgtgtggggaataaataggcgttgtgacctcaaaaaaaaaaaaaaaaaa

SEQ ID NO: 236839 - DNA, 647 bp, Homo Sapiens
  misc_feature (35)..(35): n is a, c, g, or t
ggaggctgcacctactgaggatgtcggcggtcggngactttacctgctgggacctgctcccagagaccttgccacactgaatctcacctgctggagacctcaccctggagggccctgggccctggggaactggcttacttggggccccacccgggagtgatggttctggctgatttgtttgtgatgttgttagccgcctgtgaggggtgcagagagatcatcacggcacggtttccagatgtaatactgcaaggaaaaatgatgacgtgtctcctcactctagaggggttggtcccatgggttaagagctcaccccaggttctcacctcaggggttaagagctcagagttcagacaggtccaagttcaagcccaggaccaccacttatagggtacaggtgggatcgactgtaaatgaggacttctggaacattccaaatattctggggttgagggaaattgctgctgtctacaaaatgccaagggtggacaggcgctgtggctcacgcctgtaatcccagcactttgggaggctgaggtaggaggattgattgaggccaagagttaaagaccagcctggtcaatatagcaagaccacgtctctaaataaaaaataataggccggccaggaaaaaaaaaaaaaaaaaa

SEQ ID NO: 236840 - DNA, 760 bp, Homo Sapiens
  misc_feature (40)..(40): n is a, c, g, or t
  misc_feature (89)..(89): n is a, c, g, or t
ctttagagggctattgctactggactttctgcaatgtctntgggtgtgccctcagagcctgcaacaagtgtatctggatatactctatntgtaaagttaggcctctaaagaaggccacaatgaagcaactaaaaatctgatgattaagggagtcaatcaagctgatgccatttttagtttaaaaatgaagcagagctctaaactcatagatgggttttcttactgggaagaagattggctctctgaagacagcttccaatgaggaatgtattgaacaatggcagcactgtctggccacccacaaactgttacagatgatccagttacactgttgcataggaacccaagtggaaagaagacagagtccatgtctgtccatggctccagctacagaaaggatagtatgggaacattacaagggggatacattactgtggaaagttctgctagagttagtcttgagagtatctgtaaaatacaaatagatgagcaatccctgtggaatgctgcctggatattttcagaaaagctctgaacttgatgtcataataccaacaccgtgaatatcgtgtgtggccttaaccaaggaacagaagccctttagaacttagcttcctcacttgggagctgggactgactgcatttgccctttgtataaacccacccaccccatagggttcactgggagcataaagcaagatgtggtgaaagtacttctaatataaattgcaacatcagtatgaaaaaaaaaaaaaaaaaa

SEQ ID NO: 236841 - DNA, 759 bp, Homo Sapiens
  misc_feature (54)..(54): n is a, c, g, or t
gtttcattcattgttttttttttttaattattttaaatgagattttgttttttntaaatgcaatatctctgtatacagactggctgggccccaccccctgcgtgtggccctcccacagtattttgtgcaatgaagccctgctcccagcctttcagagacagggacacagcccctatttggaaccctgatcatcaccagaccctgggattggctatgggaaagcatgccacagccactcgccttcctacccccgcccgccatccccagttgcagggggatctggggactaccagagactctgggaaatggacaaggtggggggccccactctttctctcctgcagtcccgtagctggggcctccttccttctcagggtctccccagcccagtccccttgctcccatcccactcggtgctgttgggtaggggccctgccaggaactgaccagctcagcgaggagccataatgtgcatatgtgcacaagcagggttgggggaggggggtgtgaggggttgtgcccaggtgttgccccctatctcctggggagggtgaggcagggcagggacagtctccagggtcagtccctggatgggtggttacctccccttcctccaccctaagccctggggccctgaaatggggtgggagggcaggggtgggagccctcctagtgggtttggggggttgggttcctgaatgcaccataatcgctgtatgaaatattaaaaagtctaaagtgaaaaaaaaaaaaaaaaaa

SEQ ID NO: 236842 - DNA, 637 bp, Homo Sapiens
tggtaaagtcatgattttgcagttgataacactgacttataactctgtttatcaatgtctcctatattcaaagcccctgcagtggtatttgtgtctcgttgcaaatttctttcagcggaaagcttgcacaactttcgttgtgtctcagaattctaaccttgttatttaagacaagctgctctacccatttaggatataactttgtaaagaaagtgtaaaccaaatgattcaatgtatgatgaagtttatgtgtaaatccttggtaatgctagaattctgggagcccagaagggttgaaagagaaatgaaacttgcgtgagtcccattattttacgcatgtatgtgcagatacgttctacccacacgtgtgcgtgcacatggctgtgtgcgtgcaccaaagatggactgctttccatgtgtccttttgactttctgcacgtgtcactgcggtgcagtctcttagcagacttcaggcccaaactgtattcttcactcaggcaaaattgaaaagtggaataattctaaattacttctaggttatacttttacctccctgaaattgtagttgtcacttggagggcaaaatatttattgaaataaaattttctgttaaaaattcaaaaaaaaaaaaaaaaaa

SEQ ID NO: 236843 - DNA, 699 bp, Homo Sapiens
cgtgctggccccactgcccacgagctggccgtggctgccgtggacctgctgaaccgccacgccaccgaatttgatgcagcccaggtgctgcagatgctgcctgacacctggtcagtgcagctcctctgcccattcctgatgggggccatgagggacagcatccatgccaggaggaccatgcaggtggctctcggcctggccaggtccgaaaacttaatctacacctacgataagatgaagttgaaaggaagctcaatccaactctcagacaaaaagctttgtcagatatgccaaaatcccttttgtgagcctgtgtttgttagatacccaaatggtggtcttgtgcacacccactgtgccgccagcagacacacaaaccccagctcatccagtcctggcactcggacttgaaaagcttggcccaagggtgcgaggggaactccgagttctttctgagcctgctggacatgaagagcagatgaccaccatgctctgtgtcagccaggacgaagggagacatctgggtgccagggagccttccgtccatacgcaacaaggactcctcgctgctgaccaggctctatgaatgtacatggaaaacccctaaaaatccccaaaacagaaacatacaagagttcacctgtccaggtacatagtaatccaagacagaggtctactttgaaaaaaaaaaaaaaaaaa

SEQ ID NO: 236844 - DNA, 725 bp, Homo Sapiens
  misc_feature (72)..(72): n is a, c, g, or t
tgatgagctcattgagagaaccatgatggtcaattgccatgcacacttctggaccactaaggcttttcttcntacgatgctggagattaatcatggtcatattgtgacagttgcaagttccttgggattgttcagtactgccggagttgaggattactgtgccagtaaatttggagttgtgggttttcatgaatccctgagccatgaactaaaggctgctgaaaaggatggaattaaaacaaccttggtttgcccttatcttgtagacactggcatgttcagaggctgccgaatcaggaaagaaattgagccttttctgccacctctgaagcctgattactgtgtgaagcaggccatgaaggccatcctcactgaccagcccatgatctgcactccccgcctcatgtacatcgtgaccttcatgaagagcatcctaccatttgaagcagttgtgtgcatgtatcggttcctaggagcggacaagtgtatgtacccctttattgctcaaagaaagcaagccacaaacaataatgaagcaaaaaatggaatctaagaatctttttgtatggaatattacttctatcagaagatgatcaagatgtttcagtccagtgcacatcagcattgctgacattttatggattctaaacttgtgttgtttcttttttaaatcaacttttttaaaaaaataaagtgtaaattaaccgacaaaaaaaaaaaaaaaa

SEQ ID NO: 236845 - DNA, 809 bp, Homo Sapiens
  misc_feature (23)..(23): n is a, c, g, or t
cgagcgcggcgctccgagagctncaggagaagcaggctctgatggagcagcagagacgagagaaaaggcactgcaggagtggagagagcgagcccagagatgagggaagaggaaggaagagctcagcaaactcctgcctccgcggaggagcatggtggcatcaaagattccctctgccacagatctgatagataacaggaaagtaccactgaatccgcctggaaaaatgaaaccaagcaaagagaaatcgccacaagcaagtaaagaaatgagtgccctgcaggagagaaatttagaagagaagataaaacagcacgtcctccaaatgcgtgagcaaagaagattccatggccaggccccactggaggagatgaggaaggctgccgaggatctggaaattgccacagagctacaggatgaagtattgaagctaaaattgggattaaccttgaacaaagatcgtcgacgggcggccctcactggaaacctttcgcttggcctgccggcagcacagcctcaaaatacattttttaacacaaaatatggagaatcaggaaatgttcgcagataccagtgacaccaggtggctggactgatggagacgtcttcagacaggagccgctcagtcttctttcccgggcgtcgcctcctgtgtggtgccggaagagcgccaggttcagtgttaccctgagggctgatttcgcacagcctgttgttttccttagacaggtccacgtccctctcctgaggctgtggaagatttcagccgtattaaaagaaaggacactgtgaaaaaaaaaaaaaaaaaa

SEQ ID NO: 236846 - DNA, 660 bp, Homo Sapiens
cgcagccgctccgtgcactgtctctgcccccagaggaagccctgtccatggttcctggtgcacggccacaggcctgccttgaggccaccacatctggtgtctagaacagctgcgggccccacttgggcagaaggaagaggtgctagctgctgcccctgcctgctgtgaacacctgcccagcccttccttgtctgctgaggtgctcagaccagagtgccattaaataccaactgatgtcacggagcggacggtgcattgccaaggactcacagctgtgggctcccttccagctcctcccactttcttggctgggtcttctgaggcctacgtggaatgaactacacatgtggcctcatgcccaagggtttgttagatggcctctgactctgtgggattcaacttgacttttttgccccaggaggctctgtctggaaacaggcttagctttagtgctggggtgggacctgccctgtgggccccagggaggggacagtgggggtgaggccctgaggctgtccagggtctgagctctttgcctccaacctgcttctgccccaaaaggaacaggctgttggtggcaggctcctcccggggagctgtactgtacagacccaaggtgtaaataaacagtttgctcttctcaaaaaaaaaaaaaaaaaa

SEQ ID NO: 236847 - DNA, 723 bp, Homo Sapiens
  misc_feature (63)..(63): n is a, c, g, or t
tcccaagttccactgctgcctcttgaatgcagggacaaatgccacacggctctcaccagtggntagtggtgggtactcaatgtgtacttttgggttcacagaagcacagcacccatgggaagggtccatctcagagaatttacgagcagggatgaaggcctccctgtctaaaatccctccttcatcccccgctggtggcagaatctgttaccagaggacaaagcctttggctcttctaatcagagcgcaagctgggagcacaggcactgcaggagagaatgcccagtgaccagtcactgaccctgtgcagaacctcctggaagcgagctttgctgggagagggggtagctagcctgagagggaaccctctaagggacctcaaaggtgattgtgccaggctctgcgcctgccccacaccctcccttaccctcctccagaccattcaggacacagggaaatcagggttacaaatcttcttgatccacttctctcaggatcccctctcttcctacccttcctcaccacttccctcagtcccaactccttttccctatttccttctcctcctgtctttaaagcctgcctcttccaggaagacccccctattgctgctggggctccccatttgcttactttgcatttgtgcccactctccacccctgctcccctgagctgaaataaaaatacaataaacttactataaagataaaaaaaaaaaaaaaa

SEQ ID NO: 236848 - DNA, 774 bp, Homo Sapiens
gcttcagggcttcaggctgcttctgctctgtgtctgcccaggctggctgagcgggtgatgggtggacagaagggctcaccaaggattgtggacatagggtaggccctggtaccacgggtttcaggctgttatcacttcccttgtaggaacatagccagaagcagatgagccagggtagagggctggcccctcctctcatcttcccttcagtcttaaattgtctccagcgatgggaagaggccagggactgtaacccttgtgctgtgtattctctgagcctctgctcactctcagggccaagcagctcccaagccggggccctctcttggccaaaatctgaggagcagtctaggttacaggctttttggtaggtaggttctggctgcctgttaatgcagttaggccccctgattaggtacagtgagaaacaagctagaacaaccctggcccagaagactgtccactccagcaagatccagggatgatagccttgcagggccactgggagtttgtgcccaagcttctccctcttctctccccagggggcactgggactggtccctgccctcatccttagcctgggccttccccagaggtattaaagagaagtatgattcctctgtcttcagttcttttcaggggcatcctgcccatagtacccagttcccaaggggcccccagtcacgtggtgaagcctagcactcatgcagctcttagggaaccaaaaaccagcactgaaataaagctgaatgactgacaaaaaaaaaaaaaaaa

SEQ ID NO: 236849 - DNA, 808 bp, Homo Sapiens
acacacagactacagccagaagcccatggagcagggatgtcacgtcttgaaaagcttattagatgttttacaaatttaattttgcagattattttagtctgtcatccagaaaatgtgtcagcatgcatagtgctaagaaagcaagccaatttggaaacttaggttagtgacaaaattggccagagagtgggggtgatgatgaccaagaattacaagtagaatggcagctggaatttaaggagggacaagaatcaatggataagcgtgggtggaggaagatccaaacagaaaagtgcaaagttattccccatcttccaagggttgaattctggaggaagaagacacattcctagttccccgtgaacttcctttgacttattgtccccactaaaacaaaacaaaaaacttttaatgccttccacattaattagattttcttgcagtttttttatggcatttttttaaagatgccctaagtgttgaagaagagtttgcaaatgcaacaaaatatttaattaccggttgttaaaactggtttagcacaatttatattttccctctcttgcctttcttatttgcaataaaaggtattgagccattttttaaatgacatttttgataaattatgtttgtactagttgatgaaggagttttttttaacctgtttatataattttgcagcagaagccaaattttttgtatattaaagcaccaaattcatgtacagcatgcatcacggatcaatagactgtacttattttccaataaaattttcaaactttgtactgttaaaaaaaaaaaaaaaaaa

SEQ ID NO: 236850 - DNA, 796 bp, Homo Sapiens
ggggcagcccagtgtcctgcgctgtgggctggccgtcctgaatgtcttggagaaggagcagctccaggatcatgccaccagtgtaggcagcttcctgatgcagctcctcgggcagcaaaaaatcaaacatcccatcgtcggggatgtcaggggtgttgggctcttcattggtgtggatctgatcaaagatgaggccacaaggacaccagcaactgaagaggctgcctacttggtatcaaggctgaaggagaactacgttttgctgagcactgatggccctgggaggaacatcctgaagtttaagcccccaatgtgcttcagcctggacaatgcacggcaggtggtggcaaagctggatgccattctgactgacatggaagagaaggtgagaagttgtgaaacgctgaggctccagccctaagccagccctgctctgcctaagtgtactccagaagaaactcatctcatccaaatacacgctattgagaaggcgagcctgacctccctcttacagataaagtcagctttcagaggctcagggtgggggggcctgcccgaggccataatgctacccaccccctcctcctaaccactggtctgttggaataacccagatgtctgcatcccctcaagtcagtcaatttcctttctgtccactgggggtggaatggggtagggtgggatactttaaagtgctcctgcttaaataaattagaccagaccagtgtatttctaaagaaaatcctgacatgcacacccattaaaaatagtacattttaaaaaaaaaaaaaaaaaa

SEQ ID NO: 236851 - DNA, 802 bp, Homo Sapiens
  misc_feature (32)..(33): n is a, c, g, or t
  misc_feature (130)..(130): n is a, c, g, or t
attccattcatattcataagagcatattatcnntgcattgaaaatgcattacttttgcacattgatattaactgttgtccaacaaataagtatcggagtacgtgagaatattcccagcccagtgatgatntggttctgaggctgatgtgagaaagctgatgtaaaaaatgtatgcatattggcttaccttactcaatttaaagtcaaaagccaacagccaggagcagctcaggtacttcagatgtgcttaatatggagtgaaaactggaccagaggtggaaagatgtatttgccccagttcacttcaaagcagcaaacgttgtttaagcattttagtttgaaccaggcattgtgttaggaatccagggataaagatgaatgaaatgtatttctgttcttcaggagttcacattctagcatatgccttttttcccccagtcatgcactctttttagcagtcttatatgtactagaaaagattttttaaagtttatttaaagctgtgtagatgaaggcttgatctaaaatagtataaggtctccagcttcagtaaaagtttttagtgtttacttaaattagtaatttctcactttctgtctggttaaaatgtcttaaaaagtagaattttcttctttaatccgtttagtagttacctcccttttacttttcaaattcacaaaattacatttctcataaattgtatagtatttaacttataatagttaatatttgtctttttaagatgactgtacatgtaagaaaaaagcttattaaaaacttgatcaaagaaaaaaaaaaaaaa

SEQ ID NO: 236852 - DNA, 799 bp, Homo Sapiens
  misc_feature (35)..(35): n is a, c, g, or t
tgaccagctagctaggagagctgagacgccagtcntcaaatggcgttcttaccaatagtctatttccagactactggaaacgttggggttcttcctccagtgacagcagcctcagtagctttcctgggctccaggcggctggctgcacaccctgcctgccatcacccttgcccctgcttgtcctggaccacttttaaaggggaagtcccttatttggaagagagaaaggatgtgtgtagcacacactcatcatggattgctcagagttcctttagggcagagctgagggcctgggatccaggaaccagtgggattggatgggagaagaaggaagggggtggcccgtcacccccgcaagacttgcatccaggtagcctaaggactcctggtcactgggtagggtggctgctgagatgcaggtcggaagaggcaggggaaggctccaggcctaacttggagcatgtcactggccatgggggtgaggggacagactctgctctcactggctggcagccccaggagcctgttcccttgcctctcctggatgggttgtcagccctgtgtttcactgtgaccaattcattataacatttggatattactgaaaatgtaaggaagcaggaaaaattaactactttcattcagagatagcctctatcaatagtttgacatttttccctcttttacattgagatcataccctaggtactgtttagtatgcaatattttcattttcgcagtataataattgcacctgttaaataaagttttgtaaacatttaaaaaaaaaaaaaaaaaa

SEQ ID NO: 236853 - DNA, 772 bp, Homo Sapiens
ggcccaaagcacacttgatcttgtccccactccctgcccccatctcagatcaaccttcagaaagtcccggcttgttggcaaaggcacacattctgtgttactcttaagtttcattagaaattcaagtcctctggggccctgttcccttgtgggcttgtgcaactgactttgtttcttgtctgcctttctggaaccaaatccaaggaaattcatgggtttggggagacagcgatgggaacccagcagggcacaggatgctaggataaagctgtggcgccccaaaagtggcctgctctgccaacatacataaatacatacagtctgagcttgacactgtataatttggcccagaacaatatgtattttgagctcatttaggtgaatgactttggcattccatgtacccactaggggaagctttatcaggctgcatttgccttatgcagaagtatgcctttgttctgagaaatggcctcagaacacactgttgagctgtctcctttagtgagtgtcatcctctcatccatttcaaaagattgcagatgccgtcttgaagtcctgcttgtaagaaatgcaggggttgggaatggaggagatgacgatgtagttttgcttttagttttcccaaacctgtttacattttttaaaaatgtaaccaacccataattgcattttacttgtcgtggttcgatctgattgtattgtcgaaggactatttttgaacctgtccaaataaactctgcaaagtatttccacaaaaaaaaaaaaaaaa

SEQ ID NO: 236854 - DNA, 717 bp, Homo Sapiens
  misc_feature (64)..(64): n is a, c, g, or t
  misc_feature (79)..(79): n is a, c, g, or t
aaaattgacaaccagtatacttttcataacactgatattctgcccagtaagaacatgaaaactntgctgggtcttcttnttctgtgaatgtgagataatgtattatgggtctcttcttggagaaagtctcttcttttagcaccagtctttttgctaaccatgatgcctttgtgtaagtgagaaaaagacatcctacctggaccaattaactatgcaaagatgctgttttttactgggctggaaccacagtaggacatatctttgcctacccctgtgctgggaacccacttaaaatgcacaaactgggtaattgtacacagtgtccctgtccatggcccacatagcttttctacttttcctggatttagttgtgggttacttggcaaattgagtgatttttaagtggcatctagaactactcaggcctgttgtgctagctggaatacacagcaatgcgactcctactctgtctttcccaaggttgtataaacaaagttgtacttattgaaacatgtgaacatgaaactgaatgttgctttctttatctgaataactaaaacgtgtacttgatgatgataagtaatttctgtcataaaatctactaatcttgttgataaagtattgcttttccaaataggcatataaaaatgatacaattttgttttctttaacccgtgaaaataaagatgaagactccctaaaaaaaaaaaaaaaaaa

SEQ ID NO: 236855 - DNA, 700 bp, Homo Sapiens
  misc_feature (29)..(29): n is a, c, g, or t
ggagtgaatttttaatactctgtgtaaanagaaaaacattccatcttgtaggcagtgttcctcagtaaaaatctttgttgcattttcccatataaatgaatcacccttattaaaacaggaggagggagggatttgtggtgacctaccgctgccctccctttctaagagaagaggaggccatggggtatgataactaaatgaacatctctggaagttcctccgtctgatatgtgtattctgacataacagaatttcccaagacttctttgaggaaggctgtccacgcttcaggcaaagtttacccattattattatgattttgaatattccttgttcattacagtccagaaaatctgcagaagttctccatgttcagtggttgaccagaatctgattgttgcgctcaattaaagtgctttattatttagctaaaacaacttatatggaagttaattatttcaggaaatacataataagaccaaaaaaatcactggataatatgtagatatattttagttccattactattaatagcaattagataactctccctccccccattgaggtgagaatgggctcctagatacttggtggtcaatagaactgatttgattaactttcatttaactgtggttattgttacatctactgattttttcaaataaaaatttctagaaggctcaaaaaaaaaaaaaaaaaa

SEQ ID NO: 236856 - DNA, 860 bp, Homo Sapiens
caccagatgggcggcgggcagcaggtgtccgcctagcagtcactagactggagggtgtcgatgagcccacccgtgcagtgcccacgggagacatggaagacctcccttgtgggctgtgctcagcagcattgggtataagagccgccctgtcgacccaagcgtgccctttgactccaagcttggggtcatccccaatgtggagggccgggttatggatgtgccaggcctctactgcagcggctgggtgaagagaggacctacaggtgtcatagccacaaccatgactgacagcttcctcaccggccagatgctgctgcaggacctgaaggctgggttgctcccctctggccccaggcctggctacgcagccatccaggccctgctcagcagccgaggggtccggccagtctctttctcagactgggagaagctggatgccgaggaggtggcccggggccagggcacggggaagcccagggagaagctggtggatcctcaggagatgctgcgcctcctgggccactgagcccagccccagccccggcccccagcagggaagggatgagtgttgggaggggaagggctgggtccgtctgagtgggactttgcacctctgctgatcccggccggccctggcttggaggcttggctgctcttccagcgtctctcctccctcctggggaaggtcgcccttgcgcgcaaggttttagctttcagcaactgaggtaaccttagggacaggtggaggtgtgggccgatctaaccccttacccatctctctactgctggactgtggagggtcaccaggttgggaacatgctggaaataaaacagctgcaaccaagaaaaaaaaaaaaaaa

SEQ ID NO: 236857 - DNA, 795 bp, Homo Sapiens
  misc_feature (94)..(94): n is a, c, g, or t
tgagatatcaagtaatcagaagtataattaaaatagaacatgttggaaaatcccaacatttcctgttatgccgtcatacctccggtgttcagtntttactcaaaagttcccagttcttaggctgaaaaacattcaagtaaaaatgtagcatagattacactgaaatattttcagtatcaatgatttaatatccacacaaactattaggaatggtatctggaacttgttacaaggtcagataaactgttacagaattttagaaataattatctctgtatgtgactgtgtattacatataaaaatgaatttttcaggaaaagtgcactttaaaaatactttctcttgctagttttttaaattgatgaaatagcctgtgctgctttggaatgcttattctttctttgatgaaaatacggtcattgattatgataattttaaaaatatctatttctgcatcgctgcaggatttcctacacttttctgttcctcatccctcttttatgtgtgcttggctcagttgcctgttacacagcctctgccttggttttgtgtattctaagataatttataaacacagatatttacagtgaagttcttccttttgaaactaatcttattcttttattcctctctctaaaaattggttggccatgctcactaatgattttttttcttaacaataagcatttcttggtattggtagatttggattgcatggtaagatgactgcccattttcaccatgtatacctttgtcaaataaagatttctgatctttaaaaaaaaaaaaaaaaaa

SEQ ID NO: 236858 - DNA, 781 bp, Homo Sapiens
  misc_feature (35)..(35): n is a, c, g, or t
  misc_feature (54)..(54): n is a, c, g, or t
  misc_feature (80)..(80): n is a, c, g, or t
caagccatggaagatggaaaagggagatatgaccntgaatgtgactggtgtctntgggggtctgtatgtatgaaatgctntacggagaaacaccattttatgcagaatcgctggtggagacatacggaaaaatcatgaaccacaaagagaggtttcagtttccagcccaagtgactgatgtgtctgaaaatgctaaggatcttattcgaaggctcatttgtagcagagaacatcgacttggtcaaaatggaatagaagactttaagaaacacccatttttcagtggaattgattgggataatattcggaactgtgaagcaccttatattccagaagttagtagcccaacagatacatcgaattttgatgtagatgatgattgtttaaaaaattctgaaacgatgcccccaccaacacatactgcattttctggccaccatctgccatttgttggttttacatatactagtagctgtgtactttctgatcggagctgtttaagagttacggctggtcccacctcactggatcttgatgttaatgttcagaggactctagacaacaacttagcaactgaagcttatgaaagaagaattaagcgccttgagcaagaaaaacttgaactcagtagaaaacttcaagagtcaacacagactgtccaagctctgcagtattcaactgttgatggtccactaacagcaagcaaagatttagaaataaaaaacttaaaagaagaaaaaaaaaaaaaaaaaatgttaccattctgatgttgggcggccgc

SEQ ID NO: 236859 - DNA, 745 bp, Homo Sapiens
  misc_feature (43)..(43): n is a, c, g, or t
  misc_feature (123)..(123): n is a, c, g, or t
gttaggaaaaccacaaacggagcccctgaaagcctcacgtatntcacagagcacgcctgccatcttctccccgaggctgccccaggccggagcccagatacgggggctgtgactctgggcagngacccggggtctcctggaccttgacagagcagctaactccgagagcagtgggcaggtggccgcccctgaggcttcacgccgggagaagccaccttcccaccccttcataccgcctcgtgccagcagcctcgcacaggccctagctttacgctcatcacctaaacttgtactttatttttctgatagaaatggtttcctctggatcgttttatgcggttcttacagcacatcacctctttgcccccgacggctgtgacgcagccggagggaggcactagtcaccgacagcggccttgaagacagagcaaagcgcccacccaggtcccccgactgcctgtctccatgaggtactggtcccttccttttgttaacgtgatgtgccactatattttacacgtatctcttggtatgcatcttttatagacgctcttttctaagtggcgtgtgcatagcgtcctgccctgccccctcgggggcctgtggtggctccccctctgcttctcggggtccagtgcattttgtttctgtatatgattctctgtggttttttttgaatccaaatctgtcctctgtagtattttttaaataaatcagtgtttacattagaaaaaaaaaaaaaaaa

SEQ ID NO: 236860 - DNA, 656 bp, Homo Sapiens
cgtattttcatctgcattcagcttcttactctgggttgtactcgagtgtatttctttacaaatgcccttgtaattaccactctgaagtctgctgactgtgtctcttgaacatacttaggatattctgcacattatggaaaaaggtaaattttagaagtttctgctctactaactgtagatatttatgactctgcgagttatctatttttataaccacctgtggtccattgttcattttaattcacatttcttatgaagtatggtaacagggagggagacacctagattagcagctcaatttgtactacttcagccaatctgtgaatgtaaaaactacactgttgccttgctaggatccaccctcctataatatggaacaaatatctgaatgaaatccaccctaggagacggagtcaaactaaacttgtggtttttcatttaacttttgactacagcatggccccatggcatccacaccaagagggtgttgtgatgaggtgccggtgtgcaaagggaactttagtttttccactggttcttatctgctagccttttacatacatgtgtactatatttgtttatagactgtaggtggatatataatttaaaagcttgatttaataaacatttaaccccctaaaaaaaaaaaaaaaaaa

SEQ ID NO: 236861 - DNA, 726 bp, Homo Sapiens
  misc_feature (44)..(44): n is a, c, g, or t
  misc_feature (57)..(57): n is a, c, g, or t
gcatgctggcctggaactagagcctgggtctcctcttgcttttnccagctgtctgcncaggtagctccccaaggcaggcatggaggcagagctgctttgggttccagggggcaggtttgggctggggcctgctgtgtgaccacagtctcccatcttggattgaagctacatcgctgtgtgcatctaactcttgattcacggtctgaccgacgccttggtttctggagaactgccctcgtttatggaagagtcactgtcatcaggagccatcccagggagaggctcagtgggaagtgtaaaggtggagcaagtaaaccggctccagaagagaaggcgaagaaggactatttctgtttagatttgcttaaccgcattttcactttcttgggaacccctgatggagttcaaggtcatagaagagaagaaatcagacactgctacaggactcttgctcttggttcagattattcaatgggaggggagaagagagtagtcgcaagtgattgttgtagattttgtctcagctttttgtttttctttgtatcaaacctgttttgagatcatacactgttacagagaaagagaggaggcatattataaacgtgtggacttcagtgttattccttctcttcaaaatgatgttccaggtgtctagagggtgaggtatgtcatttacatgaaggttaagaataaaacagaaagtgcctcaaaaaaaaaaaaaaaaaa

SEQ ID NO: 236862 - DNA, 709 bp, Homo Sapiens
cttccagcacctcctccgagtagcctatcaggatcccagcagtggctgcacctccaagaccctggccgtgcccccagaggcctcgattgccaccctgaaccagctctgtgccaccaagttccgagtgacccagcccaacacttttggcctcttcctgtacaaggagcagggctaccaccgcctgccccctggggccctggcccacaggctgcccaccactggctacctcgtctaccgccgggcagagtggcctgagacccagggggctgtgacagaggaggagggcagtgggcagtcagaggcaagaagcagaggggaggagcaagggtgccagggagatggggatgctggggtcaaagccagccccagggacattcgggaacagtctgagacaactgctgaagggggccagggtcaagcccaggaaggccctgctcagccaggggaaccagaggcagagggaagccgggcagcagaggagtagcttgaagtggccagaagggtcattcggggcgggagaccctgagcctgctgagaaatccttttagcgccagcaagccccacccagggccctgtcctgtgtctgccaccacctttgtctgatacttgtttccagggaagctgggggaactgccacatctgaggaactggaataaagatgagggggcttcgggggcccccagactgtgtgaaaaaaaaaaaaaaaaaa

SEQ ID NO: 236863 - DNA, 656 bp, Homo Sapiens
ccagaaaggccagccgcaagccccccagggaggagagctctgccacctgtgttctggaacagcctggggcccttggggcccaaattctgctggtgcagaggcccaactcaggtctgctggcaggactgtgggagttcccgtccgtgacctgggagccctcagagcagcttcagcgcaaggccctgctgcaggaactacagcgttgggctgggcccctcccagccacgcacctccggcaccttggggaggttgtccacaccttctctcacatcaagctgacatatcaagtatatgggctggccttggaagggcagaccccagtgaccaccgtaccaccaggtgctcgctggctgacgcaggaggaatttcacaccgcagctgtttccaccgccatgaaaaaggttttccgtgtgtatcagggccaacagccagggacctgtatgggttccaaaaggtcccaggtgtcctctccgtgcagtcggaaaaagccccgcatgggccagcaagtcctggataatttctttcggtctcacatctccactgatgcacacagcctcaacagtgcagcccagtgacacctctgaaagcccccattccctgagaatcctgttgttagtaaagtgcttatttttgtagttaaaaaaaaaaaaaaaaaa

SEQ ID NO: 236864 - DNA, 777 bp, Homo Sapiens
  misc_feature (9)..(9): n is a, c, g, or t
  misc_feature (53)..(53): n is a, c, g, or t
  misc_feature (63)..(63): n is a, c, g, or t
tccattccntgcaactgaagatctaagggaactggtttctcagtatacaatgngaatggttgngaggaggtaaagagtagaagacagtatcaagaatccagagcccagcacctgtagtcctaactattcagattccttgagcccaggagtttgagtccagcctggacaacatattgagacccccatctctctaaaaaaaaagagaaagaaagaaggaaagaaaaaaagaaagaaagaaagaaagaaagaaagaaggaaagaaggaaagaaagaaagaaaagaagattgtagctagggggagagtaggtgaaaagatgaacaacatgaccgggaagatttcctaatctcaccacagcctggctctaccttaagtctttaataaaagcttgactgaaggtaccaaggtgtgctgaagtggaagcaaagttctccaaagtccagcatggtagacatcagtggtggtaaccaaggacagaccccaaggcaaggtgaacctcaaaaatggaacctcaagtctatgcagtccagctgccctccccaccagaaagtccttgttccagcccaacatcagtgcctctgagtttgtttactagaaacaaaggaagaatttccttgtaaaaatatagacagagtagtccctggctttctcctcttgcaggaaggatggattctcccattccataccatctttcccccacactggccccagaaatacttaattcaactatgtgaaaataaagattgtttttggtttgagggaaaaaaaaaaaaaaaaaa

SEQ ID NO: 236865 - DNA, 728 bp, Homo Sapiens
  misc_feature (33)..(33): n is a, c, g, or t
  misc_feature (38)..(38): n is a, c, g, or t
gagcaccgtcctggagcgtgtgaaagcagaggngattntggatgtcttccagactgtcaagagcctgcggctacagaggccacacatggtccagacactggaacagtatgagttctgctacaaggtggtgcaggagtatattgatgcattctcagattatgccaacttcaagtaagcggcaacaagggtccgtggaccaggaggattgcctttaatattttgtaatattctgttttgttaatataccccaaattgtgtatatatcttataactgttttagaaattggtacataggcttctattacctattaggtggaaattttatatgtaaatgtgttagcactgatagtcctttttccaatgttttattggggaattaaatagtgtgatgtttggattgatatcgtgaaatcctcagccgagaaattgggctggattgtgctttggttaatacatctttccctaaagaagataaacacaaaatccattccaggtagctcggcaccaactaagaaaaaaagcacaaagttctcagagctctcgaggaaagtggttgtccccgtaccaccatgcactgtaaatatccctcccctctctccctggtcccctcccccatccccaccactgatatcatggggagtaataggaccagagcggtatctctggcaccacactagggactatcaggtaataaaagctttgactccctgaaaaaaaaaaaaaaaaaa

SEQ ID NO: 236866 - DNA, 661 bp, Homo Sapiens
tctgccatccgtggccatttgcaaagaccccaaagacccctgttctggttccctctctcccccatgaaatcctctcacacacatgtacatgcgaacacacacaacacgcacctcgtgagacccgggacctgccccggacccccagttcctgggttgaacgaccacatcatgccacggtgcttgctcaggggaagccacgctccctctgtggggcctgctggggcctgggagccccccactgagcccacaatgccacggaaatccttgttggctgcccccgagaggggccttcccagctgggaagagctcagagctgacagctgcctcctgccatgtcaaggccccccaaagagcctcaggggctctggggccctggagggtggggttggggggtgggactctcctcccccactcctgctccctctcccttttcactgttgctttctatgtatagctccctagacctttcacttttttaaaaacgcgttttgtgtagagaataaggaacgtggatctttttattttgcaatcctgggccagctagaagccaggagctgattgaccttttaacttttttcagtggccacattttggttatcgatgtacctagaagtatgtaaattagattaaatttctcttctggaaaaaaaaaaaaaaaaaa

SEQ ID NO: 236867 - DNA, 728 bp, Homo Sapiens
  misc_feature (19)..(19): n is a, c, g, or t
ggggcctggaggagcccgngtcaggctggggaggaacagaactgggccctcccagagcacctccgcttcccccctgcttccccaggtctctatccagagagagtccccaggtacaacaaatgctaattagatgacagcaaattaaccccctggaggcttctcctggcagagcctccctggggccggggcaggctgtggatggggcggagcagggcagaagatggactgggggagggggcagagagaggagaccaaaatgaggtggtggcacagggtggggcaaggagatcctctctaaggcctctggggtctttgcctggccccatccctagggggcggggaggggacgtaaatccctaatctttaagcccgacttgaggctgagagcagctggaagtttgggtttggtggtttgggggccggggcagccaagctgtatggggcaggacagacagactaatgtagtgagtgtagctgtagctgaggcttaactgggagggatgccgagcttgctggaactactgggaccaagaagcggggtaccccacgcccctgcctgcactcctcgggggcgtggggcgtgccttgctccacccggactccctgggctgcgtcccacatccaccctcctgccccgtggggcaatttaacctttttcatgaaagttatttacaatgaaaagtttttaaaaataaaatttttaaaaatctaaaaaaaaaaaaaaaaaa

SEQ ID NO: 236868 - DNA, 804 bp, Homo Sapiens
cgaactgactcagttcagcagaccaccagtaccagactcagaattgtgatagaggagcattttgaacagtgccgtattgtgacatgctgtattggctactccagaaagtaggagtaaagatggaaaggagaaagaagcaacctctgagattccagtggtgtgtgggggcaagatctgatggaaactgaaaaagagaacgaagactaaacaaagagaaaggaaagagaagaaaccctaaatgggcaaaggaaagcacatcctgtttgcggagctttgaaatattggaaccatttctaattgctcctgtttttctgggtaacaccagttttctgtagttgccactaaagcagtagactcttgagtctcacttgtctctgagagagacagaagttagaaagttttgacttggcgattccgaaagtatgcctttgttggcacttaaatgtccagtgagacttcttggcaccttagagccctctgagatactgattattttaggttcttctccctactttcagatgttttcagcccaacactgggtgctctcttccactacagagaatcctgaagaaaagggaaggtgtttcccatgatggtgaatgtcactgccatgaattcctgaatctacctgctgctgggagtcagagtccaagcataacccgtgtagcataaaagcagcgctgtagccctattccagtctttttcgttaatgtccagagtgaacaacaagagttagtcaatcattaactgttgactgttgattctcataataaatgcagcataacgacaaaaaaaaaaaaaaaa

SEQ ID NO: 236869 - DNA, 579 bp, Homo Sapiens
tgaattttatttttacaaaaattttttaaattcatattttaaaatgtataccaaggcaaaaaaatcatataagctatatcataaatacaagagtttcaaaacatacaagagacatataatgtaaaaaaaaattatatatatgaagtccaatgtaatttataatacaaaaaaatacagcaagggaaaatgctttagaaatgctcatctgcaaactacaaaacaaaatcctcctcttgaccgactgcatgaactgccatgaaatttgcagctccatcatactaggtatctcttctttcttcatgttaccttgtctttcttcccatttttcttttaagacagggtcttgctatgtcacccaggctggactcaaactccagggctcaaggaatcctcctgtcttagcctcccaaggagctgggattacaggcacgtgccaccgcacctggctcctaatttctttttaagacaagggccattcaaggctttttaaaacctgatgtgtgttgttatactttataacagtcagtggcttttaattccaaaaggtaatactttatactctgcctacatgagatgagc

SEQ ID NO: 236870 - DNA, 505 bp, Homo Sapiens
caacctgggctttggtttcattttgttgttatcctttaaccttacctgctttccaagagagattttatgttttcttggttttttttttttgtttgtttgtttgtttttagggtagggtcttgtagaatgcaatggtgcaattatagctcactgcggcctccaacttctgggttcaagtgatcctcccaccttgttttttgttttttgttttgtcttgtttttttggtggagacagggttttgctgtgttccccaggctgctgtcaaactcctgggctcacccatctcggcctcctaaagcgctgggattacaggcacgagccactatacctggccaagattttatattttctaattgcttcacatactgaatggaaaatagcatgacagttataacagaagtaaagaaagtcacatgagagtccaccacctaaaatataacttcctttttctttgttctggcctggtttgggccgtatgtatttgttattgtatctcttaaaaaa

SEQ ID NO: 236871 - DNA, 595 bp, Homo Sapiens
gacatgttttttttttttttttttttgtacaaacttaatcaaatatttaatatcttagagttaacatattaagataacaggttatttgcccaaagtcataaggtgaagtagaggcaggaattgggcttcctagcctggagtccttttctccacctcaaggggctacgcagacctccaactaaatgctgagtttctcggtactgaaacagccctaggagaatgaataggacacagcgccatccctggccagtactatcaggtactacagtttggataccataacctacagtgtagccaggacctccctgaccagcccatctcttcccagcagccaccgtggtcctgagagctgggttaagccatcacctttaaaatcctgggaccacactgtgcaatgcatgaatgggagaccctcagctgttagccacgaagcacagatgagttcagtagacagccaagagaatcacaagtcatggcgtgggggcagccaaagacattcattcattcagtgactcttgattgagctctcacaagttaatacaccgtagtccctggcacagatgttatgaacctcaaggagtcttctgtatagtcc

SEQ ID NO: 236872 - DNA, 756 bp, Homo Sapiens
tatttttaatccaactgttgggggaaaaatgcaaaaaaataaaaatggggggccaaaaagaaatttgggaaaaaggtaagatttttgaaggacctttttttaaaatgacggtaagttttaggaaaaagaccaaaaagttgttgcaatttccagaatgttccaaatattaatttgaaactggaaagcttcttaggataaatttttattcagggaaatctcaagataaaaatcctgagttagttacaagctgtttttaaagaaacctgaaaatggtggttacgtgttacatgaccacagtccttctgttgaatacactaggcagtatttgtacaaatactgttagaaaaacttggcttctgaaatcttggaggcaggtttttaagatttcaacatttaaataatatcttactcgtggttcttttactttttaatcttcttttgttaaaataaattgggggcataaacacagcataaagcctactgaaatttaggaagtaaactagatttacctacaccaaacagcaaagcaaggaggtgttgccaaaccacccttacattgagatggttcgccagtgtggtgtgttaatcgtctgtagtgaactcattattgtaattaaaaatcttcattgatattaacctattaaagatattgcctatgtgaatttatcataggcacaatagaattacagatttctacaagtaaataagatgtcagatattttgttttcagtaatttcaatagcattgtgtgccccc

SEQ ID NO: 236873 - DNA, 750 bp, Homo Sapiens
ggtaggtttcaaggctaccccagggaggacggagctgggacgggttcaaaaaggagccccatggggtttggcgggtggcatttgagcccatggatggcaccactgcaaatcccaggcctgggcaaccagagggaggacccatgtctcaaaaaaattaaaataaaaacctagctaggtgtggtggcatggccctgtagtcctagctattcagaaggctgaggtgttgggaggattgcttgagcccaggaaatcgaggttgcagcaacagagcaaggccctgcttcaaaagaaaaaaaaaaaacattttcggtcaagaatactacacctcaggaggcagagattgtacctgtatgggtgatactaagtttgatcaagtttggataagatggtgaccaccagaatgctttactgtaatgttaaatctttgcctttgttatctgtagggtgatactttgagaccatgtaaatagccggttcctccacaacctttctttcaactgagtcaacaattgtattaggagtgacaaaatgatgattttctaattctattatgcattccttattagctgcattcttctgtaagtagcccctgctcgtattttagatgatcactatggagtcatggaacactaatattttttaaataaattcaattaaattaacctatcatctgtgttaaatatacatacatctcatacatacaggaacatagatagaacacatctacccatctacctctacctatatgcc

SEQ ID NO: 236874 - DNA, 773 bp, Homo Sapiens
gcccaacattgaaatatgccccagggagaaaactagccagaagaattcacccacctttgccccacgttagagatataaaccactattttgaggcagtttgttatgcagcaaaacttagccgaaactattaccttgctaccttgactgctggtgtaatttcccatctcatggagtcacagagttttcttgccaactgcagtgagttggcaaatgggaatgatcagtagcctcagtgtgttttctgatccactccatcctgtattatcatctgcgaataccgtttttcctttaaatgcaatgtgtctttcaaagctgacttgaatttctcacctttcgagttacctgccatttggactcacttatttggaggagatatgtaaagacccagcgtaatacctgtatgctcaataaaaagtatttgctggtactccttcctgcccgtcgtgtgacctgactgctctgggcttctgggggctccccctaaactcgctccacgaaatgacccctccaacctggcacgcccgctctcctaccttcgcccagggctggccgttatctctgtgctgtcacgcggggaagtcccatctgaactggggccttatgaccttcggtacttttattcgaacgtagcctgcgtccctgcctcgaatctggttcccgccctgaaggacccttacttagcactcctgcgggctgccgggaccccacggctccgcaggcggagagactaggcgcgatccctgcgcctggttctacgctgtcacctcgctaga

SEQ ID NO: 236875 - DNA, 860 bp, Homo Sapiens
  misc_feature (96)..(96): n is a, c, g, or t
ttctgaaaggggggattctcacgcgggcccccccttttattagggcccccgggtatatccccaaccgcggttgtggaaagaaggattttgtttctnttttggcttgtgggtggcttttaattgggaaaaaccgaaaagggggatttttggggaaaaagcaccagaaccggggaggcttttctgtaaaatttttaaatacaagcatccagtggtttcctaataaagtcccagggttgggagagaagcaaaatggagcctttattaaggaagagaaagtgatcaataccagtgagaaaggtgaaaaaaaaaaaaaacaaacaaaaacgaaaaaaaaacctaagcaaattcagtgagaaaagaaaaagcagaacttagagtccttacccttcaatttaaggaaggagagttattgcctagcagaatcttgaaataaaatttccttagaaagccccagaaagttttgtgtgtattgcaagtccaaaggataaggagaacttctatatgctttcttcttatttccactgggcaaagtcctgctccatcaagactcagcccgccatgaggctttccaatcaactctcaaccaccacaacagttagggctttttcctctatgttgcaaagcactttctgcataactcagaatgcaaaatgtactcattcatttgtttatttacattttttcctcactagactgatttttttttttttttttaggacaaggccttacttacacacataacttgtactctaggtaaactggaatactctattcactaaacagccttagctttacagtcttgacatcattgccttttcactattggcatccctctggttctacgctgtcacctcgctaga

SEQ ID NO: 236876 - DNA, 596 bp, Homo Sapiens
  misc_feature (1)..(1): n is a, c, g, or t
naatggtcatgttctttttttattagtactccttaattatcaaggcagtcccctctcacagaaaaaaaagccacatccagacacccactctattttgccaatcatttcaggggccagggtcactcaggttgagcttttccggtctagcccctcatctgcaagttgcagggaggctcactgaggctcagagtgaagacattttcaccgagttaccctgagaaggtctgagatgagtgaaaagatgtgtctgaattcttacatgtgggcctggaagggctaatgggaagggttggtctttatcacacccattattgaaaattaaagaagtgtcttccacatacctgggctaaaaaaacctcttttgcaaggttctgatgccattgactcccaacatttaattcttcattacaagaaaatcacagtaacatttataaaatgcagaagtgtgaacacacagttattgaccttgaaaacagtgaaagaaggtcagctgtagaactaagacatgagcaaatgttttcaatcaagaatacatgggtggccgggtgcgatggatcatgcctgatattttggttctacgctgtcacctcgctaga

SEQ ID NO: 236877 - DNA, 853 bp, Homo Sapiens
ttgggggaaaattgtgtgaagggcgggaataaaacaaatttttcatccccaaggaaaaccaaggctgatggaaccatggaatttacagcccaaagcttcggaaaattaaacccctcactaaaaagggaacaaataagggtgggtaaccggggcccccccttcggaagggatcaggccccttatgggccggatccaagcgctggagagttattttttttttgttcgcttttttttttttagctttattgactattaccaactttcagtatggttcaaataattaaatactgcaactgggacattaaaaatacaagctaatttaccaaaataattgtattctgaatattatgtacaatattatacattttacattacataatgggtttttatacataaaggtaagatttctgattattggaaatacaaagtacaactgaacaaaacattcctatgcgtacatacacaatcactcaactggaacaatcaaaaccatctatgagtgtggttattaaaaaataaaattacgttcatacaatggtagaaaatgaaatgtttttattaatttgattattaatacaaaaccacacatatatgaattatataacctagtgttatatatttaaaaatctttatgcttgcaactgaaatgtctctactccaagggaagtttctgatttttaattttcttattttaaggaatctattatattcacaatgattaaaatgccttacacataggcaaaaagcagacccaatcccagcaaacagaaaaaccataagtctatcatatcaccatatgtttcaccatatagttttgaaaaataatccttgttctacgctgtcactcgctaga

SEQ ID NO: 236878 - DNA, 859 bp, Homo Sapiens
tccaggcttggcccaacacaaggggtaaaaattctttttctctaccccaaaaatttccaaatcttggcccaggttgggttggtggccaaccccggttagttcccagggaaatttgagaagtttgaggccaggaggaatccgctttaacccaaggaggcggggggtttgcattgaacccaggattgcgccaaatgcattccaggcctggtgaacagaagtaagactctgtctcaaaaaaaaaaatttttttttgtacatcaagaccacagcaaggtggttttatcaggatagaatgtactatccaaatttacaaacttctctcagaacacctagagaaagaactcttttctggtcaagagcctcatatcaaagaaagaatacttaaactagaagcatgggtaaaagggcctgcagtaatcaaacaggctctgccaggcaggcaataaaggggagctagtgctcagcttccagaacatgaggtattctgaatatataccccagagcttggtacaccaagagcataataggttcttagatctcttcaaggaaatttataggcttcagaattgctctcccggatttaatccctacaacaaatgatgaggtagaaaagggtaggtatgtatactgctttttatatatgagaaaaactgaggcatacggacgtcaagactggcactcaatacttaactctacctctacccaagaggcacttaatagtgcatagctagagactaaagaaagtcatattcaaggttgctatgaggtctaccttgccaagtgctgaggaagccaagaagcatttcatccctcctttgaaacatttcctgttgattttaaaagggggaaaaaaaacccc

SEQ ID NO: 236879 - DNA, 854 bp, Homo Sapiens
accaatccacacaatttcttttttccataaaagggagagttcggaaaatttttttcccaatttttatccatccttagtgttccaaattggggaaaataaaaattttttttaaaaatttcaaggggggtgtttaaacccccggcaagacttgccataaaagggaaggttccattattattccttaaaaactaaagcttgtaagggagttttaaaaaacagagcttccaaaacaataattattattttaatttaattttttaaccaaattaatgcaaaagtgcttcaaagtactcagaggggtaaagatgaaagggtgagaaatgccagcacactcgagtctcgtggaaaaggtgtgcctgattccgttataaatgcttaattaaactgtctgttaatgcatgcagcttgaagcatcgggaggatgctcacaactaaatcccgtttacacaaagttccaaacacttaccactgcattttaaccttcatattttaccagtaacaacagctgattatgcacctctattaaacactgtacagttatacaaaacagtccagcccagagtgattctctgcagttaaaataagaacatgtgccaagaacaacaagtcagagggggcctgaaggtgccttccacagtttccctcaaagcaaactgcagtcctttctatcaaaagcaaatgctactgcttctctaactcagagacatacagaaggtggtcttccggagatttcccgtgtgttttgctaaggtgaagtttaacagcgtgcttgctggcaaaggtccgattgcaaagtttgcactgataggaagtccccaggtcttcctcgggggaggacgtcaccattttttccc

SEQ ID NO: 236880 - DNA, 873 bp, Homo Sapiens
gtctttactttaggagatttatttttgttcgttcccatttataaaaaaagggtattttaagatgttcaaaccataacggccaattggccatgtttttcaggtattggaaagatggcaggcttttaaaagaatgttttatttataaaatttttttttacgggtttaatgctttgggattttataaatcatatttttcaataaggggtctctaaacctcctttcaaatttacctaaaatcctgaaaaaagtttaagctactggtcagtctaaaaaacttgacagatgcattcttgagacattcatcaggatacattttaaaaacatcaatctaagtaagctctttaatacaacatgatactttataactgttatacattaatccccctaatttattttcatacttggaccttcaaaccaccttggaataaataagaaaaattttaagtgcaaaaatgagtaatacatgattttatcactttggagacaatgaaatcaatattttcctgtgatttaaaaaaaataataggagtaatcaatcttgtgtatacttctggactttaacttgtaacaaatatattctgttagcatataaaatgtttttatcttattttgaaaggattaaatatgtagggttgtccaaaatatgtgtattgttttttaaaactgacaccaatgcatccatattctactaaaaacaaacaaaataatcagaccgatgtgtacttattaggaagcaagtttaaaaatttggatttttttttaaagtgctgagatttggaagaggaatatctttaaacatgctaaccattaccttatgatgaccataacaaggactcaaactcaagtttagaaaaaaaaaaaatagaggttccc

SEQ ID NO: 236881 - DNA, 931 bp, Homo Sapiens
aaaaaggacgtttgttggggtccctcacttcttgaagtccctcggctaaacggggcccatagggagcgggcctggcacatcccttgtttgtggcttttgcctttttaccaaccgggttctgggaatatcacggaaggggcccaatgctaagctccaggatcccggtcctggtttggcggcggttcacactgtctctaagtttctccctgcctgcccatcaatggagtggcagaagtgtttcacattttgctgccatgagcaaagaggaggtcgacaggtcaaattttgtaatgctggccctgtcctcctcattcctggtgtatccctatctcttgacccgttggtgtggcagcgtgggcttcatcttggccaactgctttaacatgggcattcggatcacgcagagcctttgcttcatccaccgctactaccgaaggagcccccacaggcccctggctggcctgcacctatcgccagtcctgctcgggacatttgccctcagtggtggggttactgctgtttcggaggtattcctctgctgtgagcagggctggccagccagactggcacacattgctgtgggggccttctgtctgggagcaactctcgggacagcattcctcacagagaccaagctgatccatttcctcaggactcagttaggtgtgcccagacgcactgacaaaatgacgtgacttcagggaagcctggacacccgaggcacctggaccagctatgggtagttctgtgggtggaacacattctgtgtaagagccccactgagggctctgcagcggagtgacagcaaccccagagatgaggcaccagagagtgccactgcatgagacacctgtgaccattcgaagtctgaaatgcggggggggagtttcatttttaagttaagaccaaaagccctttaaaatatagtttt

SEQ ID NO: 236882 - DNA, 977 bp, Homo Sapiens
cggackctcccctmacatgcgtcctacctgtgaaactctgggaagcaggaagcccaagacctggtgctggatactatgtgtctgtccactgacgactgtcaaggcctcatttgcagaggccaccggagctagggcactagcctgacttttaaggcagtgtgtctttctgagcactgtagaccaagcccttggagctgctggtttavccttgcacctggggaaaggatgtatttatttgtattttcatatatcagccaaaagctgaatggaaaagttaagaacattcctaggtggccttattctaataagtttcttctgtctgttttgtttttcaattgaaaagtaattaaataacagatttagaatctagtgagagcctcctctctggtgggtggtggcatttaaggttcaaaccagccagaagtgctggtgctgtttaaaaagtctcaggtggctgcgtgtggtggctcatgcctgtaatcccaacattctgggaggsccaggcgggagaactgcttgagcccaggagttcagaatcagcctgggcracatagcaatactccgtctcataaaaattaataaataaaaagtctcaggtgaccaaaggctcctgaagctagaaccaggtttggataaagattgaagagccacaggccactcttccctctgagccattgggcctagtggtgtcatgtattgtaattgctcgcagggagagcagtctttttggtgtaatagtgggatgtctgcttagttggcaggggttcagtccaaatggaagaatattgggaaataaacctccactatcctttatagccagggacttttttcttatttattcataaaataaattatagttaattatacccataacacctttatttaaatccagtgttctccgcagccttttgtctatttatatgtgtaccaagtgttaaacataattattattggcatttaactttttttctttaaag

SEQ ID NO: 236883 - DNA, 1000 bp, Homo Sapiens
cccactgcaacaccaccatggcctgcagactccatcctcaaccccatgtcagccaacctcgtggacctkggctcctagaacccatttgccttgatgagcttgccttttgtgacttgacactggggacgtggagtggcggtgtccaagggcgcccccgcccctgcggccccaccaggtactgaaagacccgcaggctgagcgggtagaacagccgggtagggcagatagctgtctatgttggttcttgtttgggatttattttcaacaagttacttttaggatccttttggggctggagactgagtcttgaaccacagaagggaataaattatacaccactgtcattctctctctccctctgtctcwtccttttaccctctcttgtcttgccttttccccctttcctctccctttcccyhccttctcttttcttttttctgctttttgtctttctccctctccttgtattgctttccttctagatttctagcttgccaccgttcattctctccttctgtctctccctttctctctccttctctgtttctcctctcttctctcctgccagtctcttgtactctgtgtcctggtccctccgtatgtacccctgtctttctcctcctgactggtggtctatctgcccctacctctggccctcgctttaccggagtagggggtgggagagggaagaggagagaaaagacagggactttgaacctaggccatctcctgaggccttttccctcgcccatgtgggtcagtgggagctgcaggtgtcagcttttcgtctagtaacttaagtgagagagaaagggcagcgccacagaagcccctaaacgccgcctcgtcatacgcccctcctccttctctcttggcgaggccccgccacaccgcgctcttcctcccgggactgtgactacagcgctcccggctgagcgcgccccccgagccgccgacttgccgtctccccgtaatgccctcatgtgaatgttcttcggga

SEQ ID NO: 236884 - DNA, 901 bp, Homo Sapiens
  misc_feature (11)..(11): n is a, c, g, or t
  misc_feature (54)..(54): n is a, c, g, or t
  misc_feature (117)..(117): n is a, c, g, or t
cggatctgtgnagatgttagaatattactgagaatgaaatagcagactgggttnctgggtgtccactactggaggagcttgaccttggctggtgccaaactctgcagagcagcacgnggtgcttcaccagactggcacaccagctcccaaacttgcaaaaactctttcttacagctaatagatctgtgtgtgacacagacattgatgaattggcatgtaattgtaccaggttacagcagctggacatattaggaacaagaatggtaagtccggcatccttaagaaaactcctggaatcttgtaaagatctttctttacttgatgtgtccttctgttcgcagattgataacagagctgtgctagaactgaatgcaagctttccaaaagtgttcataaaaaagagctttactcagtgacttaatatatgttctgtattaaaattaatgtgctttgttggggtttaattttgggattggttttgggttttgtttttagttgttttaatggtaagaattaagacatttgtagattttaaagaaaaatatgaaattgtccattaaatcaagtaaaaatgtgcacaaatgttttcataaaatactgcaagcacttctcttcaagaatatgagtggatattatttttaccttatgttaatcagtgatatgctttagtcaataatatgattgataaaagaataacatggaatcatgctaacttattttcaaaggaacactgagcaataaagtatcgtggcatttatgcaaaaaaaaaagttaattttttacaccttcatgtaaggatgtcttattaagcctgtgacctggcaagtgttttgtttggtatgtacaaaatggtcagagctagttgagaatagacagcttttccagctgttgggtatttctc

SEQ ID NO: 236885 - DNA, 936 bp, Homo Sapiens
  misc_feature (1)..(1): n is a, c, g, or t
naagtgcaggttttaagcccgtgaccccaaaaaggggcaaatgcccacggcccacagggcctcccccgagccctgcgccggcgtcagtgactgttttgggggaacttaccaaaaaattggccaactgcaaccgcttggcttccctaagcaggcgagctccgttgccccctgagcgattcctgcattccactcacgtggcgttgcgacggcccaccaggactgtcccgactccagcggcgagctcggctgtggaaccaaatagatcctcccggaaggggatgccacaacaatggggccccctgtgaccctggagagtgtcacctctctcaggaatcccacaaccatggggccccctgtgaccctggagagtgtcccctctgtcgggaatgccacatcctcctctgccggagaccagtctggaagcccaactgcctatggggttattgcagctgctgcggtgctcagtgcaagcctggtcaccgccaccctcctccttttgtcctggctccgagcccaggagcgcctccgcccactggggttactggtggccatgaaggagtccctgctgctgtcagaacagaagacctcgctgccctgaggacaagcacttgccaccaccgtcactcagccctgggcgtagccggacaggaggagagcagtgatgcggatgggtacccgggcacaccagccctcagagacctgagctcttctggccacgtggaacctcgaacccgagctcctgcagaagtggccctggagattgagggtccctggacactccctatggagatccggggagctaggatggggaacctgccacagccagaactgaggggctggccccaggcagctcccagggggtagaacggccctgtgcttaagacactcctgctgccccgtctgagggtggcgcattaaaggtggcttcaccatcct

SEQ ID NO: 236886 - DNA, 891 bp, Homo Sapiens
  misc_feature (1)..(1): n is a, c, g, or t
  misc_feature (20)..(20): n is a, c, g, or t
  misc_feature (48)..(48): n is a, c, g, or t
  misc_feature (79)..(79): n is a, c, g, or t
  misc_feature (118)..(118): n is a, c, g, or t
  misc_feature (132)..(132): n is a, c, g, or t
  misc_feature (164)..(164): n is a, c, g, or t
  misc_feature (221)..(221): n is a, c, g, or t
nttgaacgccagagctggtncggcccccttctttctggaggggtgagnaagtgggccctggtcccgtgatgcctgctcntaaaggaccaataaagaccactgttcctcggccgcctgnctggcttcaccctncaaggcctccccatggccacagtgggcccacnccacaccctgccccttagccctgacgagggttggtctcgaggcagaggtcatgttcncagccaagagtatgagaacatccagtcgagcagaggagattcatggcctgtgctcggtgagccttaccttctgtgtgctactgacgtacccatcaggacagtgagctctgctgccagtcaaggcctgcatatgcagaatgacgatgcctgccttggtgctgcttccccgagtgctgcctcctggtcaaggagaagtgcagagagtaaggtgtccttatgttggaaactcaagtggaaggaagatttggtttggttttattctcagagccattaaacactagttcagtatgtgagatatagattctaaaaacctcaggtggctctgccttatgtctgttcctccttcatttctctcaagggaaatggctaaggtggcattgtctcatggctctcgtttttggggtcatggggagggtagcaccaggcatagccacttttgccctgagggactcctgtgtgcttcacatcactgagcactcatttagaagtgagggagacagaagtctaggcccagggatggctccagttggggatccagcaggagaccctctgcacatgaggctggtttaccaacatctactccctcaggatgagcgtgagccagaagcagctgtgtatttaaggaaacaagcgttccggaattattataattaataatcccaatatatcc

SEQ ID NO: 236887 - DNA, 861 bp, Homo Sapiens
aaaaactctaatgatagtcccatttgctttacattccttacttcccaagcccccaccttctagttctgacttcgggcagaaggatccctgagtccctcctggaattagcttgtatagtgaaaggcccatccaaggttgtctaaagaccaatgtgaaggtgacagaaaggacttttgagttctaattaatctgttacagcttcaagcaagaaagtcagtatagcctgaaagacaagagaaacgggatggtttataggagttcccatttggttgaaagctagaagccctaattgaccttaaagtaacatgctatgggatggtgggattgtcccctctgacagcacatatgaaatagttcatctatataatagaaacgcacacacacgaaagagaatcttctgacttaaatacaactttcatggagttcttcaccacttatctgtctctgttaaaatctgaaaatctagcccatggctaaaatctattatatgtgttctccatatttcttgtataagccagtccccagcatctgatgttttgagaagtgcatggagtttcctaaactttgcacagaagaatatcctggggccgggcatggtggctcacgcctgtaatcccagcactttgggaggccgaggcaggtggatcataggtcaaaagatcgagaccatcctggccaatatggtgaaaccctgtctctactaaaatacaaaaattagctgggcatgatggtgcatgcctatagtcccagctacttgggggcctgaggcacgagaatcgcttgaattcgggaggtggaggttgcagtgagccgaaattatgccactgcactccagccgggcaacagaggagactcgtctca

SEQ ID NO: 236888 - DNA, 913 bp, Homo Sapiens
  misc_feature (20)..(20): n is a, c, g, or t
  misc_feature (26)..(26): n is a, c, g, or t
  misc_feature (86)..(86): n is a, c, g, or t
  misc_feature (98)..(98): n is a, c, g, or t
  misc_feature (130)..(130): n is a, c, g, or t
  misc_feature (136)..(136): n is a, c, g, or t
  misc_feature (144)..(145): n is a, c, g, or t
  misc_feature (160)..(160): n is a, c, g, or t
ctccactgcagatgaccaancctgtnccgctgcacttttcctcactgatatgggagaagggcaaggcccagccgaagttccactanaaatgccccagnagaataggcaccggctggctgcccaaagggtntgggtntatgcttnnctgtttttcttttcnccgacagcacaaagaagtaagggcagttattggacaggtgttatttaaacattctattgtaaatgaatgtgttgtttggttctactgcattgtggagcatgcgggggaagagaactgacccaggtaatgaaatggagcccttccctggaactaaccagtccttgatgttgtgtgactaagtaaagatgataaaccccatctgctgggggtgtcacttcacactcggcatgcattgtgaaagctttccatacccttggccattccctctctcctctctctccaaccccatttatgcaggaagggactgctaacaagaacgcttccatctcaaaccttttctctgcctgggaaattattttatgtttgtttttgaaataaaggatttagtttaagattctaaattttagagaaacaaacgtaggccttgtttactaatagccagacatcagaactgcaggtaggtatgttaatgagatgacttatttctggcagctcctggaatcctaatattgtaaatgagtgggacacacttgcatattgtgaccattctattgaggcccttctctgtttaatgcatattatacttgtgcttttaactgtggaatctatttctaacctaaaggtgctgccctagtacttttctttgctgcctctgctgctctttttcctttccaaacagcaactctgaggccatgagcagccaaaaactagaggtactgctccacctcgtctcataaagggaaaccggggctc

SEQ ID NO: 236889 - DNA, 1000 bp, Homo Sapiens
ktctgrgttcctccagctgctcctccaatcagcytccaatcttgcatwctkgkagctcctttcagagttttccccccgactcttccatcaggacaagcagcttttactgtcctatctagaaaagtgcctgcagcatgtctcccaggcacctggccatccctggggcccagtcaccacctactgccactccctcagccctgtggagaacacagcagagaccagccctcaggtcctcccccagctccaagaggaggcgcgttgaagggcctgccaagcctaacagagaggacgtctcctcgtcccaggaagaaagtctgcagctgaacagcatcccgcccacgcccaccctcacctccacagctgtgaagagcaggcagcccctgtgggggttgaaagaggtggaggaagaagatggctcagagttggattttgcccagggcagtcagcccgtcgcaggcaccgagaggtcaaggttcttgggtccacaatatttccagactccacacaacccttcaggtcctggcctgggcaaccagctgatgcgactcagccttatggaagaggacgaggaagaagagttagaaatccaggatgagtcaaatgaagaacggcaggatacagacatgcaagcaagtagctactcttccaccagtgagcgcgggctggacctcttagattctacagagctggatattgaggatttctgacaggactctgggcccctccccagctccactcctctacctcaagaatgtgaccatttggaaaaggcaaagagaaaaggagcaaaatgaagcattcccccaggcttcagccctgggctctgaggggaaagagttgggcattgtttttctaacctaacctttccctctggggtagagaagccgagagaccctgtcctcccttatgcactgtggcccagtccccttgcctttttcctgttctgtttggagtggagaagggcagcacctctgtgtttaatggaaatagcccatagtct

SEQ ID NO: 236890 - DNA, 931 bp, Homo Sapiens
ggttttcttataaagccaatagaaattatttttaggttcccagggctagaggatccatgcctacttgtttctaaagttatcttttccataagctttccatatctttcaatgaatgcagtatatgttaaatatgtctacaatatacatttagacaaccaccatttgttaagtatttgctttaagacagagtttggatttgtttagtttgctcaaaaggaaacccatgggctctccagggtgcactgagtcaatctagtcctaaaaagcaatcttattattaactctgtatgacagaatcatgtctggaacttttgttttctgctttctgtcaagtataaacttcactttgatgctgtacttgcaaaatcacattttctttctggaaattccggcagtgtaccttgactgctagctaccctgtgccagaaaagcctcattcgttgtgcttgaacccttgaatgccaccagctgtcatcactacacagccctcctaagaggcttcctggaggtttcgagattcagatgccctgggagatcccagagtttcctttccctcttggccatattctggtgtcaatgacaaggagtaccttggctttgccacatgtcaaggctgaagaaacagtgtctccaacagagctccttgtgttatctgtttgtacatgtgcatttgtacagtaattggtgtgacagtgttctttgtgtgaattacaggcaagaattgtggctgagcaaggcacatagtctactcagtctattcctaagtcctaactcctccttgtggtgttggatttgtaaggcactttatcccttttgtctcatgtttcatcgtaaatggcataggcagagatgatacctaattctgcatttgattgtcactttttgtacctgcattaatttaataaaatattcttatttattttgttacttg

SEQ ID NO: 236891 - DNA, 844 bp, Homo Sapiens
aaaactagataaaatgatctgaaagattatgcagcagaataaatgccccaaaaattcccagggaagactggaaaaaagactgctgtgggggttttgccttcctggaaataagaccatactgcaaagtcactgtaatcagatcaatatggcattggcagaggactagacaatggaaaggaatggagaatacaaaaataagtttcaggatatatgagaatgagatatatgccaaaggtagtattttgattcggtgggagaagggcagactgtgaagtaagtggtaccagccacaactgaatatccatctgggataaaataaaattgcactcgtcttagagatccaaatcaacttcagatggattaaaactttgaatgtaaaaaacataaatgactaacagtcctgcaaaatatcttggagacaacctgtgccatctggagagtgggaagagcacatgcaaaggccaaggggtggagcagcccagcatgttctggaaaaggtagggctccccaaggctgggatgatggtggagacctgggtgtgtgggagcacaggggtgggggcccgtgggccaggaatgcacagagaggggctggtgctctgccgcaggcccaagcccccaaagcccggtcattcccagcaccatcttcacgggtttctgcccaggtctttctgctgcatctcttcctcccccgattccttaatcattttttttaaaatcagttcatgtctttgtaaaccaaattatttctaaaaggcaaatttatattactgccgaaatcaagggtcagtgagctagttgtgtatgttctgaatcacaggaaataaagcatcgaacattaagaa

SEQ ID NO: 236892 - DNA, 909 bp, Homo Sapiens
  misc_feature (886)..(886): n is a, c, g, or t
actgttaagtaaaaggcctaacccccttccctgcagtctctatatatctcaagctttaaggaacccattcttaaatgtaccctaccggagaatttatattgtcagccttgattaccataggacaggcaaaaagcggataatttgtatcttttaatataaaagaagcttttaacttttccagcctattataataactgagttatattcactgtggctcaaactaattggcattgtggaacatttctttaccttcaaagttttctccaccaatcatttcagttctattgcagtcctggtgccatatgtcccctgcaaattgtgaaagtaattagtgacaaaatagcagcctgctccttttcaatggcgaaactgtcggcattagcagttttgggtaagctggcggtactataacacgtactggaaacctgttcctcatcaccacctaccagattctggaaatgccgtcttctagaaaacgatggcgtttgtggtggtcttcttttgaaaggaacagtaatttgtgtggatattgttaaagtgtttaaagaatattttgacaattaagtttacattttacaattgctttattttttattaaaatagttgtatataaatattaccctatttcactgttgttcaagtaaatctaaaccttgtagacaagtgagtcatctgatatgtatagaagctgtgatatatagagtacatttattgtgtaaatgtttatgaatataattgttcctgtgtttttataagttggggatattttgttgttttacggcaacaaaatttattgcatttaaatggtttttatgtaatagaaatcacgcaaaatagtgaaggatttaaaatatgtatatgatacatgtaaatgtacaaactttanaaagaaattaaatccaaccaaat

SEQ ID NO: 236893 - DNA, 899 bp, Homo Sapiens
acatttaatctttcttgggattccaggtgggggtgggaggaattggggtggtggattaacagatggaattgaggagaaagtaagattctttttttcctacccggggcccaggggttgtgcctaccccatgccaaggattctaggtcaaatgtcaatagatatgaacctcaagaaagttctgaaggccatgacacctgccttgcctccctcttccattctcttaggcacagtaatagcttatttgccctataagaaccttccgagagcagcagaggcccttctactccctcttgactgtctcagcctctgggattgcagcctttgtagtgtgcttccttgcttcctatcagagggtgctgatccagaggctcagtaaccccatcaacttggtggccctggtgtctcacacttgtatccttctgccctcgagacctggcacagcagtatcccttgaagaaatcctgaggctttgtagagtgctccttgaccatgtttaataattcttccctcccctgcttgtctattttcttctcttcacggctcttcctataccttaggccagtctcaagcactcactggagacccttgggccttgggcgaccattgagtcctagtctcccttgtttgtgcccctgtaggaggtaggtccttttctcctccggcctagtaggggaccttgggtaacatcccatttttcggccaaggtgagttgttttaggataaaaaaatttaccacaaattctcatttaaatttccacagaaatcctgttcgtatccccattttgatttccctaagttccttgttctccctctaaaaagagaatgattgcaccctgcctgtttacctcaggattgtattgtagaaacgaagctatgtaaaatatataagtatataaagg

SEQ ID NO: 236894 - DNA, 906 bp, Homo Sapiens
  misc_feature (1)..(1): n is a, c, g, or t
  misc_feature (17)..(17): n is a, c, g, or t
  misc_feature (165)..(165): n is a, c, g, or t
  misc_feature (219)..(219): n is a, c, g, or t
  misc_feature (888)..(888): n is a, c, g, or t
ntagctcaggggcgacncgggaggtgagttccccatagcctagatcgaggagccagtgcctgccaagctgttgagaaggctgcgcgcactgcaaggctgatcaggtgggcagcagggagcagctcttgtacctgtatgccaggtacaaacaggtcaaagttgganattgtaatactcctaaaccaagcttctttgattttgaaggaaagcaaaaatggnaagcttggaaagcacttggtgattcaagccccagccaagcaatgcaggaatatatcgcagtagttaaaaaactagatccaggttggaatcctcagataccagagaagaaaggaaaagaagcaaatacaggttttggtgggccagttattagttctctatatcatgaagaaaccatcagggaagaagacaaaaatatatttgattactgcagggaaaacaacattgaccatataaccaaagccatcaaatcgaaaaatgtggatgtgaatgtgaaagatgaagagggtagggctctacttcactgggcctgtgatcgaggacataaggaactagtcacagtgttgctgcaacatagagctgacattaactgtcaggacaatgaaggccaaacagctctacattatgcctctgcctgtgagtttctggatattgtagagctgctgctccagtctggtgctgaccccactctccgagaccaggatggctgcctgccagaggaggtgacaggctgcaaaacagtttctttggtgctgcagcggcacacaactggcaaggcttaatcaaaagactggaaaactgcagtctgtaatagcataaggcttccattataaagaaaactacaaaaataatacttcttttccacccgtctttggtatgtatggctaatanaaatcagttctgggaact

SEQ ID NO: 236895 - DNA, 918 bp, Homo Sapiens
  misc_feature (291)..(291): n is a, c, g, or t
cccccccgcccagtaacctttttcgggcgaccgcccactctatgtgggcagaggggggaaagacccaaacccctttgttttcccgtcaaggttttttctttacaagccccttggagaatggccccatggccaaaccttgggcctgcttcctggccccgaatggccccggctttcttgagtttcttgggggggcccaaaattggtggtcccatagccgccctcctgggtttcacctcaggcctggcaggaccctggggctgtccgggccttggcagcctggcagctgcaccnccgatcctcatccctcaccccattccctgccagcatcctaaggctcctggcgggcatcctctctgctcaaaattattgacctgtctcccggccacacctgctgtgccctctcagccaggccatcatcaccccctgttcattatgtcaggcctcatgggagcctggccttctccagaagctggccccggcgtcctcccaagctggaccacgtaggccccagatcacacctgggggtccagatgtaggggtcccgtgtgcacgcccaatcagaccgagcacttgtgacactaccccaacacctctcccagggctgaatgaggaacgcgccactggacacatgaggaagaggctgccctgggagctactgatgctgtgacctcacctctctggctttgggcggcaggtccctgcacctaggatgcctgcctggaaatgtccttgcattcgtggcctccttcacagcctcctcctcagagaagcctctgcgagtgcacagggagtgtgtgcagccttgtgaagggctgggaccacttgcccagactggggcccctcaggcacaggcgtggggtcctactgacctgtctccccagctcccacacagaaagcatctaaaataagcacacggga

SEQ ID NO: 236896 - DNA, 454 bp, Homo Sapiens
tccagttactaggtttggacagcttgatgtgaacgaatgggataggatttttaaaatcagccagctccatgcccaaaccttcctgtttgcagaactttttaatgtcttttctttttcattaaaacttttttgttcgatatgcctctttccacattttttccttgcaatgtatttattatttatttgtatttaggtgaaattcacataacataaagttaaccattttaaagggaacaattcagtggcatttggtactgaacatccacagtgttgtgtaaccattgcctctgtctagttccaaaacatttttttatcatcccaaaatgaaaccctgtagccattaaacaagagctccccgtttcctccctcctccctgtccctagcaaccaccagtggacttcctgtttatgggtttgcctattctggatctttcataaaaatggaattacacaaa

SEQ ID NO: 236897 - DNA, 376 bp, Homo Sapiens
ggcctgccaccttcaggggtccccacggagtctggaccatggaggagcgaggtctggcccccaagttcgacaccacctttgagagcgcgcggcccacgcagacccacatggcgctggtgcagctggagcgcgtgggcctcctccgcttcctggtcagccagaacgtggacgggctccatgtgcgctcaggcctcccttctgggccccctacagcccaccctacccctcctccatgggccctgcaggaggggagacccaccttgaagtgggggatcagtagaggcttgcactgcctttggggctggagggagacgtgggtccaccaggcttctggaaaagtcctcaatgcaataaaaacaatttctttcttgcaaaa

SEQ ID NO: 236898 - DNA, 558 bp, Homo Sapiens
aaactcttggctcaagtatcccccaccttaccctccaatgctagtattatagcatgaccaccatgcgtgcccttcccaagcttgaacttccttacctgggtcgtagatggactctaggagatctccaaacctcctgaaattgtgtgcaaaatattgtgtctgtatatgcattttctagggatgcggtttaatattttcatgtgattcctaaaagaatctgaggctcaagaaaagagggcatcttaatatcctgcactttcagtcattgagggcatgatcacaaagatcaaagccatttttaggcaggtgagttggagtggcagtcagaagtaggtaagattttctatttgtgaggcaggaacaagggattggaccattgttcttaaatactgctttcttacccaaaatgcaaatctgtgcgtaatcagtacacagcaaaaatatttactgtattttgtttttccccttgggtacatttggcaagtgcctttttctactataaccggcgtttttgtatctctttatttgtatctcaaactcactgggacttacaatctt

SEQ ID NO: 236899 - DNA, 1000 bp, Homo Sapiens
acramactacagaaacaccccttccacaacttccggcactgcttctgctggcccagwgatgtacagcatgtctggctctgcagtctccaggagaaktctcacaaacggatatcctgatcctaatgacagcggccatctgccacgatctggaccatcccggctacaacaacacgtaccagatcaatgcccgcacagagctggcggtccgctacaatgacatctcaccgctggagaaccaccactgcgccgtggccttcccagatcctcgccgagcctgagtgcaacatcttctccaacatcccacctgatgggttcaagcagatccgacagggaatgatcacattaatcttggccactgacatggcaagacatgcagaaattatggattctttcaaagagaaaatggagaattttgactacagcaacgaggagcacatgaccctgctgaagatgattttgataaaatgctgtgatatctctaacgaggtccgtccaatggaagtcgcagagccttgggtggactgtttattagaggaatattttatgcagagcgaccgtgagaagtcagaaggccttcctgtggcaccgttcatggaccgagacaaagtgaccaaggccacagcccagattgggttcatcaagtttgtcctgatcccaatgtttgaaacagtgaccaagctcttccccatggttgaggagatcatgctgcagccactttgggaatcccgagatcgctacgaggagctgaagcggatagatgacgccatgaaagagttacagaagaagactgacagcttgacgtctggggccaccgagaagtccagagagagaagcagagatgtgaaaaacagtgaaggagactgtgcctgaggaaagcggggggcgtggctgcagttctggacgggctggccgastgcgcgggatccttgtgcagggaagagctgccctgggcacctggcaccacaagaccatgttttctaagaaccattttgttcactga

SEQ ID NO: 236900 - DNA, 913 bp, Homo Sapiens
cgttatttttggggtcttgtaaaaaaaagtttaaattttcatgtgagaaaaaaaaagagtgtaggtaatattttataattttaggaatatttttaaaggcatttttttttaaattcaaacggggctattaaaaaaataaattgtattgtatgtcaagatgtcctatttttaaaaaagttgtttttttaaatcatggtcacattcccatgtaaatttttaagctttacaaagattagattccaagtgtggattctgtgcactgcacattttgaaagcattattcactggttttccttcatacttgcaagttcatattagaagcagagacaaaacccactccaatggccttgacacatagtcacaccaaaatagaataatcagactaagtattatataacaacgtgatccagacagtgagttctaagtgtattaattaaatagcaaaaaattttgtttttaaaaaatgaaagagggagggttgccaacctgaagtcttaagtagattgtttgggtagcatatttccttctttgaacattgtctgaaattttctataaatcaagacttcttgtacaaagaatgatgggacatatgtaataattcaggcaatcacctgagtaatttaggcagtccaaattctttaccctgaaatacccacattttaaaaaaattgcagataattgcttcagttatttactttggggacagagatatagtgtaaagtgggagaaactgagtccttttttggtggtggtaataataagatgttataaaaatataacattttaaaaaagaaaggtccagaccttaagcgcagagctagaacaatattttttaaataatggggggaaaagggggcactttggtaattttagaaatcaggtagtatctttttttttttttttagacagggtc

SEQ ID NO: 236901 - DNA, 955 bp, Homo Sapiens
gagtgccgcgcctcatacytctcctgccctggacttcctgtgagctccctctccttctcttcaagsgctgctctgaagtgsccctccagctctttggcagcctcttctcgacgtctcttccggagctgagatccagcccagggcgaatggcgagcttggctcaggcctctgcggggtggaggcccctgggcctgaggctgccagcagcgggcaggagctgctcttcatccacttggagtgctgcggggaagaaatacacacaccggtcattctaaccctcacccaggaatgggggtractcgcacaagacctcatggaaagggtgatgactagggaaaagagggtgcagggcacggctgctccccaccaccaggtctgcatttgttcatcatcatcaggagcagaggtgaccagagggttcagagtgggaggcagggccagcccaggccaggagcgcctcatcttcccaggcctcagccacccagggtaaaaggtgccagggaagttgtgggcacctgagaggaggaacagatgtggaggacctgagggtgctcaaagggccaggctcagcctcaagcagtgttttcattgccaacacttactgtacccactccgcagagccccgctgggcctgggccccagggccacagctagcctgcatgtgtgtactgcactttacagtttgcaaagctcttccatacccactctctcaccgaagcctaattgaggctcttggaaggagtcaggcaaggattgtgcttcccccattatacaggtgacaaaactgagtcctggggaaagtgactggtccgtggtagagccgggacccaatcccctctctctcctccctgttggtgctgttcttcctgcccaacacctgtttctcttttcctcaaggggtttggggcaggagcctgggacttactcccggtttttgctgtttctccttctgacc

SEQ ID NO: 236902 - DNA, 904 bp, Homo Sapiens
  misc_feature (48)..(48): n is a, c, g, or t
  misc_feature (92)..(93): n is a, c, g, or t
  misc_feature (120)..(120): n is a, c, g, or t
  misc_feature (128)..(129): n is a, c, g, or t
  misc_feature (132)..(132): n is a, c, g, or t
gaaaggatcagagcagcagtggcctgtcccaacactgagcaatggacnctgatagagccgagagaggactgcatgggcccaagccgctctgnnccagcgtgtgagggccaggactgcatnacgtgtgnnagncgaaagtgtggtctaagtgttcagtcaagtgtggcaaaggcatacgtcatcggacgtttagatgtaccaacccaagaaagaagtgtgtcctctctaccagacccagggaggctgaagactgtgaggattattcaaaatgctatgtgtggcgaatgggtgactggtctaagtgctcaattacctgtggcaaaggaatgcagtcccgtgtaatccaatgcatgcataagatcacaggaagacatggaaatgaatgtttttcctcagaaaaacctgcagcatacaggccatgccatcttcaaccctgcaatgagaaaattaatgtaaataccataacatcacccagactggctgctctgactttcaagtgcctgggagatcagtggccagtgtactgccgagtgatacgtgaaaagaacctatgtcaggacatgcggtggtatcagcgctgctgtgaaacatgcagggacttctatgcccaaaagctgcagcagaagagttgacctctagcaggctggctggatcacagctctttgcaattacattatttataaacacacacactagcatgtttttcagaccaaatattatcagattacatataatttaatcaaattaatttatttttttgcctgccaaacatccaatgtggtgcttgttttggttacacaaacattttgatttatactatatggcttcataaataattttatatgaatgaattagttggatccagtaatatataaaaagaaaaaggaaaaaaatagatcattat

SEQ ID NO: 236903 - DNA, 1000 bp, Homo Sapiens
agcccgascccgaacccgaacctgaacctgcgctkgacctcgcggcgctgcgtgcggtcgcctgcgactgcctgctgcaggagcacttcttactgcggcgcaggcggcgcgtgcaccgttacgaggagagcgagtcatatctttgcccttcctggatcagctggtgtcaaccctcgtggcctcctcagcccacacaacccggccctggccstgccgccctcgattatagatgcccagttcatttttactgggtgcgtggtgaagaaattattcctcgtggtcatcgaagaggtcgaattgatvacttgcgataccagatagatgataaaccaaacaaccagattcgaatatccaagcaactcgcagagtttgtgccattggattattctgttcctatagaaatccccactataaaatgtaaaccagacaaacttccattattcaaacggcagtatgaaaaccacatatttgttggctcaaaaactgcagatccttgctgttacggtcacacccagtttcatctgttacctgacaaattaagaagggaaaggcttttgagacaaaactgtgctgatcagatagaagttgtttttagagctaatgctattgcaagcctttttgcttggactggagcacaagctatgtatcaaggattctggagtgaagcagatgttactcgaccttttgtctcccaggctgtgatcacagatggaaaatacttttcctttttctgctaccagctaaatactttggcactgactacacaagctgatcaaaataaccctcgtaaaaatatatgttggggtacacaaagtaagcctctttatgaaacaattgaggataatgatgtgaaaggttttaatgatgatgttctacttcagatagttcactttctactgaatagaccaaaagaagaaaaataacagctgttggaaaactgaaaaagcatatttgattgagaactgtgggaatatttaaattttactgaaggaacaataat

SEQ ID NO: 236904 - DNA, 898 bp, Homo Sapiens
  misc_feature (1)..(1): n is a, c, g, or t
  misc_feature (171)..(171): n is a, c, g, or t
  misc_feature (182)..(182): n is a, c, g, or t
  misc_feature (190)..(190): n is a, c, g, or t
ngtgctttcaaaccctccaaaatagtgaccttatcaaaagccgttcatcagctctttgatacctttgtggttagcccaggtcccatatagctttcatgtgggggttgtttcatatgcccttggatgaatgtgaggaacttattcgaaaattaggatcagatggtatttcancaaaatgtcantgttggancagtaaaaatgagttggagccatgcattttatgacagtcaaacatgggaaaacattcttaaggataggatgggatctgcactgatgatgaaacagcaagaaaccccacatgtcctaaggtagctgctgtaagtaccatagtaaatagagggataacacccaaagcttttgtgttcagaaactatggtcattttcctggaatcaactctcattatttgggaggctgtcagtataaaatgtggcaggccattagagcctcatctgctgctccaggctactttgcagaatatgcattgggaaatgatcttcatcaagatggaggtttgcttctgaataacccttcggcattagctatgcatgagtgtaaatgtctttggccagatgtgccgttagagtgcatagtatccctgggcactggacgttatgagagtgatgtgagaaacacggtaacatacacaagcttgaaaactaaactttctaatgttatcaacagtgctacagatacagaagaagtccatataatgcttgatggcctgttacctcctgacacctattttagattcaatcctgtaatgtgtgaaaacatacctctagatgaaagtcgaaatgaaaagctggatcagctgcagttggaagggttgaaatacatagaaagaaatgaacaaaaaataaaaaagtgcaaaaatattaagtcaagaaaaaacaactc

SEQ ID NO: 236905 - DNA, 533 bp, Homo Sapiens
gagacctgctgtcatagagtttacaggccaggagaatgcagacatttatagattttttaaaaccctacctataataaattgtatagcattactcaaaggggaaattgtaaggcatcaacctaaggtgagtatataccaggagaacccaataaaacttagtggattgttaaagcctctttgaaacctggaagcggggtaagagttagtagggagatgtcatcagtaaattttattaggaaaaagggcagaatttcaaatcccacaaggtctgaaggaactgggcacttttgaagaacagaaaaaaggccagtgaagaacaggaaagagagaagggcctagttctgtagaggaaaatggaaactagatcaggtagggcctttgtaagctgcataaaggattttggattttatcctaaactcagtgagaaagcatttttgaagggttttggtggggtaggatcagtgtacatgacctatcagatttgcctactttttaaaggcttttatgagccatataaaaccattgtagctttt

SEQ ID NO: 236906 - DNA, 488 bp, Homo Sapiens
tatttacgtgtaaaatcaatgatggctagtatgcatttttggtcaaattttgttttccttaatacgggagagcaaaattttgacagaaaatggttcgctagaattgagcttagattctttttatttttaaagagaaactagaagaatgcttctcttcttgaatgcagtatattgctgtaggagtatcttcgttttggtgcctgtgaaacagttatggaaaatggcaacatgaaaacgagaacaactaatgtctgaaataagtgtttctggatgttgaaaagcatcatatgtgtgtttttatttgacacaatttgctttgcaggttgcatttatgataaacctctttgcacctggttattttatgtcagattcagtaaaataataagtcagttgtctggccaatcaggtttcttccaacaccttatttgttttgaatcttgaccatggaaacctataaaataggagcctttattaagaactcaacagaa

SEQ ID NO: 236907 - DNA, 499 bp, Homo Sapiens
gtaacacaggcgataacattgtatattctgctttaaaattttcagactacttttacatctgttaactcatcgtatcaatcaataaattaccttatctgaaatggaaatttgttcaagctgagtaacactgatcccctgaatatttccccaaatgccatctactttcaccatccagaatatgtattaagttttatttggtttcatgaagaaataagtacttttagtttccctctttctcattagcatatctttgaattatctatgtaatgttcaatactctgtgcagatctgttgatgattaggacctgttcatttgaaaccaacaaaccaaccaaccaacaaacaaaatctgtcctaagaaggctacacaaatttaagagatgcacgagtttttctcactagtgttagcataagacttttacagacatccaaatttttcatgtaggtgagtcaaagggattgactggagtgactttgttactgtaaaaagagacctttt

SEQ ID NO: 236908 - DNA, 471 bp, Homo Sapiens
tgagaccatcgatcttaacatatagtaattgtcatgcataaaattttattgtatcaggcttgactgatgggactatcaaataatatattaggcagcattctttgtaataacaaaatattgaaaataatctgaatatccagattttctaaataagcaattgggggtgtagataaaatgtcatatttgtatgatggaatattatacaggcagttataagaaataaacttatctgtatagaacaacatagctctttttaaaatgttgagtgaaaaatgaaagatataagacatgcactattttttttaatatatacacttataccagaaacagttatttttttcattcatttttaggagtgggtacgtttgtattcaagtctaaaaagatgctgactaaatccatcaatagaagggaataagataagtgtagtggttaaaagagacattgttttatgaaaaggctagaatgacc

SEQ ID NO: 236909 - DNA, 919 bp, Homo Sapiens
  misc_feature (310)..(310): n is a, c, g, or t
tctttcttttttttaggatagctgatattttgatacaatctctaatttgcatgggcacaacattttctatatttaaagaaattagtgtttggctttctgtactgcttatggtgtaggatcagggggttaatggaatcacagaaaatgatattctgcaagattttctttttaataaaaagtttgggggtgcaatataagaagtttatataatatgcagtacattatcaaaaagagaaggtagttaatgcagtagaaagtagtggtaataattcctttttaaaaaaatttcggtagtcatatagtaacattntgctatatgaaaactttggtatattctgtggttacaactaagattgtgtctggcagctcttttttggggatgtgtgtgtgtgatttttaacagaggtattaaaggctagcctaactgttgtctaaaaagattgtacagtatttaagggattttccttttagcttttcatctccagtggcattaaacataaaaagaccctggcattttttcacatacttgaatccctaaatgcacctgtctttcactttttgagacagactgaatatatctaaaatttccagcaataaaaaaaaagcatttaacttgcaccaagcaagaaaatataaatacagttaactgcattaagataatcacgttaaaattgttactatgcagcacagaacttcattcttatagtattcttgggttcaacctttgaatcaattttaccactgattaaataaatgactcaaagacatctgtaagtcatgctgctgtgttttgaaagtctttaactaaattaagattgcagaatgatagtgattattcaattagattttaagtaaggattgtgatattagaggctggcacaatcccttatttttttaaaaaatcagataggcataaata

SEQ ID NO: 236910 - DNA, 900 bp, Homo Sapiens
agaaaaattaaaatgtttttcaaggccttcaaaaatctctctttaatgtccagaaagtttaagagcgtgttaaggtaaagtgaaacctgattttttctgaattttgttctaaacaaactcagcatgcgaggaagcacccttcccagctccaggggcaatactgatgtaaggtgcctcgtaaggatacatttttcgctcatgtatgcaaaattcctatcagttcatttgcacagccagttccaatcatgtatgtgatcaccagattaaaagcttcatccagaaagacaagactcctcagaacgaatagtagacaagtaagactgctacccacagaagccagtacgcttcaggtgtgaggcggggtaactactcatctcttcacagagccaaggaaagaaaaagaacgtctctaacatgatttaccattttaaacagccttataagttttgtctcttaaaatcatgctgcagaaggagggggtaaaagtcgtgttctgccctgtctgtggcattggagtgccccgctaggtaagaagcaatgcttagatcttgcttccaggcagcagcttgaattcccgaatcttcctgcaaggtgcatacaaatgcagcgtgagaatccatacacgtaatccatattcaccttcccatccatcccgcagaagaggcatggtgacacccaggctactgtccatgcttgagaggacgtatttgaaggttctgttactacaagttgggaatattcacggacatgcctgaataccccggctgtaactcacacgtggtctgtgtaagtggattaacctcggggcggccttgtttaatcctgaataatatctgaaagactgagtttacttgggaatggtagtttttctatgcacattaaattttttagccgttaaaa

SEQ ID NO: 236911 - DNA, 873 bp, Homo Sapiens
  misc_feature (12)..(12): n is a, c, g, or t
gcggtactaccncagtggagatgctttgcttcagggtcagatgacgctacgtgtcgcctctatgacctgcgggcagatagggaagttgccatctattccaaagaaagcatcatatttggagcatccagcgtggacttctccctcagtggtcgcctgctgtttgctggatacaatgattacactatcaacgtctgggatgttctcaaagggtcccgggtctccatcctgtttggacatgaaaaccgcgttagcactctacgagtttcccccgatgggactgctttctgctctggatcatgggatcataccctcagagtctgggcctaatcatcttctgacagtgcactcatgtatacctgagaatttgaaatcttcacatgtaaatagatattacttctagaggagcttagagtttattgcagtgtagcttaggggagcaacccatggctcacaggtcactaagcgtctccaatatgactattaaaactgtcacctctggaaatacactagtgtgagccttcagcactgcgagaataccttcaagtacagtatttttcttttggaacactttttaaaatgtatctgtttttaaggttattctaaattatagtagcctcaactcattctgtcaccagtagaattcagcagttaatatattccatattatttctttgaatcaattcattttcagagcactttaaagtctgatatttctcgatgtgcactgtgatgcctggaaccttcctctggaagtgctgattttatggactgaggactggtgactggtctgtgatagaagcaaattccaattccaaatgtattagacaaaaatcatttttttagaaatgtgtttttaattgtaaaaagtatctt

SEQ ID NO: 236912 - DNA, 1000 bp, Homo Sapiens
cttgggcacrgakttttrtccmccaaatcagagagaggakggcttttgatcagatmccctcccaaaaaaaaaaaaaactaaaactaaagcaaaaatcaaacaaaatctggctgagtttagtggggtggttggggaaggtacatagaccctcctcttgcccaccctagacagccctctcatgtctgaacctcagcctgggagttagatttatttgtctctaaaatgaagtcagtggatagatgctttgagggattttgagtagaaacattcatagttaattttcactctggccaatctgagtttgatgtgtgtgttctggaacattcctccagcttttggtggtcagatggcccagagatatgggggacaggaggaagagggtaaatgaaccacagtgagcaggttctaggaggtacctgcatcagacaagctggtggaggccacgtggcaagccacatctactgaggcctcatgctgctcttgctctgtaagacacggagcccagaaacccatctgcacttcctgagacctgcctggggaaacgggggcagggaccaagtgaggcctcatgtgtgtcttcaccgtgctgtcctcacaaggccaggtgggtgcccaaagggagcctgacaggctgttgtgttaatttattgttcttgcacacctgcacagcctccctctggggatcccacctggagtggaccaggggtcttgagaaatggagagttggctgcaaaaactctcatgcactagatgtggcaccttggagggcagggtgagacaagcagcccagaaatactctctcaagtggaggggagaattttgagagtggatggaacagtttggtggtttcagagaatttctaggtttctacttggatctacttctgatacaaacttgcacttggtgccctctggtggtgtttagttttagttccgtaagagaaatgattcctagtttgctaaattggtggcatctttgggaggggtttctgtcttcactg

SEQ ID NO: 236913 - DNA, 913 bp, Homo Sapiens
ggcccggggtgagggccatatcgccgctttatttccgagaaatgtagggcagacctcccccggccccttttggggttcccggccccggtcattgggttccgtgcctccagggttggtcacgcggggtctcttagggccaaccaaggggccccccaaggggctttttaactccacacatcctccaacccgggggggtggtgggccaccccctctggtctgtgttagggacagaggaaaccttggtgtgcctcctggtgtcccagaactggatcttctgcataccccagcttctcaacatgccactgctaggggtaccccagctgctgccactcctgctggagggtgaactggggaccctgcaccctccgggaagccatggagtctgctggaggcaccatatcagcctgcgggactagggtggggagcaaacaggccagcggtggaggtctggacagttcaagtgtgatgcagctgtggcaaggagaaatccttccgcctctgggcctcaggctgcctgtccataaaatggggacatggccagctgacggacaactgagtctccggcccacctaccaccgccagccaggatcccccaaagtgtgcagagggctcagcagagaacagtatgggaccccctcaccaggcctggaacacctccagccacaaagaagccaaaggtcagtccctctgctccccagcaaacggtgcctcccaggcattctcagtgccagggcttcatccctgtgaaggcacagggcctgctagtgggcacaggggtggctagttggggcctggggcagaggagggctgcaccaggcgtcctggggaatgtgctcagtgaagacgacactgggctttgcacagcctggtgtcgctgtacagaaactgtcaagggaataaaggtgttctttgt

SEQ ID NO: 236914 - DNA, 906 bp, Homo Sapiens
  misc_feature (266)..(266): n is a, c, g, or t
ccctgtggggggctgataaaacacaggtcccctttgccatttctgttccaggctctagtgaaaaagggctggcgttctttcccttggttcaaagtgttagaatggaaaacctgagtttcgttcaaaaatagtgctgtgggttaccaccgtctccccttgcaccccatttcttaccttgtagctcatgaccattgtgtatagcatttctacactttgtttcttggtccttggcaataaaaagaatgatctccctgagcctttgaccnccagataaacccctcccaattaatgcattttcatttcctactgatacaaggcctggagagggctgttgggggccctcagggagggttcaactctgagacgagaactgccttggtgaaggcaagttcaagcaccacttgagactgggggcagcatggagtagggcagggctacgggggtacacggtgcaccctgcaacttatacctgagcccagtacaacaaaggtgacgggtgtgtaggtacacacccagagatggagcactgcagatcagcaacctcagccccacctgggaatttgctggaaatgcaggctcaagcccctccccacacctggtgaatgagagagccccagcctgacccaagcccagggcgactcccataccctgaagcctggggcatgctgggcagcaccggtgcccaaatctggctggtggacagaagcacctggagagttggagagctttttaaaaagacatctctcagcacttccctctctgcagattctgactcagtaagtgaggggtgaggcacagtcatttttctctattctgaagctctcccactgttttcaatgtttaaccaactggggacccctgctctttaagtatattacagggtaataaagatattgttggtatgct

SEQ ID NO: 236915 - DNA, 919 bp, Homo Sapiens
  misc_feature (42)..(42): n is a, c, g, or t
  misc_feature (50)..(50): n is a, c, g, or t
  misc_feature (342)..(342): n is a, c, g, or t
attccaaatctttctgttattcaacatcaacggcgttacgcnaacagggnaatagactgagttgggcaaaagctggggtaggacaaggacttcccatacaaatttgagatagatctcgcctgtcttaaagctgccatttgctcattctacccactctggctgccgttgtcctgtcctgcttctgcgccagagtgtttaataagcactcccttcctgctgtgttacagaactgtaggggaggccatggaaatgactctaaagatacaaaattttgaagaggtttgtcagacaataggatagatgttaggaggagacacacctcttgtctgagaacctaggccncaggtatcactgcactttaagaaactggaggctgcaacaggagggaaaggcagaatgatatcacagcagtactatttttttttttcagaacatttgttttgatggctgttagtccccctctcttggagcattttggggcactaatcttgttctcttgtgtcccagcttttagacctcttacttccactgctagtagctagcacttactgagcacctgcaatgaggtaaagactcagctaagggttttacaggaagtagattaattgatcctgtcaccaaccatatgaagtaggcactgttaccatctgcatctccagatgagcaccctgaggtttagagagattaaatcacttgcccaaggtgaaccagctggtaaaaggtgatgccaggtcttgaagacaggtccaccttcaaaatctattctctttaccattatgctcgatggtttgtttgttttataatttatgtatatgtattatcctctcaactagattgtaagcacttggaggtgtgacttacaggtctttgtatctcacacagtgccttgctaataggtgctcaataaatatttatatga

SEQ ID NO: 236916 - DNA, 907 bp, Homo Sapiens
  misc_feature (13)..(13): n is a, c, g, or t
  misc_feature (51)..(51): n is a, c, g, or t
  misc_feature (68)..(68): n is a, c, g, or t
  misc_feature (137)..(137): n is a, c, g, or t
  misc_feature (173)..(173): n is a, c, g, or t
  misc_feature (203)..(203): n is a, c, g, or t
tggctttaacttncaggaagataaagaggatgagagcttcagaaaaacagnaatcatagattctcacnagatgaaccaaaaactgaaacagagtcaaatgtaaatgcctatgaagagtgtccttctggaattcccantagatatgtggaataaatttcaagaattgcataaanaacattctgaacagaaaagcacacctcaangattcagagggaaaagaagaaaacgctccagaaaagataaattgaagaatgaaaaagaattacatagtgaaccgtcctcaaatgaaacccagtggaaagagcttactcagtattttggagtcaatgatagatttgacccgcctgttaaaaggaaaaaagttgagaagtcaggccttgaaaagaggatagaccaggctgtggaggagtggaatattgagaaggctgaggaactcagcaaccagctagctactcgagagcttggtgtaaaaattgccaaagcagttgcctgccacaactttgtaaaagccaaaaaggaggttgaaaattcacaggctgcccgaaaaaagaagaaacttgcatgggggtttgaagcaaagaagagatgggaaaccaaaagcaacatgggatacatgtaacttgccagagtgcttcaagacatttgtagactcaaatgctcaatttactgagaatgttttcctgcctatgttaatatgtcagaaaattgatagcactaaaacaaaaataagcataaaatttgggattttgattatcagctcttttcagtctttctttaaggactttgtcctattgaagtgaataaaatgaagcattctgttatttgtataagaaatgtaagaaaaaaaatatgaaagaagaggataggattttgtttatttgtaggatggagcccttggtataaaatc

SEQ ID NO: 236917 - DNA, 926 bp, Homo Sapiens
  misc_feature (74)..(74): n is a, c, g, or t
actcggctaaagggggaaaagctttcagaaagcaaccatgaacaaggctgtccaggaaaggcagctgttcccanccccaaccacaaagggctaccctttgaccaaatgtctttctctgcaacatggcttgggcctaaaatatgcagaagacagatgaggtcaaatactcagttggctctctttatctcccttgcctttatggtgaaacaggggagatgtgcacctttcaggcacagccctagtttggcgcctgctgctccttggttttgcctggttagactttcagtgacagatgttggggtgtttttgcttagaaaggtccccttgtctcagccttgcagggcaggcatgccagtctctgccagttccactgcccccttgatctttgaaggagtcctcaggcccctcgcagcataaggatgttttgcaactttccagaatctggcccagaaattagggctcaatttcctgattgtagtagaggttaagattgctgtgagctttatcagataagagaccgagagaagtaagctgggtcttgttattccttgggtgttggtggaataagcagtggaatttgaacaaggaagaggagaaaagggaattttgtctttatggggtggggtgattttctcctagggttatgtccagttggggtttttaaggcagcacagactgccaagtactgttttttttaaccgactgaaatcactttgggatattttttcctgcaacactggaaagttttagttttttaagaagtactcatgcagatatatatatatatatttttcccagtcctttttttaagagacggtctttattgggtctgcacctccatccttgatcttgttagcaatgctgtttttgctgttagtcgggttagagttggctctacgcgaggtttgtaataaaagtttgtaaaa

SEQ ID NO: 236918 - DNA, 939 bp, Homo Sapiens
  misc_feature (277)..(277): n is a, c, g, or t
  misc_feature (345)..(345): n is a, c, g, or t
  misc_feature (908)..(908): n is a, c, g, or t
cttttctgtttccgaaacaattggtggtgagccagcccgaaccaatggggaatgattcccctatcaagctggttcacatggccctccaaaggaaactccgctgggaacccacctaaaaaaacccccaatattttccaaatggttaagtcggaaatccttaatatgccttgaggccttccagaaagtctttcatgaaagtggatgggtaataatcccagtatgtttgccaacattctagatgcaaataaagaagctgataaaataatggagaataagncaccttcactgggccaagatggagaacaacaatttggatgaactaaataaaagcaagatcattgttanaaagaaacccaaacaagtaaatccatttcatttaaaaatgggtcatgaagttttaagacaaaggaaaaattggtggaaggatggtcgttttcagtctgaatgggttggtccttgtgtcatagactatattacagaaagtggatgtgctgtcctgagagacaacactggggttagactgaaaagacctatcaaaatgtcccaccttaagccctacataagagaatccagtgaacaagaaagtctttatctcttgcaaggttcagtagtggcagatcatgactacattggattgcctgaaattccgattggagcatatcaagcaaatattctggtggaagatgcaactattggtatagtcgataatgaattactgacatcaagcaaggatcgtgaactattagaatatagaaatacgaaaatctctccattgatagacgatcatagttctcttgaaaagcagactttcagtctgttggactcttcaaaccaggttcttgaatacttaagttagtaaataccaaaatttatttaaattgtttgtttagaataataaattccttaantatatccttattccattaaaaaccgttgtat

SEQ ID NO: 236919 - DNA, 889 bp, Homo Sapiens
  misc_feature (832)..(832): n is a, c, g, or t
cagraataattcgcatccaccagatgaattctgaactgtcagtgcttgctmacttcagtcaacctgaaatagtaccaatttctaatataacagaaaatgtgtacataaatttgacctgctcatctatacacggttacccagaacctaagaagatgagtgttttgctaagaaccaagaattctactatcgagtatgatggtattatgcagaaatctcaagataatgtcacagaactgtacgacgtttccatcagcttgtctgtttcattccctgatgttacgagcaatatgaccatcttctgtattctggacactgacaagacgmdacwwttatcttcacatttctctatagagcttgaggaccctcagcctcccccagaccacattccttggattacagctgtacttccaacagttattatatgtgtgatggttttctgtctaattctatggaaatggaagaagaagaagcggcctcgcaactcttataaatgtggaaccaacacaatggagagggaagagagtgaacagaccaagaaaagagaaaaaatccatatacctgaaagatctgatgaagcccagcgtgtttttaaaagttcgaagacatcttcatgcgacaaaagtgatacatgtttttaattaaagagtaaagcccatacaagtattcattttttctaccctttcctttgtaagttcctgggcaacctttttgatttcttccagaaggcaaaaagacattaccatgagtaataagggggactccagaactccctctaagtggaatagcctccctgtcactccagctctgmtccgtatgccaagaggagactttnattctcttactgcttcttttmacttcagmgcacamcttatgsccaasccmagctwaa

SEQ ID NO: 236920 - DNA, 901 bp, Homo Sapiens
agaccctttgtgtcccagggtaatggaggccctcttccattatggcactggcactgtggggcatgagcttgcccttaaaaagaaaagaaaggccaggcacggtggctcgtgcccctaaatcccaagcacactgggaggccaaggtgggaggaatgctggagtccaggagtttctacatgggagactctgtctctacaaattttttttttttttttgagacagagtctcactttgtcacccaggctggagttcagtggcgtgatctcggctcacagcaacctccgcctcctgggttcaagcgattctcctgcctcagcctctggagtagctgggattacaggcgcgcgccaccgcgcctggctaattgtattcttagttgagacgggtttcgccatgttgatcgggccggtcaggctggaatttctgacctcaggtgatccaaccacctcagcctcccaaaatgctgggattataggcgtgagccactgcacctggcaaaaaattttttttaaaaaaggagaaagcagtttaaccacaaacagtgaaacagagctggcagacgcctgaaactccatggaaccatgcagctgtaccctagggctcctcccaggaaaagagagatgtcaacgtggcccaaggtgtcctgaagcactgggattggattaactcgagcgatggccttcccagccctccgtgctgcagagcctctgctcgctaggctgccttcatctcactctgtgtgctgtgcctgtgcacctgtcttgtcaataactgcatatattgtgttgcgttgcctgtcttgctggataactgcatatattgtgttcagttgtgtatttgttttgctttcagtctatatacagttgggtttccaacctctatctggaataaacagtgcagc

SEQ ID NO: 236921 - DNA, 941 bp, Homo Sapiens
  misc_feature (898)..(898): n is a, c, g, or t
  misc_feature (911)..(911): n is a, c, g, or t
  misc_feature (927)..(927): n is a, c, g, or t
aaggggaatcttttttttaaaattttcccaaaccaaatagttattttgaaaacccgggtttaagaatgcagactttttaagactgaccccaagaatatctgggccagaccaattcaagaggcaaagccgggccatctgtatttttttttttccaaagacaaagtcttgttttgttgcccaagctggagtgaagtggaccaatttggctcactgcagcctcgcctccggggttcaagcgattctcccgcctcagcctcctgagtagctgggattacaggcgcgtatcaccatacccagctaatttttgtatttttagtagagacgggttcaccatgttgcccaggagggtctcgaactcctggcctcaagtgatccaccggcctcggcctcccaaagtgctgggatgacaggcatgaatcactgtgctcagccaccatctggagttttaaaaggctcccatgtgagtccctgtgatggccaggccaggggacccctgccagttctctgtggaagcaaggctggggtcttgggttcctgtatggtggaagctgggtgagccaaggacagggctggctcctctgcccccgctgacgcttcccttgccgttggctttggatgtctttgctgcagtcttctctctggctcaggtgtgggtgggaggggcccacaggaagctcagccttctcctcccaaggtttgagtccctccaaagggcagtgggtggaggaccgggagctttgggtgaccagccactcaaaggaactttctggtcccttcagtatcttcaaggtttggaaactgcaaatgtccccttgatggggaatccgtgtgtgtgtgtgtgtgtgtgtgtgtgtgtgtgtgtgtgtgtgttttctccctagaccccgtgacctggagnatgtgtatttgtntagaacattaagaggnaagtgtctgcgcag

SEQ ID NO: 236922 - DNA, 880 bp, Homo Sapiens
aagacccccggaaagcgtggcccgggccccctttcttcctaaattttgtttgctatagtgacccggtaggcgcgtttaaaatgagggaagcaggcccttgccacacggccagggccgtccgccgttctcccggcctgtcctgttggatggaggccgttagacgcatatgaaactgcatgccgcctcctccagagggtggctcaggacacggtgggtgtcaggcctggtcaggcaagggggctttggccacatgggggggcaccttcaggtgcacaggaggaagggcaggggcggacagacaccctgagcccttagacttgtgggagccaagctgaccagagtgaggttttttttagcctaacggaattagagtattcgctggttatccggatcagaagggacggtggcctggccggacttagaggaaactctggggcacaaggaggtgatgcctgtcacttggacatgggtgcagccgccagagccgccctccagggcacagggtgggcccgggtgagcttgtgtgctcacacctgggcaggccccgcggcagcaatggcagctctcctgtacaggctgagtttcagccacaccaagaagtcaaagctaaccgaggctgtgccttccgagacccccgggatggcccctgggaggccaaggagtcggggactgggtacccggagcagagtcactgtggccacggagaaccgcagctgagctttatgaagccacgtggccacacctcccggtgcctccaccccaagcaaacacagatcgctcagaaaatgggaacccagggcaaattgtatgtgctccttactgggtttattataagtgtcacatgttttttataataaaaacatagggtatttcaccttaa

SEQ ID NO: 236923 - DNA, 991 bp, Homo Sapiens
  misc_feature (957)..(957): n is a, c, g, or t
agaggagttaaaaaccgcccagaggagttcatgaaaatgaataactttattgaactatttagccagaaaataaatttgatagataaaatatctcagagaatttataaggaagaaagggaatattttgatgaaatgaaagaatatggcccaattcatattctgtggtcagcgtcagaagaggatctggttgatactctaaaggatgttgccagctgcattgacagatgctgtaaggccactgaaaagcggatgtctggactctcagaggccctgcttcctgttgtacatgagtacgtgctttatagtgaaatgttaatgggtgttatgaaaagaagagaccaaatacaagcagaactggattccaaagttgaagttttgacctataaaaaggcagatactgatctgcttccagaggagattggaaaacttgaagataaagtggaatgtgctaataatgccctgaaagcagattgggagagatggaaacaaaatatgcaaaatgatatcaagttagcatttacagatatggctgaggagaatatccattattatgaacagtgccttgctacgtgggaatcattccttacatcacagaccaaccttcacttggaagaagcctctgaagataaaccttaatcccattgaggacttctgtttgatctttgggagacagcatttattaaccaaagttattctttctggatctgccgtgtccttataaagtggatgaaaaatgttttgtacccatctggaaaaccaacaacttgaaatctcaggtattccaggtcactgacatgaatttgaagatatatctatctgtatggatatatatctatatgtatatagatatataaatacagagagatatctggcttggttttaattatgttcttaaatttgtgtgccaataattgtatatagattttttttcttaaatatttgactgtggaacatgcnattttaaatatgttgtaaggaytgttttaataaa

SEQ ID NO: 236924 - DNA, 423 bp, Homo Sapiens
ctggccgccactgtcactgtgttcttcctctacaacgctgagctcctccccactgtgctcagggcgacaggtctggggctggtgtctctggcctcggtgctggagccatcttgtccctgacaatcatcagccagaccccctccctcctgcccatctttctctgctgcgtcttagccatcgtggccttttccctctcctccctgctgccggaaacgcgagatcagcccctctccgagagcctgaaccactcctcacagataaggaataaggtcaaggacatgaagactaaggaaacatcatctgatgatgtctgaggaagcggccaagaatgtcattctcaatgcccagatcctgagattggacccataccctgtctccaaccctgccttgaagcaattcaataaagaggaagcaaacaaaaaa

SEQ ID NO: 236925 - DNA, 549 bp, Homo Sapiens
ccaacacactataaactttcaaggagagaggctgtgtcttcttcatgtttatatctgctacaacactgagttcatggcttttcacacataattgctcaacagagcaggtgccatggaaagtcaattcaatgagtaaaattacctcaaaatagtccgttaattcactcacctttgatgtagacagattattctgcattgatacttatctcttactcttaaaattcgctatgtattaataaatattttattgaatattaaggaatgatcactattttaataagatgttctttaccatatatttctatatgtacatgataattagaagtatcaaattatattgtggaatgtaaaagcttttcttctgaagccaagcatttgttttattgtcatttcagtggcaaatatggacttcatattcaaaatgatgttctatattatttttccttacaagctttttgaaaaacaatttaataattccatgattgttgtagcaccactgaattgattctgaaagcttactttttaaataaaaattgacctttatcaagc

SEQ ID NO: 236926 - DNA, 549 bp, Homo Sapiens
gatatgatttctgctgttcaaaaaagtccctaaagagacaggctcttgccatgttgcccgggctggtcctgaactgctgaattcaagtgatcctcccaccttggcctccagaagtgctgggattatgggtgtgagccaccatgcctagccaaaatgtttcttaaggtatacattttgggtcttagaagacttatacatttgtaatatttattactaaatatctcaaagtattacaataaatgttaccatgtgagctactttgaatcaggcttcttgcacaccaatttaaaaatgttaactcttgatatatacactagttataccactcatgtcagtcaataaattttaaggtttaagtgcaggcctttgtttacagaaatcctaattttttgaaaccataactctgacctgacactaaattcctgtagacatgctaaggaaaatctgcttagtatcgagatcaagaacttccattcaaaaagattattcagttatgttatttgcatattaccattgttaaaaataaaaaaatttttaaaagaaaaaaaa

SEQ ID NO: 236927 - DNA, 573 bp, Homo Sapiens
  misc_feature (1)..(1): n is a, c, g, or t
ngaggtttttctgtactttaatgagctagaaaatgcatactataaatagaatatacaaatgatttttacacaaatgaagcattaaaaatcacaaatcttatatttggttatccacagtctataaaataatgttcccaaattatatagtttaaaatacacaatgtttcaagttgcaagacaaaaccagggtagttttggccctaaatcatagctaacataagtaggaattataattaattttataattgtgtttaaattttaaatactctagaatctgaaaatattaaatattaaatagatggagggatcaaattatcaagttttttaacaaaattgaggtaaaaatctgcattaaattacaccaagaaaaacatttctaaaacattgtttccataactcattataaatatttcatcttccgaaagtactctttgattacctctggccttctgggtctggtaattaagttgacttaatatttgcacatagctactgattactcaatacaggcctatcagataaaactaaaatgctgcaacttaatcagaatgatgcaatcttgtcttatatccc

SEQ ID NO: 236928 - DNA, 736 bp, Homo Sapiens
  misc_feature (1)..(1): n is a, c, g, or t
  misc_feature (3)..(3): n is a, c, g, or t
ntngaaaaactatgacatgtcagtcagccttgctgcctgctgtgtgctgtatataagtccattacatattccttatagctggattgaaaacctgaaaatgaaatgaagtccctagagaaacttggccatgctggtgctttttaccaagtttgacaatttaaaaaaaaaaaatcagtgttcaaaggagacatacaaaagtccatttaatgtagcagagatgtttaggggattacaatttctatcccctggtaaaaccaatacttggtagaaggataaagaaaaagccacgtgaaataatactgaatagcaccagaatagccttacactaaagctcgcatgcgcacagggctgggaggatggcttcctcttgccaggccctttaggtcatttcagcaattgttctgttaaacatagcattaatgttatcaagacacagcaagcagcagaaagcttgtggagtcacatttcatagtgtctcatctccaaatcagataaaagtggtatacagggttccatccagaaagcattcagtcagagcaagttaaagtcagtactttctaacatacttttaagatacttatgctgaattagcccaagggagaaaaattaatgtgcttgatgtatttactaagacttgcatctcaagtcttcaataatgcctatttttgaaagaaacctaggcaacgaattgaagagacttggaaatgtgccaattccctaaatgtttttctccccc

SEQ ID NO: 236929 - DNA, 746 bp, Homo Sapiens
cttctaaacattaaaaattgccccttaataaacctatacctattataggaatcttgataaacctttacatttattaaatttgattataaaatcttcttggaaaaaactttggtatgtatcttcagaaggttttttaaaaataatattttaagggcctgtaaacattccattctattaaagcacagcagaataagtaatggatattcaactgcatacagaatatagaatcaaaaaaacaatttattatgtatttgtagaaaatcattaccagagtaagcaaaaaaaccaactatttaaaagtatcaaacttttaaacagttctttttccattctgataaaaaatgttataaaatcaccatactccattcatgtaccttagatgccttttaggataagacctcaaaaataattaacctagtctcaaaaatccattcaagtccaataacaaacttttaaaaacccacttaaaaagacttgacactagaacaagtatacataatcagaacatatactttatatatttagtaatgtactaggttttctcttacctttgtaatttagaatttattggcagaaattacacacacacacacacatatatataactaaaaaaaggtaaatttcagcaaacaaatgcaaacctgtagggtaaatggatttttaaaaaaaattcagtttatcaaatttcatcttctctgccattttagattggcaactattggttatttagaaaatttagactgccc

SEQ ID NO: 236930 - DNA, 746 bp, Homo Sapiens
atcaacacttgattagaaatttccaaattaagggaaagtagtttccacccatctattcacaactttcagcaccaaatggagtttattttttgtaacctattcttcaggacaatgttttttgccttcactttagctttatgctgtacaatcttccagcttttaaaaaaatctcagtgttattttaatacatgaaagaggggtgcttcttcaaaaagttttgcttctttcacataattaggtagatttctgtaggttagatatgatctttaatattatagttataaagctctaacttcttcattttcaaaaaacacaaataagcatgaaaaaaataaagttacccatctgttaaatcattttcttgcagaattaaattaatatatatttttctgaataaacttacttagaaaatatcattttctttcctatatttcaaaattgaggtattgcaaaagatcatgtcagtcagaaagcatgcctttttccttaaaaacaaaaaaaaaaatctgccaacttttgaaaactgtctagaatacaaaaagtagtagtgcataacaaaatttcttgtacagatgaaaaagaacccacaaacatagaaaaaaacaaacaaaaccacacctgggctggaaaaaagcaattattaccaaaaagcctcaaaaaggggaggattctaaaataagcatttttaatccagtaaaaaactattttgtttttcctttttgaaaacaaactatagcttgagagcc

SEQ ID NO: 236931 - DNA, 387 bp, Homo Sapiens; identical to SEQ ID NO: 94778

SEQ ID NO: 236932 - DNA, 823 bp, Homo Sapiens
agtccatgtttaacttttgtaacttcattggacttcaagtcaaagtgaaaaacacagtgagtactgatgatgacaggttatgagtttcatcctccaggaggtacggaaaaaaggaaaactcaagcattctactggaaaactggagctaaaagcagcccatccatggagaattatgggaccagaagatgaggtgggatgtgtgtggcacacgcctgacagctgaaccaaacagggcacacgggctctcctaagagtccctacttccgacagcctttccctccacaaactcagggcaggggaagtgtgcatattttatacaggagcccttcatggctactttactgggaggtgattctttcttggagcagaatacatccccttttgaaagctctcgggaccaggagacacatgtggaaagaactttctgtccctggcagacagggaaccaaaccccttctccttgaacttggacagtcttccctctcttggaagcctctctcatcctttggttttggataacttggcggcattctcacgaagccctgccgaataagaagcactctgcctttagggacaggctgggcatagggtacggcggaatgcatcaacactctaaatcttggcctcccatgcgccttttgtttcccagagatcttctaataattctaatatgtcctaagacatgggagcaatattaaggtaagtggataggaaaagcaatcaagtgacccggaataaacgtcactgtgctatgctacctccgcagaaagggaccgtttcaagaagccattgggtgactcatggtgtcagttccagagtctca

SEQ ID NO: 236933 - DNA, 448 bp, Homo Sapiens
tagtagtcattctaataggcatgaagtgatatctcattgtggttttaatttgcatttccctgatgatttgtgatgttgaatatttttttcatatacctactagccatttgtatgtcttcatttgagaaattctattcaagtcgtctgaccagtttttaattaggttatttgctttcttactattgagttgtttcaattccttatatattttggatattaaccccttgtcagatgtttggtttgcaaatatattttctcattctgcaggttgtctccttactctgttcattatttttgtagttatgcagaagctttgtagtttgatgtaatcccagttgtccaattttgcttttgttgcttgtcatttggggacatacccataattgatcttgaccaaaaggctgagaagtgatttgggtcatattaaaaaatatcattgccaagaaaa

SEQ ID NO: 236934 - DNA, 886 bp, Homo Sapiens
  misc_feature (848)..(848): n is a, c, g, or t
ctggtccccaccctgaaacttgtgagagtgtcttattcaccaggagcccctgggggaggaagtgggctctcctggccagcccaccagggctttggccccggagcctcagaaagatgctgggtccccgaggcctgtggcaaggccgatcagtgtggccccagatcaagtcatgggaggaagctaaagccttgggttcttgccatcctgaggaaagatagcaacagggagggggaaatttcatcagtgtggccagcctgtcaacttaggatggatggctgagagggcttcctaggagccagtcagcagggtggggtggggccagaggagctctccagccctgcctagtgggcgccctgagccccttgtcgtgtgctgagcatggcatgaggctgaagtggcaaccctggggtctttgatgtcttgacagattgaccatctgtctccagccaggccacccctttccaaaattccctcttctgccagtactccccctgtaccacccattgctgatggcacacccatccttaagctaagacaggacgattgtggtcctcccacactaaggccacagcccatccgcgtgctgtgtgtccctcttccaccccaacccctgctggctcctctgggagcatccatgtcccggagaggggtccctcaacagtcagcctcacctgtcagaccggggttctcccggatctggatggcgccgccctctcagcagcgggcacgggtggggcggggccgggccgcagagcatgtgctggatctgttctgtgtgtctgtctgtgggtggggggaggggagggaagtcttgtaaaccgctgattgctgacttttgtgtgaagaantcgtgttctggcagcaggaagataaagccttgccccgg

SEQ ID NO: 236935 - DNA, 899 bp, Homo Sapiens
ggctccagataacttttaatatgaaggatgaacctggcctcggcatggtttcagcaaagatccaaaaatgttaacaactggggcccaagatggaaaaatcaaggtgtggaagattcagagtggccaatgtttaaggagatttgagagggcacacagtaagggtgtcacctgtctaagctttctaaggatagcagtcagatccttagtgcttcttttgaccaggcaattagaattcatggtttaaaatctgggaaaaccctgaaggaatttcgtggccattcctcctttgttaacgaagcaacatttacacaagatggacattacattattagtgcatcctctgatggcactgtaaagatctggaatatgaagaccacagaatgttcaaatacctttaaatccctgggcagcaccgcagggacagatattaccgtcaacagtgtgattctacttcctaaaaaccctgagcactttgtggtgtgcaacagatcaaacacggtggtcatcatgaacatgcaggggcagattgtcagaagcttcagttctggtaaaagagaaggtggggactttgtttgctgtgccctctctccccgtggtgaatggatctactgtgtaggggaggactttgtgctctactgtttcagtacagtcactggcaaactggagagaactttgacagtgcacgagaaggatgtgattggtattgcacatcaccctcatcagaacctgattgctacctacagtgaagatggactcctaaagctctggaaaccataattcaacttttctttttaaatcagctcgaaagcatgtacttaaatgaagcatattcatgtaatgtgctttttttttttttttttgccagcttttctaagcaaatagatgtcgtaatagtcaca

SEQ ID NO: 236936 - DNA, 893 bp, Homo Sapiens
  misc_feature (44)..(44): n is a, c, g, or t
aacaagcccctggcaaagtttccaaataaagtttccttggaacncgaaaggctggaaaggcccccaaagttgccttgttaaggaaccaagaatggccccagagtcagaggcccaagtctgcaaggaccctgttgaaaagctccgaaaaatgtctttggctgccccaagactcttgttgcctttcttccaaggccatggccatgccctttttctcaaatggcaggggctggagggtgtgtgggatttgtcttcagctgcaaccagccttgagcctgctgggctattttcagctgaggaggggtgaatataggaaaaatgcatttttgaaacgtttgcaacatgatcaaggtgttagttctccaccacacaagttgtattcttcttttgccacctcaaaccatcacagagtctttaaatgcaaatcaattggtcaatgctagtcaaagctatgttcttacaaaaaccccagacagctcagagctcagaaaatcctgtggagtggctgctctgtaccgtgggcatccggcagccaggaagtgagacaacataattataactttgttttatgatgctgcatcatttgtactgtttaggtcgacgtgaggacatcatcttatttagaattttccgtttggcattctcttttgggtgggagttatgctgggggttgtaaataatgacaaggctgagatttttatgatgtttaaattgggcacaatgattttgaccttattccccaaacttcttttcttttctactgtttaacatacacaggctatttatacacgtccccagctcccatctgaaacctgtgactcaggtttatgaatggtgtttgtgtagcaacacattgttgctagttattaaaatcagcgacaacttagtgtctcact

SEQ ID NO: 236937 - DNA, 916 bp, Homo Sapiens
  misc_feature (1)..(1): n is a, c, g, or t
  misc_feature (3)..(3): n is a, c, g, or t
  misc_feature (11)..(19): n is a, c, g, or t
  misc_feature (25)..(25): n is a, c, g, or t
  misc_feature (29)..(29): n is a, c, g, or t
  misc_feature (39)..(40): n is a, c, g, or t
  misc_feature (42)..(42): n is a, c, g, or t
  misc_feature (47)..(47): n is a, c, g, or t
  misc_feature (49)..(50): n is a, c, g, or t
  misc_feature (55)..(58): n is a, c, g, or t
  misc_feature (63)..(69): n is a, c, g, or t
  misc_feature (74)..(75): n is a, c, g, or t
  misc_feature (82)..(85): n is a, c, g, or t
  misc_feature (94)..(96): n is a, c, g, or t
  misc_feature (112)..(112): n is a, c, g, or t
  misc_feature (119)..(119): n is a, c, g, or t
  misc_feature (131)..(131): n is a, c, g, or t
  misc_feature (171)..(171): n is a, c, g, or t
  misc_feature (178)..(178): n is a, c, g, or t
  misc_feature (192)..(192): n is a, c, g, or t
  misc_feature (250)..(250): n is a, c, g, or t
  misc_feature (256)..(256): n is a, c, g, or t
ngngtggtggnnnnnnnnncttgtncatnatgtcatctnncnctatncnnaaatnnnnccatnnnnnnncattnncatcctnnnnctgcccatnnnagatgagctcttcatnctgggtngtgctttcttgnctatgcaggtgggctctggtccactgcccctttggcaagnccatttnccgggtggtcatgnctgtggatggcatcaatcagttcaccagcatcttctgcctgacagtcatgagcatcgnccgatncctggctgtggtccaccccatcaagtcggccaagtggaggagaccccggacggccaagatgatcaccatggctgtgtggggagtctctctgctggtcatcttgcccatcatgatatatgctgggctccggagcaaccagtgggggagaagcagctgcaccatcaactggccaggtgaatctggggcttggtacacagggttcatcatctacactttcattctggggttcctggtacccctcaccatcatctgtctttgctacctgttcattatcatcaaggtgaagtcctctggaatccgagtgggctcctctaagaggaagaagtctgagaagaaggtcacccgaatggtgtccatcgtggtggctgtcttcatcttctgctggcttcccttctacatattcaacgtttcttccgtctccatggccatcagccccaccccagcccttaaaggcatgtttgactttgtggtggtcctcacctatgctaacagctgtgccaaccctatcctatatgccttcttgtctgacaacttcaagaagagcttccagaatgtcctctgcttggtcaaggtgagcggcacagatgatggggagcggagtgacagtaagcaggacaaatcccggctgaatagaccacggagacccagaggaccctcctc

SEQ ID NO: 236938 - DNA, 916 bp, Homo Sapiens
aataaagtgttccctttggggcgagagtgttttaacttagaggggaagggttttaaaggggcaacccaggttgtagccaggtatcaaaactggatttcttttgttaggccagaataaaaattccaccaaattttttcaaaccaataaaatggtggtagaaatttgggtgatttccatcttttggcccctatgactaatatggctatgaaccttcatgtccaagtgtttccatttctcttgggtaaatatctagtagagtggctagtcatatggtaactgtattggtaaatcttttgagaaattgctagactgttttccaagtaatgtgtaagggttccaattttcacatccttgccaatacttgttattgtctgcttttttaaatttaaaatttgtgggtatatactaatagtaggtgtatatatatatacatatatatatacatgtacatatatatatggggtacagccataaattattcaaaactaaatctggagatcagttcaccgtctcttctactttctaaggaaaagcaattcttactcatgaatggaaaaatgctctgcagtctctaagtgtgtgtggtggaggaggggaagttgacttgctcctagggagggatgtttaatcacatctaatgtgtcatgaaaattacacacatttttatacagaacaatacatattgactatttcttgtctttctctcctgctagaacatgaacttcatgaggacagagacttgggcttattcaccaccaagtccccagttcctaactccagtcctttggagttagaagcaggttgcccaaagttcatgatgcagaaaaaccattttttccgagatttataggataagtcctgtattccagattgctggcgccaatcaggtactcaataaatgtttgtgagtgaatat

SEQ ID NO: 236939 - DNA, 910 bp, Homo Sapiens
  misc_feature (1)..(1): n is a, c, g, or t
ncattattgcttaacgagtccagaattcggtttaacctatacagaaatgttgtttttgggagttccaaaagcgaccctaccccccaaaaaattcacccccaatattgccttaaagaagatgtaccaaaatgaaattaatgaacttatttcagatagtggtaaaaatgcataacaaggtttcccaaggtaaacctttcaaggtaaaatgtagctgggtcataagaagactttttcttctccaaaaggcaataccaccctgaaagttccttctgtagcctaaagagtttgtaaatgcctttcataatagatagacgcttgagttaactttttgtaggatacttgctccattcatacacaacgtaatcaaatatgtggtccatctctgaaaacaagagactgcttgacaaaggagcattgcagtcactttgacaggttccttttaagtggactctctgacaaagtgggtactttctgaaaatttatataactgttgttgataaggaacatttatccaggaattgatacttttattaggaaaagatatttttataggcttggatgtttttagttctgactttgaatttatataaagtatttttataatgactggtcttccttacctggaaaaacatgcgatgttagttttagaattacaccacaagtatctaaatttggaacttacaaagggtctatcttgtaaatattgttttgcattgtctgttggcaaatttgtgaactgtcatgatacgcttaaggtggaaagtgttcattgcacaatatatttttactgctttctgaatgtagacggaacagtgtggaagcagaaggcttttttaactcatccgtttgccaatcattgcaaacaaccaaatgtggatggtattgcctcaataaagcgtggtccccattg

SEQ ID NO: 236940 - DNA, 905 bp, Homo Sapiens
cgccggcattattgtgggggaccaacgctaacccagtcttttaaagaccaacagggtccgggtcccaatcggcccggttcattcttcaacaaggggccagtgggaaccggcacccatcctataactaatgccaggaggcctgccaaaaggtgtttgttacaagctttgaaaaggttgatctgacccaggtcaaatggatccacattaggggccggaacgcttcggagcaggtgaagatgctgcaacgaataaacgcacacaacaccaggcagcctccagagcagaagatccgggtgtccgtggaggtggagaagccacgaaaggagctcttccagctgtttggctacggagacgtggtgtttgtcagcaaagatgtggccaagcacttggggttccagtcagcagaggaagccttgaggggcttgtatggtcgtgtgaggaaaggggctgtgcttgtctgtgcctgggctgaggagggcgccgacgccctgggccctgatggcaaattgctccactcggatgctttcccgccaccccgcgtggtggatacactgggagctggagacaccttcaatgcctccgtcatcttcagcctctcccaggggaggagcgtgcaggaagcactgagattcgggtgccaggtggccggcaagaagtgtggcctgcagggctttgatggcatcgtgtgagagcaggtgccggctcctcacacaccatggagactaccattgcggctgcatcgccttctcccctccatccagcctggcgtccaggttgccctgttcaggggacagatgcaagctgtggggaggactctgcctgtgtcctgtgttccccacagggagaggctctggggggatggctgggggatgcagagcctcagagcaaataatcttcctcagagc

SEQ ID NO: 236941 - DNA, 925 bp, Homo Sapiens
attttcagataaccattaaagggcaaaggtgctcaaaatggacccataaactttggcatttaaaatctacatcttgagatctgtttgccacagcattgtcttacaagtccgaaaaggtaggtggcaaaatttttaagaatcagtattgaaatcagtgaatttcaggaatagagggaaggactatgatcagatcttgattttatctactttaaattgtctatttatttgatcccaaccttttgtacttctgaagtgtaactgttttattcaacagaacatgaactaggaagagagattagaaaacagaatgtgaacatttttcttttaataattgtaacaaagatttgttgggagagaaatttccaaataatgagtagtgtatagtgtaaggaataattgacctggaattattggccccaaactctgattcttgctgaagcatctatgagaagtgtgattttagccaagtctgtgccgcattctttatatgtaggaattaagttttgatttaatgatttctgaattttctttcagctctactcaattaaggggtatcagtatgtgaaatggaatatagaaaagtaggcaattctttacttttctatattcagtttcataaattaataccccataattgcccattatataccaaagacaatatctcaagttatctcattgtagcagtgtctgtgagtcaaaacttcaattttagtagagtcacactttctttatatagaaaaattcatgtactcactactcatgtagttactgtatctttaccttcagtttgtaaaaatgactaaaagtagggaaaacaagtgttaaaacataatggataagaaaaggttggaaatcatatggcaaatcacatgttcctcagcctcaaggtgtgtttagttgtaaagaaagaataaaattgttaaat

SEQ ID NO: 236942 - DNA, 700 bp, Homo Sapiens
tcttcagtgaggggccttaaatcgattttgcaagaatttatcaggatcagggtagatgtttatatcgttgaaacgatgatgactttcattgagaagccttaccgggtatgaatttttttgatggtgaagtgaaaagctcaatatttttcttaacaatccatgatgctgttttgcatattttgatgaagaaagattacagtacttcaaagtttaatcccagtcaggaaaaagatggaaaaattgattttaccataaatacaaatggaggattacgtaatcgggtatatgaggtgccagttgaaacaaaattctaatcaacatataattcagaaggatcttcatctgactatgacataaaaacaactttatacccagaaagttattgataagttcatacattgtacgaagagtatttttgacagaatatgtttcaaactttggaacaagatggttctagcatggcatatttttcacatatctagtatgaaattatataagtattctaaattttatatcttgtagctttatcaaagggtgaaaattattttgttcatacatatttttgtagcactgacagatttccatcctagtcactaccttcatgcataggtttagcagtatagtggcgccactgttttgaatctcataatttatacaggtcatattaatatatttccatttaaaaatcagtgttactttg

SEQ ID NO: 236943 - DNA, 877 bp, Homo Sapiens
gcwkgctgtggggcwgctgtgcwgctttcyccccccatatcygcgtgcacttcccwgwgcatcttgcatccaaacctgtaaccttacggcaaggacggtaacttkgctgcatttgcctgtcatgygcwacttgwgccwgcaaccwgcacatccatcwgcaccccagtggakgagttcatggaagagttccctctttgtttctgcttcatttttctttcttttcttytctcctaaagcttttatttaacagtgcaaaaggatcgtttttyttttgctyttttaaacttgaattyttttaatttacactttttagttttaattttcttgtatattttgctagctatgagcttttaaataaaattgaaagttctggaaaagtttgaaataatgacataaaaagaagccttctttttctgagacagcttgtctggtaagtggcttctctgtgaattgcctgtaacacatagtggcttctccgcccttgtaaggtgttcagtagagctaaataaatgtaatagccaaacccactctgttggtagcaattggcagccctatttcagtttattttttcttctgttttcttcttttctttttttaaacagtaaaccttaacagatgcgttcagcagactggtttgcagtgaattttcatttctttccttatcacccccttgttgtaaaaagcccagcacttgaattgttattactttaaatgttctgtatttgtatctgtttttattagccaattagtgggattttatgccagttgttaaaatgagcattgatgtacccattttttaaaaaagcaagcacagcctttgcccaasactgtcatcctaacgtttgtcattccagtttgagttaatgtgytgagcatt

SEQ ID NO: 236944 - DNA, 863 bp, Homo Sapiens
cagaaggttaaagaccaggcttgggcaatgtagtgagactcctctatacaaacaaagggttaaaaaattagcagggatggtggagtaagcctgtagtccaagatactctggaggctaaagcaggaggatcacttaagcccaggagttcaaggctacagtgagcttccaccgcaatccagcccgggtgatagagcaagaccctgtgtcttaaaaaaaaattaaggcagtatttaggcttatcagttagattgttttatttaaatccttctaacaatttaggcaattctacattaattttcatcaaaatttatccagtcaaaaaaatttcatgaatactccagatgtaagagagtcacaattttctacgataaatcagacatcttatttctagggtgattgagggaggtggaaagcgcaggaggaagccagtgaagaggacaatggaatgctgagtcaatgacattgacttgtgttcctatctgccatcttgggtgtgggtctttatatgtggttacagatcctttagtttgagggaggtgaggtagagaaataggatgccagcaggtaggaggccgatgtcagtcctcccagcaaagctgtgtcatttatctgaatggaaatgagaaaataaatatgtactcaataagtcacatttcccagaaatgtgattgagattctcaaaaaatagactcagattcttggctgtctgtttaaccaatcacgatatgggatttgagaaataaaatttagggaattttaagagacatgaaagctactaggtcagggaaaataaaaagcttaaataactatttttattgtccagatcctctactgtaatagattaactagtcggataatttcta

SEQ ID NO: 236945 - DNA, 978 bp, Homo Sapiens
catattttctgtttccgggggaaccattcaacacacgcactgtttcccctttgaaagagggccaaggcttgggcctgttaccccagattttcccccaccaaaaggtccaaaaaggtctgaaaattgttagcccacactggccaggggggcccattatccagggattttttaagaaaaaaatgggatatggcacatggccacctaaagagtgccctccaagaactgacttcccaaaaacacgtaatgtgaaaagcccccaggtcatccccccagtggaaaatatccaaggaaaggtctcaagaatcccctgtgcaaggaaacctttcatatgtgaggagtgtgggaaatccttcagctacttttcttactatgctagacaccagagaatccacactggggagaaaccttttgagtgtagtgagtgtggaaaagccttctaatggtaattcttcgttaattcggcaccagaggattcacactggagagagaccctatcactgtgaggagtgtgggcgagcctttaatgataatgcaaatctgatcaggcatcagagaatccacagtggggacagaccctattactgtacagagtgtgggaatagtttcaccagtagttccgagtttgttatacatcagagaatccacactggggagaaaccgtatgagtgtaatgagtgtggcaaagcttttgttggtaattcacccttacttcggcatcagaaaatccacactggagagaaaccctatgagtgtaatgagtgtggcaaaagctttggaaggacttcccatctaagccaacatcagcgtattcacacaggggaaaagccttattcttgtaaagtatgtggacaagccttcaattttcatacaaaactaactcggcaccagagaattcacagtgaggagaaaccctttgactgtgtagattgtggaaaagccttcagtgctcaggaacaattaaaaaggcatctagaattc

SEQ ID NO: 236946 - DNA, 914 bp, Homo Sapiens
gggggaacaatttgtaaattcttgaggcctaaaagaatggtttccggggttattgaaattgggaaacttttgaatacttgggggctaaaagatcgttcaagggtttttgaaactgggaacatttgaattcttgaggcttaaaagttcgtccagggttgtgtacttggaaacatctgaatgctgaggcctagagatcgttcagggtgttgtacctgggaacatctgaatgctgaggcctagagatcgtcaagggtgttgtaactgggaacatctaaatgctgaggcctaaagatcgttcagggtgttgtaactgggaacatctgaatgctgaggcctagagatcgttcagggtgttgtaactgggaacatctgaatgctgaggcttagtccagtgttctctctcccttaccactcctcttccccttccctctataatggcagtacccagggcccggtccatagactactatcgagtgctcctatgtgcatcttagtacgtatcattttcccttgcctttttccttctatcctttcagtggtagcaactgcccttgctaatcaccgtaacctcggctgagaaagaagaggaagcgaaatccaagatgcagctcagttcatcaaagcctagcaggtcccctcagctgccttttcatgcctgccacagactacagtaggacaaaacctgacctggtctttgaagttaagagctaagaaagcttcctatagtagtatctcccatggcacttaccacattctatctggtattacaattatttgtatgcaattaatcactcttagattgtatgttcctggagggcagaatatgcccattcatatttgtatcttcttccttctgctcttggcacctaacacagtgcctgcacacaaacaataaagattgttgagtgaaataa

SEQ ID NO: 236947 - DNA, 910 bp, Homo Sapiens
cggcaaaatagagaagcccgaggccctgccattgggggtaaacgaaaaaaagagtaacaagggttgggagggaaaagtagtcagtaaaaagaaggttttatgtgaagaaagaggatggaaaattaagattaaggaaatttaggcaaattccgggcaaagggggcagctgaaaattataagggattactaatgcgacgcccaaaaagcagaagacccacggaggatgtcttgccagcaaaaaaggaaaagttaaactaaaaaaaaaaaggccgccgttacctattcaccctccactttccgtctcagaatctaaacgtggtcaccttcgagtagagaggcccgcccgcccaccgtgggcagtgccacccgcagatgacacgcgctctccaccacccaacccaaaccatgagaatttgcaacaggggaggaaaaaagaaccaaaacttccaaggccctgctttttttcttaaaagtactttaaaaaggaaatttgtttgtattttttatttacattttatatttttgtacatattgttagggtcagccatttttaatgatctcggatgaccaaaccagccttcggagcgttctctgtcctacttctgactttacttgtggtgtgaccatgttcattataatctcaaaggagaaaaaaaccttgtaaaaaaagcaaaaatgacaacagaaaaacaatcttattccgagcattccagtaacttttttgtgtatgtacttagctgtactataagtagttggtttgtatgagatggttaaaaaggccaaagataaaaggtttctttttttttccttttttgtctatgaagttgctgtttattttttttggcctgtttgatgtatgtgtgaaacaatgtgtccaacaataaacaggaattttttttgctagttgttc

SEQ ID NO: 236948 - DNA, 896 bp, Homo Sapiens
cctttttgtaagaaaaccccggtaaaagaaaagtctaagctaaggcagttgttgaaaaggcctgcaaagatttcaagtttaacatatcggacagccatatcccacttgatttctaaaatgggctgggtccccatcatctgaagattctggtatagaaattataaaaaaaaaaaatcctcctttctttattttcttcacatgcgacaatttcttaagcactttgacatttgggtagttccacactattgagagaataatatatttattttgtgacattgcagatgccaaatactgtacccttctcgtgataacaatacttaggttcaagatcactgttcaaaccctgtcatgctttaaaactgatgcgagatgattttgttttttgcataatcaatacttaagggtgcaatcaactgttagtaattgtgcagtaaagtaaagccctgtggtgtatcaactactagttaagagtctcagttgatttctgtaatgtttgacctaataatagcccgtttcgtctctgacccaacagaggaagcacagatcaaatcaccttggagtggtcaccagggggacagggagccccccaccaatgtatcaatgggtgatttatgatgccttctgccctttggcgagtgaatgggtttcccataggggaagttggcctccctccgtgagctttggaaatgttttctaatagacacagggaggccagttctgtttcagagcaattatcttcccaaattctctgttctggtgttggaactgtgtgccctggtttctgttttcctttctactgctgtaattctctgtctcatcatccttctcttttgtttccatagccttttataatgcatatatgatgctgtaaccagaaattaaagttttttatccaa

SEQ ID NO: 236949 - DNA, 847 bp, Homo Sapiens
  misc_feature (57)..(57): n is a, c, g, or t
aaaactagcattaaattatgttttcaggcccttggttctatgtgacactacattagnaattggatgtttgggttttctttgtgttttgaggtagaggaagaaatgggaatctttttttctcttccaggagtcagtgaaagaatagttctctagctaaggaatggacatacctttgttttaaaatattttatacttacaaaaatctagaaatggagagggaactgttttgaataaggatttaaaatacctgcacaaggatagagagaaactatgtgactcattctgtgaaaagacttcttgcagttgtgagttatttagaaatgatcaaaatttgtaattaggctaatccatttagtgattcctaatattttgtactcacagagaactaattgactaaacaacttgaacgctagtggtttgtccttagacaatctgtctttgaatttaaagtctttatcgctaagaccttgactttaaatttttcatcactacaaccttgaatttaatttcaggtcttcaacatgatgaccttggatttaatttaaagtcttcaacactatgcgctttatcatattattcacagatgcatttttgaaatgtagtatgtaaaagtatgtaacgtgctgtttattaacaaaagattgttcacaacatctcatgtagtttaaatttgtaaatactgcttctgttttgtttctcctttatacacttgactgtctttgtgataagtgacatgaattttatgttaggattaagtatgttttcctgaaacttggattttttttgtaattatataattgagagttaagaatgaaatccttcaagtttaaaaactcacattttaaaa

SEQ ID NO: 236950 - DNA, 908 bp, Homo Sapiens
  misc_feature (891)..(891): n is a, c, g, or t
ccccccgcgggttatccagaatacccttggcaaaaaataggttgactttatgtaacttggggttattttctgggcacaaacaggggtgaaagcatgaaaaatcaacgtttccagaccagggcgcccagggtttaaattacaaaagccttggtaaagaattaggaaacaggaatgggtaaacgcaaagactttgttttttgctctaaaaatttaatgaagtgaattaataaattgtgcccatgcaaggtcctttgggggtttcatatgaattccaaaaatgtttttgctaattctgtaaaaaatgccattgacattttgataggggttgtgatgaatctatatattgctttggatagtatggatgttttaacactattaattctcccaatccatgaacatgaaatatctttccattcacttgtgtcttcttcaatttctttcatcaatgttttatagttttcattgtgcagatctttcacttacctggttaaatttattcctacaatttcattctttttgatattagggtaaattgaattattttcttgatttctataaattatttattatcatactcatacttgtcaggcctctgggcccaagcctgcatgtatacatccagatggcctgaaataactgaagaatcacaaaagaagtgaaaatggccagttcctgccttaactggtgacattaccttgtgaaattccttctcctggctcagaagctcccccgctgagcaccttgtgacccccgtccctgcccaccagagaacaaccccctttgactgtaattgtccactacccacccaaatcctataaaacagccccacccctgtctcccttcactgactcctttttcagactcacggcctgcctgcacccaggtaaatanaacagcccctgttgctc

SEQ ID NO: 236951 - DNA, 879 bp, Homo Sapiens
ctggggaaatatgctttggcagggctggcccctttcctaggattctggaacccgtttggtagaggagtcccttagttttgcagggtagcccccaaaagttataaaatatccaccaacggcttcttattggcataatttcatattctcatcacactaactgcaaaatcaaaccaaataatgccttatcaatgatgcagctcagaggaagtagtgtgtcccccacacccagacagtgccgcgcagcctccagggaacgaggtgccatgtctcgcttccattttgcagtacagggaattttttttttttttttttttttttgctgcctaatgtaatacatcacaaagtaaaggcaagagtgggcttggccctccgatgccaaccacagggccccttttgtaactgaataatcctccaagtagccagtgctcctactgtttacagtgtccctcgtgcccaagtctctgtcactttcatcctgttccctccaagttcccagtcccatcccagtagccagctttatgagattttggtatttcttccctacagattaaaaacatacacaactcatcattatgctaaactaccagttgtatctcagaggtctccccttctgcccttgcttcgagtgtggacttccatggaaaatatgacatgaaaaagtgtagaacgaaacatcgtgtgaaatacctgccacaaatacctagtgcctcactgcccccatcttaggatccttggagccacccgtcaggcaaaacctagctcccttctgagctaaaggagaaccttgcctgacaactccacattcattcccttgtggtgggcacctgtctgtggggagatgtgtgcaagctcagccactctgaatatgaaaaggtcagg

SEQ ID NO: 236952 - DNA, 414 bp, Homo Sapiens
cccacacacatacacaaataccattctgtacaaacatacgtatttaataatttgattcttctgctcaatactcaaagggggctgggaggaacagtttgtctcctagggcatgacatagactggacagtctttttataagagtgatacaactgggaagggagaacgctgtttcagaagataactcagatcctcttcttcaggaaagactgagtttggaacaccagggcttttttttttttttttttttttttttttttgagacagggtctcgctgtgttgccctggctgctctcaaactcctgagttcaagtgatcctcccacctcagcctcccaagtagctgggattacaggcatgtaccactgtgcctagctgaaacatcagtttctgactgaagtggagactacaacaactt

SEQ ID NO: 236953 - DNA, 393 bp, Homo Sapiens
ctgaaggccttccagtgggacaagatgtagaagggaagacagtgatattgaagatcctgagtaggcctaggctaatgtgtgtgtttctgtcttagtgtttaagggaaaaaaaagttttaaaagaaaaattaatagaaaaaagcttacagaatgagtataaagaaaataatttttatgcagctgtacaatgtatttgtgttgtgttaattacaaaagagtcaaaagttaaaatgtaaaagtctgtaaaactcatgaacagtggcatgcacctgtggtcccagctactcgggaggctgaggaggcaggatcacttgaggtcaggagttcgaggctgcagtgagctatgattacacctgtggatagccccactgggcaacatagactctgtcccta

SEQ ID NO: 236954 - DNA, 697 bp, Homo Sapiens
cggtcttttttggttttatcttatcttttttttaccttgatttcttttctccttgtgatggaaatttaatttaatggaacattcttggcataaccttaatttaacaagtgcatttctcttctcaccatggtcaatataaccaaaattaacttcccaactctttaagccttcttttttatcacaatatttatttccacagaaaaattgaccttttcctgaaattacttctttttctactcgccacctaaatccaaactgataataaaaaaattacatttatgccaatgtaaatttaaattatacagaaatctaaacatggagccaacaatgacattcaccaacctaaaaaataaatgtaattcccatcatgacagatttttctcttcttataggatttgaagaaaatacattgaacaatcaccaatttatctgttaagaacaatctactttaagatagcttaaaagttataggtgccaggccacaagatacctaagttaacaaataatatatcctgctctgtaagagtgacaagaaaaaaagaggttatggtatagtaaagaggtagtatattctagtacaaaaaagtacagcctttggagtcagattatttacatttgcattttagctctaccacttaacagttgtatagtactgggcaaattaatctctttttcgcctcagcttcctcatatatgt

SEQ ID NO: 236955 - DNA, 744 bp, Homo Sapiens
tctcagattcttatactactatattttatcccctcaactgccaggttcattaaaaaccctttacatgtcttacggcttcaggctgcaagagccttccctcacatgggtgtttatcaaaatccattcatctcctagtgaaactatctccagtccccgaaattggaattaatcactctattctctgaagccgcataccactttgccaccatcagtagtaggacattaattcttttattaccttgaattatattcacgtatctccactgcatgattcttaagaaataagaatgaaagaatgaaagagagggagggagaaaagggaaagaaaaaaaaaaacagaaaaaaattactcttaaggataggaagccagtcacataaaccactatgttcccacagtgcctattcctcccatggtctacatatggggaactctacagaagaaaagtttgctaaagaaagaacaagatgaatgaaattgattctgggtttaaaaactcagaaattcagtgggatttttaattctcactttaaaatgacattttgctcaagaaagaacaatgtgaatgaaattgattctgggtttaaaaactcagaaattcagagagatttttaattctcactttaagacgtcattacatatagtatgtgttgaattaatgcataaatgaatacacttctgtacatactcatgtaaataccttgtaacaaacttaaccgtatttcccactgaaatgaaacctctgg

SEQ ID NO: 236956 - DNA, 890 bp, Homo Sapiens
acccatcgaggtttgcccatccgtcaggagtcggtcttttcttccaggggacagtggcaaaaaccaatttggccaaatgtggcttgggatgatctctaaagctctaagatggaatcagggtctctcactttcagcactattgacatttggggcgggatcattactttgtcttgtggtccgggggcattgtaggatgtttagcagcatccgtggcctctacccattagatgccagtagcaccacctcctccagctgcaacaaccaaaactctccagacatgggcacatgttctctggggagcaaaatcacaccctggttgagaagccagacataatacgcagatcacatgtaagtaagagagcctaagggccacacaggtgatgctgtacccatgacaaagccagagtcttaaagaggttagagaggtggagaaagagaaaggaaatagagtcccagctgccgagagcaacagatgctgactagatgttgttgatagtcatcttaaactgagttaaaaaatgctgagaagccatcagctgccatcctgctctccagggacaaagctgctgaaaaaggcctggagatcaacaaagcgccagacacaggtgcactgagcaaagaaaccagagattgagacaaaaaagacattccctcaaagactactcatttccaagggggagaaaaagtggagtcacaaaaaacagttgaggctgggtagagtgactcacacctgtaatcccagcactttgggattactcccatgctaagacgggaagattgcttgagctcaggagttcaagaccggcctgggcaacatagcaagaccttgcctctagaaaaagggaaaaaactagccaggtgtgatcccgggaatccggaccggtccagcc

SEQ ID NO: 236957 - DNA, 842 bp, Homo Sapiens
aggcccctccaagggcccccccagccctttggttgaaatcccagggccctctcttcgggggtggggcccccgcgcttgtactggacagacggcgcgcacgcagcgggaccgatttatagaataaaaagtcttttttttttttctggcttcgcatctttgcaaatactcaatattcctgtcaactaagaaggctaagggaatgggcggttgaggaaagcaggacgtcgattacagcgaacacatcaaaggggtggtctttccaattccggcttttgtttgagtcagaggggagcctgaggaggccaaggtctccggttctgggaaaggcgggtccatccggattctttgggctgcggagagggaggttccagccccgtgaaacaacagagggcagttctgcccctcgaggctttcctccgagagtactgagacggagacgcctcagtcgggagaaatcccggaactcggaggagtctgctgaacgccgaacaaaaggatgtggccgtcgtctcttaaacaaatacgcgaatcccaagccatgcacatttggaaggcatgtgtatgtgtgtgaaggagaaaggccaccgctgcccaccgcagccccacccagccctcggccattcaccggagagacgcgctgcggtggggcctcggagccctcagccagccccgaacgaggggcggggccgggcggggccgtgagcgcgcaggcgcagtgcgggcttcatcccgccgccggcgccgccgccgccgccgcccgctctgcaccacaggctagagacagacagggccgggaagagccggagactgaggaggaggcggaggcggcggcggaggcgggg

SEQ ID NO: 236958 - DNA, 877 bp, Homo Sapiens
tataaaaaattttggggctttaaaccagggcccgggttttttcccctgggcttgaacttctcggggccatttacccccgggtgaaaaaattttgttgtttggactttggggtgtggggccccccttgggaaggctgaaagaatttttccccttgcccaagttaacaagcctgcccttattctatatcccaatatggatttattcaattatcttcttagcattgtccagcatggaccgctgtcttcagctgacacacagcgccaggatctaccgaatccaagaacccggattggccaaaatgatatcaaccgttgtgtggctaatggtccttcttataatggtgccaaatatgatgattcccatcaaagacatcaaggaaaagtcaaatgtgggttgtatggagtttaaaaaggaatttggaagaaattggcatttgctgacaaatttcatatgtgtagcaatatttttaaatttctcagccatcattttaatatccaattgccttgtaattcgacagctctacagaaacaaagataatgaaaattacccaaatgtgaaaaaggctctcatcaacatacttttagtgaccacgggctacatcatatgctttgttccttaccacattgtccgaatcccgtataccctcagccagacagaagtcataactgattgctcaaccaggatttcactcttcaaagccaaagaggctacactgctcctggctgtgtcgaacctgtgctttgatcctatcctgtactatcacctctcaaaagcattccgctcaaaggtcactgagacttttgcctcacctaaagagaccaaggctcagaaagaaaaattaagatgtgaaaataatgcatagctcgagtgcggccgc

SEQ ID NO: 236959 - DNA, 925 bp, Homo Sapiens
ttacttcctttcaagaacaggggaagagagaaagaccctagttcagtgaagtataaaatttaaacctacttttgcttcttaaaggagccagtagagtggaaaagctttcctttattaggacatactgagtataccaaaggaatggaaattggagcagacagaagtacccttcaattatcataaacaatgtaaaatgcgcattctacaacctgaacaatcacccaggccaacacagccagcttcactcacccaggctagaggcatggacaaataaaccaggaatgtttcattttaaagggaatgaatacagttttcttttctttttttttttagaggagcattcaaatgaggggacgtttccacccagaacaactgttaagccattagagcgaggttatagaagagctctgacaagacaaaagaacccaagaacaaccacaatgaaagaaactcaaaagtaacaggatgggcagcaaaaggtacagcaaagaatgaaaacagatgcatggttacaaacagcattaaatgcgtacaacttctgggtctggtgaataattaagggacaagaaagccattactgcacctgatctgcactgaaggtccttcctaagacagtttgagaaaggaagatagaaagtcagcatgggactatttggctggaggcagggggctttctacaggtgaaaaccttcctttgatagatagaaaccgtcccagggcaaataggaacagtttcaatccatctatcaaagtgacttccagtgcccacaaaacttaagtcttcaggcagtttgggggactcaaaggttctagcttagaaaaactggtggattgctgctagggcatcttttaaataactttgtgggggctctctactctgagcaattacgctaaagcatcccgggaatccggaccggtccagcct

SEQ ID NO: 236960 - DNA, 1000 bp, Homo Sapiens
  misc_feature (303)..(303): n is a, c, g, or t
  misc_feature (309)..(310): n is a, c, g, or t
  misc_feature (312)..(312): n is a, c, g, or t
  misc_feature (314)..(314): n is a, c, g, or t
  misc_feature (316)..(316): n is a, c, g, or t
  misc_feature (318)..(322): n is a, c, g, or t
aaggaatcgcaaggcttcggatttattatatataaaaagcaccccctctcactatggggggcgccctttttttttaaaaaaaaaaaaagggtgggtgaggcgctataattaatccccccccccctccgcggggtttttttatgaaaggggcgcccccccccagaatatatgatgtggagggaggctaagggcgagtaatcggaggccggacaccaatggcgatgcgataatactgatgccgcaagtgaaaacatataattgaatttattgggattattaattgagaaaatttttgttttattnaatatnntntntntnnnnnggtagttgatttccacttagaagcaggtgtgttacaaaaatggagttaattatataaatggtccttgcacagcatgtggtttcatatcaagctggcacctctgccaaaaaatgaagttgcttaagtaatggtgcagaagtccataagcaccctcgctcctggaacattaaccactctgagatcctcaggggaaaggcagtctataaatacgaagctttacggttacccttagttacttcacttttcagagcataatgcaatctgtcccaagtcccatgttttatttctgtagtggattctgctgtcctattttatatattgtatatcatgcattatgttgctctagtaatttttttgaagatattgttccactattatttttacttgtcttgaaaaatggaaataggcggtaatggaaaggaaggcctgctggcagaatccttatttaatttgcacagtagaaagttgtcttatgtgtctgtctactgatcagggatccaaactcgtagaagagagggaaacaatccacttctcaaatcatgaatttgtatcaatttattccccttgcctcattatggacggaaagtgttcttggaaaacggcaggacagttttgggctactgaagaagatgccaaaagcaaatttcaatcccgagaatccggaccggaccagcctct

SEQ ID NO: 236961 - DNA, 763 bp, Homo Sapiens
cttttttttttttttttttgaaaccagacatactatttttaatcatattttatataaaatggccttttacataaatttaatttggaaagacctaggcaaagtatacatcattagactcaatgggagaaatactttatggaagataaattctaacgggcacagccaaagtaacaaaaatgtacatttacatacaactgatccaaacaggaagtaaaagcattatgaaaaaagaacatgatgcaaatcatttccccctgacaaaaggagggatctgcgtgaattacagcaaatcaaatgatttccacattataaaagcaagccatggcttctacagatattttaattccttgggaggaagtttcacctcatcttttttccccagtaaagtaacaatcactgtaggaatttttaagtgcacaaactgcaaaataggagtaactacctctgccatgttcaagcacttgggcaattcagtcacttttagggttgtatcatttaaaaaaggggcaacatttatgaattatctcatcagatgcatggtgtttttcaatccagattcaagagtaactattagagttactcattgagcttaatggaaacatcaaaccgacgagtcctttcatgggtggtaaacatgactgggagacaatggctaacttgccccaggtaaggtggctcttcagtggcagagctagaactagaactagaactcagatgtcttgattcttggggtagtgtacccctcctaggaccagcaagataa

SEQ ID NO: 236962 - DNA, 808 bp, Homo Sapiens
  misc_feature (1)..(11): n is a, c, g, or t
  misc_feature (13)..(14): n is a, c, g, or t
  misc_feature (16)..(22): n is a, c, g, or t
nnnnnnnnnnntnntnnnnnnnggagaaaaattcttctttatttaaaaataccagtaatactgacagacttcaaaagcaattcacgcttccagaatacaaagtacttaatacatattttcaaacctgtttgcatttcaaacaaagttagcgtttttgtaaatcaaatttgataacccgactaaaaatattttccagctttattatttaaggagctgcacagcctttaaagtggggaccaggaggcaggcagaggcagagagactgaatgcacccaggactgcgcagcagtctacagcaacatgtcccacaactttggtgctggaaacacaagtaatgcacaagacagctgccctccagtgtcaggatcctgtgaaacagcatatcaaaagatcgccagcttcttataatttacacactttcatttaggattgctttttgaagaaaatctttaagaatgccattttaatttaatatccagaaccctgaatttaaaaaactaatgaaagaaattaactgttaccatcaaaatggttgttgctgagctgtgtgagtaggaattctatgcttttttagatgcaagaaaattaacacataatgcaagtttaatttgaaatcacacaagttatgtatgtaggctcagatagtagcaatgttcacttttattactaatagcttaactgaaacagccatctattcattcctccagcaggaatagcagcaccaagatcttctaaaattctttacatataaagcttaagtcattatccaagtcccattcttgatcccgggaatccggaccggtccagc

SEQ ID NO: 236963 - DNA, 849 bp, Homo Sapiens
gccagggcactgtacatatatattaagggcaaatcctcacaaacaaccctgtgagtagggcattattattaaaaccaattttgcagatcaggaagttgaggcacagagagaagcattacacagtagatcagatagatactgttatcccatttttagagtagaggaagccaaagcacagaaaagtgaagtgacttgctcaagaccacacagggaggcagtgtcagaaatagaactagaaaccagtattactgcttctaagtctagggtactttctgtagcaccacagctttccccaagcctatttagctggatagagagactaaagcaaatgtggccaattccatctagaaacctccaggccatggggtgggggagttcgggctgggacatgtctggcattttacattttggggaaatttcttctatatttagagattggtgctgccttactagctctactgatagggaaccaaggtgatttataaagccatttctaaaatatgagctatcacattctttgtcatttgtttttttttgtttttactcaccaacactagcaatccattctgttttccacacataaaaataacaattacaaataaaatacatttgcaaatttaaaactccatttataagattgcagtggcagtgcctggcacatattaggtgctcaacaaatactggttgaattaatgaatgaatgcatgatattcaacaagttgagaacaacaaagctgtgatgagctgaagctgctggccagttggctgggctcctttactagccaaatgattggctcccatacattctgccttgcagcacatgccattctaatttatatctcagtaaaa

SEQ ID NO: 236964 - DNA, 888 bp, Homo Sapiens
  misc_feature (331)..(331): n is a, c, g, or t
cccacctgtgttgcgcattcttccccttacgccggggtacaggtactcttggtaaaggcttcctgaagcgcctgggcaagtgggcgcatgccagccggagggaaagaaaaatgagaacctcccaaaccatgctttgtggcaggggagctggtgtcatcaccaagaccctgacaaatccgctgggcctcttcaagaagcggctacaggttgaagggtttgagcatgccagagctgcctttggccaggtacggagatacaagggcctcatggactgtgccaagcaggtgctacaaaaggaaggcgccctgggcttcttcaagggcctgtcccncagcttgctgaaggctgccctctccacaggcttcatgttcttctcgtatgaattcttctgtaatgtcttccactgcatgaacaggacagccagccagcgctgagcgcaggaaggaccccaggtcttccctggaggcagcctcctgaaggaaggaagattcagtctccactgagaggtgccgtctggcccttccctgcaggccagctgccccaagcggggtagcagccttgaacccacccagctgggacaccaccagaaggtccagggctctccccatgagagaatcagagggaatgcaggacgtggtctatggtgagccaacgacacagtgagaaggagcaggaagttgctgtttctcctctgaccagcccacactgcaaaggaaacagacgccatcctacacctatcagccctgcctgccaggagaacagaacacactcctggtctggatggggctgctgcttgagtgcagagggctgcggtaggccctttgcaggagtcaggtccctacactggcctgttttccaaccttttaatagacattggagctagaacac

SEQ ID NO: 236965 - DNA, 898 bp, Homo Sapiens
ggcagggaaacccggcgcctttgggatttccccccgtatgcgaagtgaggcttgctcaggccccgttggggcactcccggcggccgccttgctttgaaacctatagtgacctaagtgatccctccgggtggatggtccagtttgggcagctgacttccatgccatcttctgggagcctgcaggccttactacacccgttctttcgtatcgaatatctatctgagccctcgctacctggggaattcacccctatgacattgccttggtgaagctgtctgcacctgtcacctacactaaacacatccagcccatctgtctccaggcctccacatttgagtttgagaaccggacagactgctgggtgactggctgggggtacatcaaagaggatgaggcactgccatctccccacaccctccaggaagttcaggtcgccatcataaacaactctatgtgcaaccacctcttcctcaagtacagtttccgcaaggacatctttggagacatggtttgtgctggcaatgcccaaggcgggaaggatgcctgcttcggtgactcaggtggacccttggcctgtaacaagaatggactgtggtatcagattggagtcgtgagctggggagtgggctgtggtcggcccaatcggcccggtgtctacaccaatatcagccaccactttgagtggatccagaagctgatggcccagagtggcatgtcccagccagacccctcctggccgctactctttttccctcttctctgggctctcccactcctggggccggtctgagcctacctgagcccatgcagcctggggccactgccaagtcaggccctggttctcttctgtcttgtttggtaataaacacattccagttgatgccttgcagggcattct

SEQ ID NO: 236966 - DNA, 933 bp, Homo Sapiens
  misc_feature (916)..(916): n is a, c, g, or t
agtcccgttgggaacccgcgccccattttgtggggctgcgggctgttttcccactcccagtgtttccaaggggtgttccaaggttagcttgggaaaggaaagttaggcatggccctcaagcctgcagattttcctggaagcaagcggcctcatgggcagacaaggccctggaatgtggtgaatttgggaacccgtaggcctcattaatgctccggaggtcagccagcaggcctagcaactttggcaaccgaaccctttggaggaagtagtggggttgccaggaaaacagaagggaataaaggcagttgggagtcttgtctctaggccctgatcgcctgaactattcctcagtgaagccaggtctgaacattagagaaaatcatgctctggtatgacagactatcagaggttccaaaggtcctccagggggcctcggtctgacactgtcttctctcaccatgctcagttttttctgaacccagagctctgagagccgagtgtgaagaaagctccagacttggccagaactccaaccatgtggaatctgagggcctggccttctagagcaggttctagaaggtggatgtgttctatggtataaagcatcccctttctggccaaactagctcttggaggaacgagcaaaacagaagcggtgcatacctcagagcctggataaatcacagactattgaacctggaactggctttgaccatgaaactgtgaatggccctaacttcaagggaaatgagaaatcgaaggaattggcccaatggcgaggagaggaaaggccaagggaagagaaaagtctgcgttagtctggagaagttggactagtgaggtaatggatgtcatcaatctcaggaatgctattacccagagcctctgagctactactttgcatctgtacgaatanaaaaaaaatcggaaaaa

SEQ ID NO: 236967 - DNA, 919 bp, Homo Sapiens
  misc_feature (189)..(189): n is a, c, g, or t
  misc_feature (230)..(230): n is a, c, g, or t
  misc_feature (895)..(896): n is a, c, g, or t
actgaaaaagtcaatggtcctactaaccatttggcaacccttatggaacaagaaatccaggaaatagttcattctaaaagtttttcaagaatcttaaatctcaagaagtgaagcagattcatacaggcttgaaaaaagtaaaaccctgacctgtaacctgaacactattattcctaatagtcaagtttntgtggtttcttggtagtctatatttaaaaatagtcctaaanagtgtctaagtgccagtttattctatctaggctgttgtagtataatattcttcaaaatatgtaagctgttgtcaattatctaaagcatgttagtttggtgctacacagtgttgatttttgtgatgtcctttggtcatgtttctgttagactgtagctgtgaaactgtcagaattgttaactgaaacaaatatttgcttgaaaaaaaaagttcatgaagtaccaatgcaagtgttttatttttttcttttttccagcccataagactaagggtttaaatctgcttgcactagctgtgccttcattagtttgctatagaaatccagtacttatagtaaataaaacagtgtattttgaagtttgactgcttgaaaaagattagcatacatctaatgtgaaaagaccacatttgattcaactgagaccttgtgtatgtgacatatagtggcctataaatttaatcataatgatgttattgtttaccactgaggtgttaatataacatagtatttttgaaaaagtttcttcatcttatattgtgtaattgtaaactaaagataccgtgttttctttgtattgtgttctaccttccctttcactgaaaatgatcacttcatttgatactgtttttcatgttcttgtattgcaaccctaaacataaataaanntattaaaagtcgtgttataccat

SEQ ID NO: 236968 - DNA, 900 bp, Homo Sapiens
ccaaagacaacccatcaacgcttccccttgacccgttccgaacaaatacgtggccaggttgaacgggcggcctcgcttgacttggtgaccctcatggaaagggaagaaccttgaatcttacctggcacggggttttggaaaaccctgaccccgaagtgttttggttcaagaacgaccagggcatccagctcagcgagcacttctcggtgaaggtggagcaggccaagtacgtcagcatgaccatcaaaggcgtgacctccaaggactcgggcaagtacagcatcaacatcaagaataagtatggcggggagaagatcgacgtgacagtgagcgtgtacaaacacggggagaagatcccggacatggccccgccccagcaagccaagcccaagctcatccccgcgtctgcctcagcggcaggccagtgaaggcgttttcctagcctggagatgggaaaatatgcttggcagagacaggaatgctgtgtgcttgttccaaatgagcagctggcatccgagtggtgtcctgtgtgggctgatagttgatcacacattgtgcttttgatttttgcatttggtgatgaatattttatacccgtctaagggagaaagctaatgttttccacaagactgaacaacgtgtatttacacgagggtagacggcagatgcctgacagagagtgggttggcagacaacacactagcattttcacgggtgtgggcacatgggtgtggcacctggacgtgtgcagcatgtggcggtctgtgtgaagccaccgtgcttctctttggggggccgcgagatctagcatctctgaaatcctggctgtcgaggctttgaagcatgtgttacctggttaagcttgttttctcttgctttaggcaaaataaaaggtttaaa

SEQ ID NO: 236969 - DNA, 889 bp, Homo Sapiens
agaaaggcccatggccccgcatttccaaggccttggtagccaagcccagagtagcgtgttttttttaagccaattcaggcccccggtttttctttgttcctctagaagggaccaccacggcgagctcagttagggcacacccagtgggacctagacaaagggagagggtgcccgacatcccaactaggtaaacacagaggaggttccacatggacttatctgggtggctgtttgaaaacgagaaacagtcaagagtccctggccccacagacccacctccccaactcagcactgtctgtctgtgcagcaggtgcaaggacgtgttgaactagctctctgcagcctccttggaggatgtgatcctatgggaggggtaggagtattcaggtccttgacatctcccaaatgtgtgattccgggatgccaaaggcctttggccaggtaatgcagtgtctacaggctgaggttgacatgcatccccaccctctgagaaaaagatcctcagacaatccatgtgcttctcttgtccttcattccaccggagtctgtctcatacccaaccagatttcagtggagtgaagttcaggaggcatggagctgacaaccatgaggcctcggcagccaccgccaccaccgccgccgccaccaccgtagcagcagcagcagcagcagcagcagcaagagtaactctgacttaggaatagagacagccagagagaaatggatcaatgaaggagacatctggagtgtgcgtgcttcttcagagggacgggtgatgggcagattggaaaaagcaccgcagatgggaaccttaatctttcttttctaaaattgatgctatgaaaatttgcgttttctgtacttgtaaaaactaaaagttgctgtctac

SEQ ID NO: 236970 - DNA, 926 bp, Homo Sapiens
actctaagggccgaaacaatgtcaaatgctcccataaaaggttttgaattgccgaaaagaatattttaaaatccaatttaaaaagggggtgaattcctttaatgcccctttaaaacttgaaaagtgggaaaaaaaaattctaaaattaacccagctttatctttaaaaacaaaagtatttttgaattggactttaaaataaaaccctttcggattgaaattccaattagcccatttgtggagtttgatcacacaattcaaaaagttgctgctttccattaactagtcttaaaatgcctttgtttgtaaaaataaaaataatggtactttcattttataacaaggtgttttttcaagaaataatccatgctaaaatggatatttgtgatcctgaaatgtttactaagcattgtaaatttatttataactgccatctccaactacatccttatgatgtttttaacaataaaattaaaacaactgttaaactaaaaaccacaccgttttccagtacttgatctctgagctacaatactcactaaatataattttccaatcaaaatattctattctatattctaagggttaatatgtgattatagtgtccacttgccaccatttttttaaatcaatggacttgaaaagtattaatttagatggatgcgcagatataccctcagttcagtcatagattggagtttgcatataataatgtaaatgtatgtcgacactattctaaatagttctattatgactgaaatttaattaaataaaaaaggttgtaaaatgtgatgtgtatgtgtatatactgtatgtgtactttttaaaataggtgtatgtcccaacccttttttatacaggtttgaatttaaaattacatgatatatacatatactttatgttctaaataaagaattttatgcactc

SEQ ID NO: 236971 - DNA, 904 bp, Homo Sapiens
cccctttttacatcttcttggccccaaggtggccctttccccctgagcgcccagccgtgttcgccattaaggctgttgccagtgctggaccagtgaagggtccttcagcctggagctccagctcaatgcgagctccgtgcgccaggaaaacgtgacggtgtttggatgcttgactcacgaggtgcctttagcctgggggatgcagcagtgacctgttccaaagagtccctggccggcttcctcctctctgtcagtgccaccaccagggttgccaggctgcgaatcccattcccgcagacggggacctggttcctggccctccgctccctgtgcggggtggggcctcggttcgtgcggtgccgcaacgcgacggccgaggtgcggatgcgcaccttcctgtccccatgcgtggacgactgcgggccctacggccagtgcaagctgctgcgcacacacaattatctgtacgcagcctgcgagtgcaaggccgggtggagaggctggggctgcaccgacagtgcagatgcgctcacctatggattccagctgctgtccacactcctgctctgcctgagcaacctcatgtttctgccacctgtggtcctggccattcggagtcgatatgtgctggaagctgcagtctacaccttcaccatgttcttctccacggtatgcggtggtgtctgcatcttatcactgggtgcttgtgcatggtggtgggtcacagtctgtatttccaccacgttctccgagggtttgggaatgtctgtgccttcactgtgtcttctacagacagagacagcagtgcttcccaaactgtcatgcatagataatggtcatttttgtaagacacattgagtaaataacaaaactgtttcaacttaataaagtaagtttgggcctc

SEQ ID NO: 236972 - DNA, 883 bp, Homo Sapiens
  misc_feature (17)..(17): n is a, c, g, or t
aagaaaaggaagtgttnccagcatgttcccacggtgtttgcccccggccaagctttcgagcgtggctgcgggtccccctgatgccagcctctctgcttgttccagcacaaacagggcaaggtgtgaacgagtccccgaatgatgacctggggggaggttgagaacacacccttgagagttgaagggtcggaaacgccctacgtggacaggacacccggcccagcttttaagatcctggagccaggccgcagggagcggctgggtctgaagatggccaacgaggccgctgccaagaaccgggccaagaagcaggaagccttgcggagagtgacggagaatctggccagcctcacccccaaaggcctgagcccagccatgtcgccagccctacagcgccttgtgagcaggacggccagcaagtacacagaccgggccctgcgggccagctacacaccatccccagcacgctccacccacctcaagaccccggccagtgggctgcagacccccacaagcacaccggcgcctggctctgccacacgcacccctctcacacaggacccggcctccatcacggacaacctgctgcagctccctgcccggcgcaaagcttcggacttcttttagagccaggcctgggctgggctcatagacgcttcacagagcctgcagggcagctgtacacccagcagaggactccagccttctcggggcccaggcctgggccagaagctgttgaccataccaggagtcactggagaaaggggctgtgctggggccagactggcacaaggcactcgtgcccacaccacaccccagggccttgccaagctgtttgctgtttaattggccccttaacgtcattaaagaacacctaggacag

SEQ ID NO: 236973 - DNA, 953 bp, Homo Sapiens
aaagggtcacggatttgtttcctataaccacaaaaggaggagggttggcccaaaaaagaaacaagggaaaataaagattgatggccccggtattatgtatgtggaaaagtaaagaaaaaaattggggggtggctggtagagccattccttagaaccaccttttggaaataacctatgaaaggaagattatttcttaagcaaaccctttcaaccctgtcctaattttggcatgtggtaagtttgtttcttggactaataataaatggtaagttttctgtaatcccagcactttgggaggctaaggtgggtggatcacaaggtcagaagatcgagaccatcctggctaacacagtgaaaccccgtctctactaaaaatgcaaaaaaaaattagctgggcgtggtggcgggtatctgtagtcccagctactcaggaggctgaggcaggagaatggcatgaacccgggaggaggaactaggagtgagccgagatcgcgccactgcactccagcctgggtgacagagcgagacgctgtctcaaaaaaaaaaaaaactggtagttttatattcagtacctcaggcccgtatgattatctgctgatggccccacttagatgtacatagccacttcaaaatgggccctctccccaaatctaagaagcttgttttcagtaattgatcacatttagttcttttaagtcaagaacctgagtgattctgtacacttctttttacatctaatgaacttaagttctgttgatttctaccatttaagtatttttcccccttagtccttaacgactaggtttcctgcctccagaataagctgaagtcctccaagatgtactgtggttttctctaagaaacttaacacatttttctttccccagatatcccagaagaaactgaagaaacaaaaacttaggcacgggagtaaattcagcattaaaataaat

SEQ ID NO: 236974 - DNA, 934 bp, Homo Sapiens
  misc_feature (1)..(1): n is a, c, g, or t
  misc_feature (36)..(36): n is a, c, g, or t
  misc_feature (61)..(61): n is a, c, g, or t
ntctcaaaccactgttctatccagaagcctactganaatcatgtatattgctttcctaagnctaggaaaaggtaaaaaaaaaaatttttttttttttttttttttttttggctagaattgcatcgtaacagtgtggtcacactggtagaaaatgcagattggcaatcatgtacatctctgattaaaacaacactcacataaccaacacaatttgctaggccaaagtcttcacgggcaatccctggggtgggagtctgggatggggtggataatgaaggatacctggggttgcagaagtggggtgggaatccctggggcatcagtccacaggaggtgggggccagcgatggcttcaggggtgatatttccaatatatatcagccctgggcactctcgccctgctgctcacagcatggtcctcacaccagcagcctccgccttacctgggagcttgttagaaatgcaggatctcccagatctattgagttagaagctgtattaacaagatccccagtgatttttatgcacaatcaagtttgtgaggcaccgctgcagacttctgagtgcaggaatgcggcagccctgggtaggtgtggttagaaggcctggacggggaggctgtgcggaggggatgatgaaagcatgggtgaggggagaagaccctaaacagctgtctttgttagtccccgcccacctggccgggatgccagcaacaaggccacctgcagtctgccctgcccttcctcccctcagtggctttgaaggcaggtgtccttgaagctaagctctgctggctgcaggtaaaaccacaggtgggggagttctctgagacctaggagctggggtgtacggagaagcggggccctggggagcctcggagattcctggtgggaaggccgggcagaacagaaggctgtcaagtcagagggccacc

SEQ ID NO: 236975 - DNA, 873 bp, Homo Sapiens
atcttcacttcagtctcttcagcagagaacatggctcattcactggtctctgttggtttctttcaatcacccccaaaggtcgcgataatattattgacctcttcctttatcagccacaatatcttaatgcaattcagacaatgtgtccacacattcttcgctatttgactacagcagtcataacaaacaaggatgttcgaaaacgtcggcaggttctaaaagatctagttaaagttattcaacaggagtcttacacatataaagacccaattacagaatttgttgaatgtttatatgttaactttgactttgatggggctcagaaaaagctgagggaatgtgaatcagtgcttgtgaatgacttcttcttggtggcttgtcttgaggatttcattgaaaatgcccgtctcttcatatttgagactttctgtcgcatccaccagtgtatcagcattaacatgttggcagataaattgaacatgactccagaagaagctgaaaggtggattgtaaatttgattagaaatgcaagactggatgccaagattgattctaaattaggtcatgtggttatgggtaacaatgcagtctcaccctatcagcaagtgattgaaaagaccaaaagcctttcctttagaagccagatgttggccatgaatattgagaagaaacttaatcagaatagcaggtcagaggctcctaactgggcaactcaagattctggcttctactgaagaaccataaagaaaagatgaaaaaaaaaactatcaaagaaagatgaaataataaaactattatataaagggtgacttacattttggaaacaacatattacgtataaattttgaagaatgtgaaataaaatgtattcat

SEQ ID NO: 236976 - DNA, 923 bp, Homo Sapiens
  misc_feature (709)..(709): n is a, c, g, or t
  misc_feature (896)..(896): n is a, c, g, or t
  misc_feature (899)..(899): n is a, c, g, or t
  misc_feature (904)..(904): n is a, c, g, or t
ccggttcactcttctcagccactgaagtattcccctttatgtacaggatgctttggttatatttagctccaaaccttcacacacagactgttgtccctgcactctttaagggagtgtactcccagggcttacggccctggccttgggccctctggtttgccggtggtgcaggtagacctgtctcctggcggttcctcgttctccctgggaggcgggcgcactgcctctcacagctgagttgttgagtctgttttgtaaagtccccagagaaagcgcagatgctagcacatgccctaatgtctgtatcactctgtgtctgagtggcttcactcctgctgtaaatttggcttctgttgtcaccttcacctcctttcaaggtaactgtactgggccatgttgtgcctccctggtgagagggccgggcagaggggcagatggaaaggagcctaggccaggtgcaaccagggagctgcaggggcatgggaaggtgggcgggcaggggaggshcagccagggcctgcgagggcagcgggagcctccctgcstcaggcctctgtgccgcaccattgaactgtaccatgtgctacaggggccagaagatgaacagactgaccttgatgagctgtgcacaaagtggcataaaaaacagtgtggttacacagtgtgaataaagtgctgcggagcaagaggaggccgttgattcacttcnactttcagcgaatgacaaaatcatctttgtgaaggcctcgcaggaagacgcaacacatgggacctataactgcccagcggacagtggcaggacaggaaaaacccgtcaatgtactaggatactgctgcgtcattacagggcacaggccatggatggaaaacgctctctgctctgctttttttctacngtnaaatntaaactggcatctaaagcc

SEQ ID NO: 236977 - DNA, 963 bp, Homo Sapiens
ttctctatcttgctggagccttcaggctgttccaaggataccttcttgctcctggccatcaagtcacagcctggtcacgtggagcgacgtgcggctatccgcagcacgtggggcagggtggggggatgggctaggggccggcagctgaagctggtgttcctcctaggggtggcaggatccgctccccccagcccagctgctggcctatgagagtagggagtttgatgacatcctccagtgggacttcactgaggacttcttcaacctgacgctcaaggagctgcacctgcagcgctgggtggtggctgcctgcccccaggcccatttcatgctaaagggagatgacgatgtctttgtccacgtccccaacgtgttagagttcctggatggctgggacccagcccaggacctcctggtgggagatgtcatccgccaagccctgcccaacaggaacactaaggtcaaatacttcatcccaccctcaatgtacagggccacccactacccaccctatgctggtgggggaggatatgtcatgtccagagccacagtgcggcgcctccaggctatcatggaagatgctgaactcttccccattgatgatgtctttgtgggtatgtgcctgaggaggctggggctgagccctatgcaccatgctggcttcaagacatttggaatccggcggcccctggaccccttagacccctgcctgtatagggggcacctgctggttcaccgcctcagcccccmccagatgtggaccatgtgggcactggtgacagatgaggggcccaagtgtgcagctggccccataccccagcgctgaagggtgggctgggcaacagcctgagagtggactcagtgttgattctctatcgtgatgcgaaattgatgcctgctgctctacakwaaatkccaacttggttttttaactcctctctccytgtkagytctgattaaaaa

SEQ ID NO: 236978 - DNA, 1000 bp, Homo Sapiens
tacctacatagggagsagtaagggcagtccytgtgggccsccctggmacctccdgctgcacmatcgtgtscttgkttccctgcaacacctgcctytctgtccctgstgctgcttggctcaggcccaacaggcagcgtgcatggaggktgttacacacagctgtttccgtgagggtgaccgtgtctgcagcacgcttccgtctccgcatgcacggctgcctctccagccacctctgatacttctctcttggggccatcagagcctcccttgggctgtcacctcccagctcacacacactcttcagtggtttcctctcttcattctcttatagggcgtggtccttcttatttatctaaagggctgaatttaggagactttttacccaggggcaaaaggctcttagggtaatgagatggatggtggcccaggtgcattttccagggcctgggttctccagatcccgtggcttctgttgagtggaggcaactttgctctgtgtgaacctcgcccctgtccctctgccgggcacccctggcaggaagcagaactcccatcctcaccctgacttagactgtcctctgagtcagctcctctccaagacaggagtgggcagccctgggcagtcttctggccccttgctaaagtgaggggcaggaagctggggctgccctccagaaagccggggtaggaactctgaaaaatacctcctctaaacggaagcagggctctccagttccacttggcgccccctccmacaaggcccttcctccctgaggaccccacccccctaccccttccccagcagcctttggaccctcacctctctccggtgtccgtgggtcctcagcccagggtgagctgcagtcaggcgggatgggacgggcaggccagaggtcagccagctcctagcagagaagagccagccagaccccaaccctgtctcttgtccatgccctttgtgatttcagtcttggtagacttgtatttggagttttgtgct

SEQ ID NO: 236979 - DNA, 527 bp, Homo Sapiens
tcgagtttctgttgattttaaaccttttttgtctgtctctttcactagactgtaagcttcttcagatcaggggacatgtcttgacagtctttgtattcctgttgtttagcatagtactggcacatcataggtgtgcaagataagaaaatgagattggaagaatttatgctacttcgtgcgcctaacaaatgtggatgtctgtattatactgatactatattttcaatagttagcaaagaaggccatttaatattttaatactgaaaagcagaattgtgctcattttattcaatacttaccatataccatacactagatagtaggtggatgtaaagatgcagttcctgctctcaaagaggattatgacctagaaaaggttacagattggattgagataactttataggcctgaacaatacagaaaagatttctaaatcattgaagacttcagggaggaaaagagattgaatgcgtcggcaatttttatcattcccgttactttgaacaatagtgtatgtaagtgcaaa

SEQ ID NO: 236980 - DNA, 711 bp, Homo Sapiens
aaaaacccggaattttttaaatgggccttctaaaagaatttctttcatttaaactttccctgataaattcaacttcccttataacctttaaaaaattaaaggttcccttaaaggatggaatcaactctttcacctggaatttctttttttaaccttggaaaaacccccaaattaaaaaaaaaaaaaggataactatgtggttaaaaaaaaataatacagggttacagtagatacatgtctaacatagatttgaatcacagttttatctcttactagagaaatcatgttaggtaagtcgtttaacctaaatttttgtttcctctttctaaagccattgtagaattgtgaaaattaatgactgtaacaatcacatttagatgggggcctagcactgatgggcattaaataagcagcagttatttaaatggatactattaagactttttgctacaaaattcctactgtttgttgcagcggcattgcaccatataaggaaccacttgtaaaaatttaactcaaaatagttatcagctttccttcaaaatcattcagttaagggcaaccagcaaccatgacataatagtgaattatgtaacagtgaatttcaacctactgcttatcaattagcatccatcatcatataattaagttaatgtaaatattttttctcaaatccatacattcaagttctatgccatgttatggattccc

SEQ ID NO: 236981 - DNA, 1000 bp, Homo Sapiens
ttttgggcgaaaaatttcccgccgaactaccctccgaaaaattttcacgggattggggatgcaccttgggtacctcaagagctgggcagttcaccgtttatctttttcctcaaaagttcaatgttttgagagaaaattttggaagaatataagatttgtctttctccgcgcggaattagaaatccgaaaggtcccccaattttccacaattttaaatgtccggttacaccaatttccataaattgggccggagaaaaaaaaaaattattttccctgtttgggcttcccaatttggttatattttaaaaaaacctaaaaacgtgccaacttaagggaattcaaggaaaatttggctggaaaggttttttaccccgctttaaaggccatggtactttctgtctctggagtgcccccctgttgccccatattcaaatgaccattatagtcttacttgtagctaatttataataagaacagaaactctaaattgaaattgaaataaaaagctttttttttttttttggtcttatcttttactttcctgattattcactgaccctatgatcaaaggggaattcttctatagtcaggcaagtctctttctggaaaacggctttaggcagctcaatactgagtaattttgacgggtcaaattttaacataggtttcgttttgttttgtttttgtttttttatcttgaactgatggagagcaataggaattctttgcttagattactttaagtagtggttaaaactaaatatacagtcattaaaaaattaaagtacatcatggatctagaattctaagaaaccgaagaatctatacctatttaaagcatacttagtcccagtttggcagacttaaaacctaagcagtgactaattttctgctaacaaaaaggttatatcaaatacctactgatgttccagttgacactacctgtgtgtcaccaaaggagtagcaggacaaatggacttttgttgaatttttatcccgg

SEQ ID NO: 236982 - DNA, 892 bp, Homo Sapiens
agggggctgggttcttcggaaacttttctggacccttcaaggggggattcttgttcttgcccttaaggccttcccccaaaaattggctgggaatttacaggggtgtgaggcccactggcaccctggccctagagaacaagggttcttgctctggttgtcccaggttggagtggcaaggggtgcaaatcctagctcactgcaacccccaactcctgacttcaagagatcattttctcctcagttttcagagtagctgggaccacaggtgtgtgctaccatgcctggctaaggtttctgtcaaaagtgacattgagatctgaagggtggtgaaatgtcatttaggaacaggggaagttagggctgggggagtcctccaggcaatagaaacaggatttatgaagatgagatggtgcctgacacaaagggcttggatgggtgcagattggaagccaccagaaggctctagcccaagagaagactggatacattggcagattcttctggctgccttgtggagtagaggacaggaggaggtcaagggcaggggtggggaatccagcctggaagtgactgcagcctagctgagagagccgtggtggccaggaccagtgaggcagcagcgtggatggagagagaggagggatgcagagatgtttaggacatgagctggccggtgatggatagcatggggtaggctggtggtggtgagggggtccagggtccagctgccactaggagggtgggtaggtttggggacaaccccttgtctttctgatccttgttcaggtgagatccccctgcacaaatttcacctgctgtttttttttttcctgagccatttcagactgcctcctggggatatccgcaggaattccggaccggtttaccagcc

SEQ ID NO: 236983 - DNA, 784 bp, Homo Sapiens
  misc_feature (75)..(75): n is a, c, g, or t
  misc_feature (90)..(90): n is a, c, g, or t
ccatcaggaattcacagactccggtcattactgtgtctacatccggaatgctgtggatggaaaatgttctgctcnaatgactccaatatntgcttggtgtcctgggaagacatccagtgtacctacggaaatcctaactaccactggcaggaaactgcatatcttctggtttacatgaagatggagtgctaatggaaatgcccaaaaccttcagagattgacacgctgtcattttccatttccgttcctggatctacggagtcttctaagagattttgcaatgaggagaagcattgttttcaaactatataactgagccttatttataattagggatattatcaaaatatgtaaccatgaggcccctcaggtcctgatcagtcagaatggatgctttcaccagcagacccggccatgtggctgctcggtcctgggtgctcgctgctgtgcaagacattagccctttagttatgagcctgtgggaacttcaggggttcccagtggggagagcagtggcagtgggaggcatctgggggccaaaggtcagtggcagggggtatttcagtattatacaactgctgtgaccagacttgtatactggctgaatatcagtgctgtttgtaatttttcactttgagaaccaacattaattccatatgaatcaagtgttttgtaactgctattcatttattcagcaaatatttattgatcatctcttctccataagatagtgtgataaacacagtcatgaataaagttattttccacaaaaaaaaaaaaaaaa

SEQ ID NO: 236984 - DNA, 681 bp, Homo Sapiens
  misc_feature (38)..(38): n is a, c, g, or t
  misc_feature (124)..(124): n is a, c, g, or t
  misc_feature (681)..(681): n is a, c, g, or t
gattcggcacgaggcggcagtgtccccaaggcaccganaccgaggcggggtctcggtccctccgcgcaaggagggaggcggaccgtacgtggcaggactcaccgccccgcacgtggcaggactnaccgccccgcgccgcgttttccgagccatggcgccagcgctgtggcgggcctgcaacggactcatggccgccttcttcgcgctggcggccttggtgcaggtaaatgacccagatgcagaggtgtgggtggtggtgtacacaatccctgcagtactgaccctgcttgttggacttaaccctgaagtcacaggtaatgttatttggaaaagtatctctgcaatacacatactcttttgtacggtgtgggctgttggcttggcgtcctacctcttgcatcgtacacaacagaacatcttacatgaggaagaaggcagggagctgtctggtctggtgattattacagcatggattatcctgtgccacagttcctcaaagaatccagttggtggaagaattcaattggctattgccattgtaatcacacttttcccatttatctcatgggtctacatatatattaacaaggaaatgcggtcctcttggccaactcactgcaagacagtaatttaaataaattcaagaacttcgtttttaaaatgaaaaaaaaaaaaaaaaan

SEQ ID NO: 236985 - DNA, 692 bp, Homo Sapiens
  misc_feature (17)..(17): n is a, c, g, or t
ggtagcggcagctagcntgagatgtcagaactacgggattccaccggtcaaccgtgcccagagcaagcgaattgtgggccagattatcccagccattgccaccactacagcagctgtggcaggcctgttgggcctggagctgtataaggtggtgagtgggccacggcctcgtagtgcctttcgccacagctacctacatctggctgaaaactacctcatccgctatatgccttttgccccagccatccagacgttccatcacctgaagtggacctcttgggaccgtctgaaggtaccagctgggcagcctgagaggaccctggagtcgctgctggctcatcttcaggagcagcacgggttgagggtgaggatcctgctgcacggctcagccctgctctatgcggccggatggtcacctgaaaagcaggcccagcacctgcccctcagggtgacagaactggttcagcagctgacaggccaggcacctgctcctgggcagcgggtgttggtgctagagctgagctgtgagggtgacgacgaggacactgccttcccacctctgcactatgagctgtgacaaggcagccaccctgtcacctagctcaatggagccccggatcccaagccctgcattgtaagcccacagtaggcactcaataaatgcttgttaaaggaaaaaaaaaaaaaaaaaa

SEQ ID NO: 236986 - DNA, 764 bp, Homo Sapiens
  misc_feature (16)..(16): n is a, c, g, or t
  misc_feature (55)..(55): n is a, c, g, or t
  misc_feature (137)..(137): n is a, c, g, or t
cagtcacatgatatgntggtgcatgtagacaatgaagcatcaatcaaccaaacanccctggagctgagcacaaagagtcatgtgacggaagaggaggaggaggaagaggaagaagaatcagattcctaaaggagggngaaagccaggctggtcagttatacaaattgcatttctaaggctcaggctacttctcctcaaggaaatcatcttgccctgggccctgtgatctgcttgaaaggaaagcaagaactataaggaggatgtgtagttgcaaaaatggctccatcggtaactcaagcttcagaatgttatgacatacagaaaatcaaagatgctgtgtcttagcattgagtaatatgggtggtgctgtctgtaatctggtcagattcagttaactgttcagaacaaaatttcctctgaaatactgttgagaaagtctgtcatttgcaaaaagagcagagtttaaatacaagccagtctttccagtcaacaatgcctctttgaagaaaaccaattaaagactgtttgcatgccgctgaacccttgtgagcagttaggacacagtctaggacagaaagatgacaaggggaaggactgagggccgtctgagagcacaagctgtttctacctctcagaggcattgaaatattgcatgctataaactgctttgtgtatctgttaccacctctcacttgagacatcactcactggtaaaatgttttataaataaattataagtagccatcaaaaaaaaaaaaaaaaaa

SEQ ID NO: 236987 - DNA, 652 bp, Homo Sapiens
tcagcctgcctgcaactcacctcgaaggcggaccagcctgcctctgtgatgactgcagcagacctccttgggtgtaccaatgcccctcatctcccactttcacacctaaccctgactccttcaccaagaagacgggagtcggcagccaggagttcccgtggcacctctctctcttcgtggctccctgcttcccccttccctctttccgaggaagggtcaacctattctctctcaaagccaacccctaggccaattgcctggatctcctcccctctcccttctttaaacgagcttgcctccctcctgccaagtttgagggcaaggctaagaaatgtcagccacggaaacaactctattatctggtgactttgggtaatgtgaatcagtgcctgaggacctttgctgtgtccttggtacagaaccatccacttgacctaactacctcccctggccgcgctctcgctcttctcttctttgttaagccaacaactatcaccctctcctactcttcttctccctgccccctggagggcactgtgtttggttgtgcaaatgtatttactatgcgtgtttccagcagttggcattaaagtgcctttttctaataaaatcagtttattatgacagtttcctgaaaaaaaaaaaaaaaaaa

SEQ ID NO: 236988 - DNA, 726 bp, Homo Sapiens
gatcgtaagttgacagtgctggactggcagcaaagtgaccgttggagtttaatgagaggaatatactcatcatcagtctatttagaagagatttcctcgatcatttcaaagatgcctaaagcagatttctatgttctggaaaaaacaggactttccattcagaactcatctctgtttccaatactgttacattttcatatcatggaagccatgctgtatgccttattaaataaaacttttgcccaggatgggcagcatcaggtgctgagcatgaatcgaaatgcagtggggaagcattttgaactgatgattggtgactcccggactagtggaaaagagctagtgaagcagtttctcttcgattctatactgaaggcggatcctcgggtgttcttcccatcagataaaatagttcactacagacagatgtttttatctactgaactacaaagagtagaagagctttatgattcattattacaagctattgccttctatgaattagcagtgtttgactctcagccttagaattctgaggttaacgtgctaaagtataattattagctctaacgtaacaccaactgttgtgaacatccatgttattggaaaagaacacattttcagtgtattttagatgtttaaattctgacttttggctattaaatggtttacacaataagccaagaccaaatcaataaacattttatgagaaaaaaaaaaaaaaaa

SEQ ID NO: 236989 - DNA, 469 bp, Homo Sapiens
gccagccaacagtggaacaatgccacatggacagaggtctcctacaccttctcagaatacccccggggtgtccggtacatcctcttccagcatgggggcagggacacccagtactgggcaggctggtatgggccccgagtcaccaacagcagcattgtcgtcagccccaagatgaccaggaaccaggcctcctccgaggctcagcctgggcagaagcatggacaggaggaggctgcccaatcgccctaccgagctgttgtccagattttctgacagctgtccatcctgtgtctgggtcagccagaggttcctccaggcaggagctgagcatggggtgggcagtgaggtccctgtaccagcgactcctgccccggttcaaccctaccagcttgtggtaacttactgtcacatagctctgacgttttgttgtaataaatgttttcaggccgggaaaaaaaaaaaaaaaaaa

SEQ ID NO: 236990 - DNA, 656 bp, Homo Sapiens
cgtgtcaccattaagcaggtgctcaccgcgccaggctcggcggggcagccccggtctgaggacgaagacagccttgaggaggccggcagccccgcacctgggccgtgtccacgctccaacgccatgctggctgtgaagcatggggtgctctacgtctatgggggcatgtttgaggccggcgaccgccaggtcaccctcagcgacctgcactgcctggacctgcacaggatggaggcgtggaaggccttggtggagatggacccagaaactcaggagtggctggaggagacggactcggaagaggacagtgaggaggttgagggccccgagggtggggtcgacgacgaagacagcggagaggagagcggtgcggaggactgagaagagcccctgccaggggcgcctggcaagtgctgtgcccacgtccgcccaggacccagccgtgttgagtgaagctcttggggccagcgtgcgtcctgacgcacaggagagagctgaaggtgggtggcccaggccagggtgtgaactttctcccatggtttagtctctgacgcggcactgggccggaagttcaactgagtgcagtgcaggtggattccctcagcagcctgtgtgttgtgtgaaataaattggacttgaaacaaaaaaaaaaaaaa

SEQ ID NO: 236991 - DNA, 661 bp, Homo Sapiens
caagggtaacccggctcctggtatggacggatgcgcaggatttaggataagctgtcacccagtccccataacaaaaccactgtccaacactggtatctgtgttcttttgtgctatgaatttggattcctaattgctattgttggttgctggggttttaaatgattgataagcttgtacagttaacttatagagggggagccatatttaacattctggatttcagagtagagatttctgtgttgtctcctagaaagcattacatgtagtttatttcagcatccttgttgggtggggccctggctctcttcccctttggtgggacctcccctttctttgggcttcagttcactcaggaagaaatgaggctgtcgccatctttatgtgcttccagtggaaatgtcacttgctacagacaatagtgcatgagagtctagagaagtagtgaccagaacagggcagagtaggtcccctccatggccctgaatcctcctctgctccagggctggcctctgcagagctgattaaacagtgttgtgactgtctcatgggaagagctggggcccagagggaccttgagtcagaaatgttgccagaaaaagtatctcctccaaccaaaacatctcaataaaaccattttagttgaaaaaaaaaaaaaaaaaa

SEQ ID NO: 236992 - DNA, 733 bp, Homo Sapiens
tgagatacatgtttattcaaacacaagataccccaaatccaaacagcttaaagttttaccaggaaaaccagttcttgagacaaggaccatggattttcccaccccagctgcagcatttcgctcccctctggctaggcagttatttaggattgaaggagtaaaaagtgtcttctttggaccagatttcatcactgtcacaaaggaaaatgaagaattagactggaatttactgaaaccagatatttatgcaacaatcatggacttctttgcatctggcttacccctggttactgaggaaacaccttcaggagaagcaggatctgaagaagatgatgaagttgtggcaatgattaaggaattgttagatactagaatacggccaactgtgcaggaagatggaggggatgtaatctacaaaggctttgaagatggcattgtacagctgaaactccagggttcttgtaccagctgccctagttcaatcattactctgaaaaatggaattcagaacatgctgcagttttatattccggaggtagaaggcgtagaacaggttatggatgatgaatcagatgaaaaagaagcaaactcaccttaaaataatctggattttctttgggcataacagtcagacttgttgataatatatatcaagtttttattattaatatgctgaggaacttgaagattaataaaatatgctcttcagagaatgataaaaaaaaaaaaaaaa

SEQ ID NO: 236993 - DNA, 725 bp, Homo Sapiens
  misc_feature (43)..(43): n is a, c, g, or t
tgggatcttcaaactgttcctgcttttccttgtagctaagagnccggtgtcaccatacagcgggtacaatggcagctgctgaccagtgttaccagcccactgagatggccctgatgcacaaagttccgtccgaaggagcttacgacatcatcctcccacgggccaccgccaacagccaggtgatgggcagtgccaactcgaccctgcgggctgaagacatgtactcggcccagagccaccaggcggccacaccgccgaaagacggcaagaactctcaggtctttagaaacccctacgtgtgggactgagtcagcggtggcgaggagaggcgggcggatttggggagggccctgaggacctggccccgggcaagggactctccaggctcctcctccccctggcaggcccagcaacatgtgccccagatctggaagggcctccctctctgccagtgtttgggtgggtgtcatgggtgtccccacccactcctcagtgtttgtggagtcgaggagccaaccccagcctcctgccaggatcacctcggcggtcacactccagccaaatagtgttctcggggtggtggctgggcagcgcctatgtttctctggagattcctgcaacctcaagagacttcccaggcgctcaggcctggatcttgctcctctgtgaggaacaagggtgcctaataaatacatttctgctttattaaaaaaaaaaaaaaaaaa

SEQ ID NO: 236994 - DNA, 758 bp, Homo Sapiens
  misc_feature (8)..(8): n is a, c, g, or t
  misc_feature (32)..(32): n is a, c, g, or t
gcacaganccacgtgaaggagagatgagcccnccgggccggacaggggcacacgtgtgcaaagagacggtggtgtgtttctctcctgcatctgcgtgtgcacacatgtgctgggcacgcgtgtggtgaggtctgagagggccccgggctgcactggtgtgggctgcacaggcacagacgcagacggccccggccgtgtcctgtggccccctgtcggatggatgcgtgccgtttgtagagaagagcctttgggcccattcactcgttcagcagacacgcatgggactgatgctttgagttttcttctgtggggttttcctttctctggtctccgtgcagcccctgccctccctcgggtgctgctggcctcaaaggaggaactcgtggggggagggtgtgatttgcagacctgggtctctgctctgctctgggggtggggcttgctttcacagagaccctccttccctctcacccctcctctcccggcctcgccaggagtcttggctgttggcagctcagaggtgggggaggcctgtggtgtgaggtgccctgcacctgctcctgctcctgtcaccccttcctgctgcctcctccatgcccaaggaacacccatggtgcagtcctcaggcaaggccaggacggggctgaggccctgcgtggagatgctgcaccagcggaaggctgagacccgcttaccttagttcatctgttcactcgtaataaaaagaattctctcaggtcagaaaaaaaaaaaaaaaa

SEQ ID NO: 236995 - DNA, 703 bp, Homo Sapiens
  misc_feature (685)..(685): n is a, c, g, or t
tctgcatttagtttgttaatgtctgaaatgaataaaaagaggaaattgcgattaaactgatgttctgctttttatggagaagattctgcccatctcccctggacagtagcaggcaggtgagggcagattttacccacttggttgtcacaactgaaccagttctctactccttcccttcacttctgtccactctcaagactttttcccaaaacatgcctgggcactctgcagccgtgaagaatgctcattttgacagaggcccaaatcctgtgtattaggataatatccttccccccgggagccttcgctgcaaacctgttctgccgcatgcaaagactgtgaccatggagttttctcagacaagatttggaaaggcagtggaatgaaatctctttgcagtggcctctctccaaatttccaaagatgactgcatagggaccaacactgcctgactttgcagtatctgtgagaaaaacctgaaaattaattcagggtgaaaatgtggagctctcggcctagtgtaaagtatcaagatgtatatttatgggatagatacatgacttagaagaagtagaagaaaattgtccagaaacagtactgaattttagatagaaaaggctcatgcttcctggagtagggaattgtctttgccatttaatgtgaatgcataaaattaggggaaaanccaaaaaaaaaaaaaaaa

SEQ ID NO: 236996 - DNA, 733 bp, Homo Sapiens
aagaggaaaggacggcctcctggacacatcctgtcaagcgaccgggcagccgccggcatggtatggaaaccaaaatcctgtgaaccaattcgccgggaaggccccaagtgggacccagctcgcctgaatgaatctaccacctttgtgttgggatctcgagccaacaaagccctggggatggggggcaccagaggaagaatctacatcaagcacccacacctctttaagtatgcagctgacccccaggataagcactggctggctgagcagcatcacatgcgggcaacagggggcaagatggcctacctcctcatcgaggaggacatccgggaccttgcggccagtgatgattacagaggatgcctggatctgaagctagaggaattgaaatcctttgtcctaccctcctggatggtggagaagatgagaaagtatatggagacactacggacagagaatgagcatcgtgctgttgaagcacctccacagacctgaggccgggtcccctggccacacttggcagccctcctccaaagccctcttcctcacgtggctgaggccaccgctgggactgctcctagatggatctcagcggcattaagctgtgcctgagcgagtttgtagtgactcactgcacagcacccccagactagcatgtggttctatatttgtaaagttattgggataagaaacaattaaacagtttgtagtaaacacaaaaaaaaaaaaaaaa

SEQ ID NO: 236997 - DNA, 719 bp, Homo Sapiens
acaacatcaaaagagtgattactggaactgaaacggcagcagcaagagcaagaaagagccaaaatccaccagactgaacacaggagggtaaatatgcttttctggaccgactccaaggcaaaagtcaaccaggtggcctcgagcaatctggaggctgttggaatatgaatagcggtaacagctggggtatatgagaaaatattgactcctatctggccttcatcaactgacctcgaaaagcctcatgagatgctttttcttaatgtgattttgttcagcctcactgtttttaccttaatttcaactgcccacacacttgaccgtgcagtcaggagtgactggcttctccttgtcctcatttatgcatgtttggaggagctgattcctgaactcatatttaaactctactgccagggaaatgctacattatttttctaattggaagtataattagagtgatgttggtagggtagaaaaagagggagtcacttgatgctttcaggttaatcagagctatgggtgctacaggcttgtctttctaagtgacatattcttatctaattctcagatcaggttttgaaagctttgggggtctttttagattttaatccctactttctttatggtacaaatatgtacaaaagaaaaaggtcttatattcttttacacaaatttataaataaattttgaactccttctgtaaaaaaaaaaaaaaaaaa

SEQ ID NO: 236998 - DNA, 807 bp, Homo Sapiens
aatcacaggagagagcgtgagttcccagtatttattcctggctgcccttggctaaaggtcacagctcctgtcaccctgtcaggcagccctttccatgcccctgttcaggcctggggaggtaaaggctcaggctgttagtagccgcagagagccacactcaccttgtcaggagactcttctcaaactgtccttatgtgagtgcactgccatttcttgcagggaccctgactgacacaggggctactactgacactttacagggatggttctcccccgtgcagggccgctgtgcccactgcaggacatgcagcatccttcgccccactccactcactaaaggccagcgcaccccaggccccatagtattgctggttatggatttattgactttatgttccaaattcagctttttcagttggctgttttttgaaaggggataagctttgtcagtagagggcaccaaacaggcattataggaggaaaggcgcctccttcgtggttcttgttggttgtgcttctgcctctggacgccgcagtgcatgtggcttccccagcacccagctcctgaagcaccaggcggtcagcagctgcccttggcaccctccagccctcagaagttgcgtaggagacacagcgcctccactgaggcacctctctgggaataacgttccccagcaccccaaatggatttccagtcaattcagaagcattttaccagtgaagccctcattattccagttcactgttaaagccagtaattctctatattaaactttccctgttcaagttaaaaaaaaaaaaaaaaaa

SEQ ID NO: 236999 - DNA, 756 bp, Homo Sapiens
  misc_feature (93)..(93): n is a, c, g, or t
gagcctggaggagcagaacgaggtcataggcatgcatgcagccatgaagtacatcaacacgactctggttcgcgcatcggctccgtcaccatnagcgacgtgctggagatccacaggcgggtgctgggctacgtggaccccgtggaagccggcaggtttcggacaacacaggtcctggtcggacaccacatccctccccatccgcaggatgtggaaaagcagatgcaggagtttgtacagtggctcaactccgaggaagccatgaacctgcacccagtggagtttgcagccttagcccattataaactcgtttacatccaccctttcattgatggcaacgggaggacctcccgtctgctcatgaacctcatcctcatgcaggcgggctacccgcccatcaccatccgcaaggagcagcggtccgactactaccacgtgttggaagctgccaacgagggcgacgtgaggcctttcattcgcttcatcgccaagtgtactgagaccaccctggacaccctgctttttgccacaactgagtactcggtggcactgccagaagcccaacccaaccactctgggttcaaggagacgcttcctgtgaagccctaaccctagaaatcctcagtgacaaaggctgtcctgaggtaggaaaaaaaaaaagaaacagcatttctagaaacctagtcacttcctaaagcaaaaggagaaacattctttacctcccaaatgttttagtttaaaaaaaaaaaaaaaaaa

SEQ ID NO: 237000 - DNA, 692 bp, Homo Sapiens
  misc_feature (334)..(334): n is a, c, g, or t
  misc_feature (337)..(337): n is a, c, g, or t
accaaagcaaatccggccatgaagactgtctacaagttcgcaaaagatcatgcaaaaatgggaataaaagaggtgaaaaaccgcttgaagcaaaaggacattgccgagaatgctgcgcccccaccccagaagagcagctgccaaagactgcaccgtccccactggtggaggccaaggaccccaagctccgagaagaccggcggccaatcacagtccactttggacaggtgcgcccacctcgtccacatgttgttaagagaccaaagagcaacatcgcagtggaaggccggaggacgtctgtgccgagccctgagcaaaacaccattgcaacacnatntacactccacatcctacagaaaagcattacccattttgcggccaagttcccgacgagaggctggacctcttcatcacattgacttacgccgttgcttttccagactgggcagaggggctgacttcgcagtgtgtgccaaagagccggtgtctgataatcccattttcctgcttatcacctgaactgtgtcagtatcacttttagttttgttggttggttggtttgttgtttgtttaatatgccctgttttctacttctgttggaaaatatttggggttgaaataaaccagtgggagcatgggagccagtttggtggttggcaaactaccagtgatagaaaaaaaaaaaaaaaaaa

SEQ ID NO: 237001 - DNA, 550 bp, Homo Sapiens
acagtggttctctggacaagctttgtccatcccggtccccagctgagtgcccagcgctgagctgggtgcacggtgtgattccaggaggagagccaggcctgccctgccctgctggcttcctgactggagagacaggacccacagaaacagcctgacagcagctggtttggtccttgtgtgagggaccaagcatgtggcccaggctctaagctctgcggggattggagagggatggggagggaagggaaggcagctccaagaagaggtccctgtggcgaagttacctggggatcctggctggcccaccttcctggctgcagtccaggcccgtgctggcgggattgggcatgggaaggagcagggcctgctgcttccctggcgctgctcccaaagatttctgactcatctgccagctctgtcctgcatgcctggcgagctggggcccagggcagcatgaaggagagccctgcgttctgtgcttcttaccagaggtttgcaagcctcagacaaataaatgtggtgtttacaatgtaaaaaaaaaaaaaaaaaa

SEQ ID NO: 237002 - DNA, 764 bp, Homo Sapiens
  misc_feature (15)..(16): n is a, c, g, or t
gcatggaaggaagtnntgatcctcaggggcctctcaacttaataacaggttacagggaacaaaggcctggattggagcatgtgaagtatatatactcctgacctccctaagggtaaagtgtcatattgttgattttcacaaatcaactggtcctttgggtacacaccctcgcttatttgaatggatattgaactattattcttcagagggagaagggagtccaaaggtagtgtgtacatctaaacctcctatctatcttcagcatcaaggtcacagtcgaactgttattggaattgaagagaaaaaaaaccgaacattatgcttactaatacttgatcctggatgtccttctcgagaaatgcagaaattattaaagcaagacatagaggctagcagtctcaagcaacttcggaaatctatgggaaatttaaaacataagcaataccagatattggcagtagagggtgctctttctctagaggagaaacttgccaggagacaagcttctcaagtctttacagccgagaagattccttgaagaatcaagcatttaagcatttcagtgattgagaacaatactttgttttctaaatgtagatattgaactccttaatacaattatgaatctgtgaattctcttaagtcttaacatataatttaatttctaaaatgcctgtgttaattgaattatacctatcatacttcattgtttggtaaattatttcaataaaatgtcttgtttttgcaaaaaaaaaaaaaaaaaa

SEQ ID NO: 237003 - DNA, 744 bp, Homo Sapiens
  misc_feature (22)..(22): n is a, c, g, or t
  misc_feature (67)..(67): n is a, c, g, or t
  misc_feature (112)..(112): n is a, c, g, or t
  misc_feature (292)..(292): n is a, c, g, or t
aataggaagcaggagcagcagnccaggttgcaggttgaggaagtcagaagttaacttgagctgagtntgcagctctggagagattgaggagcagacttttctcttgtcactntggaaggagaggattgtgaggctgcccctttaaatagcattcccgtaggaggcagatcacatccatccgtcacctactgccaaagcatcatttttggtttctatcaaactcaaagcttgttggaaaggattgtggggttaggggagtgaggaggcagagcctcctaggggtagggggcangtttgaagctgaaaaggagaggaatgagaaggagcctgggaaaggtgggggatgaggacaagaggaaaagacagggagagaatagttgtcttttgagcctcagagtggaacaagtatacccaattcttatctgtttagagacgcagcaaggtagaaatgggattgtattgcaacaagaggaatgaggttgagactaaacaccaggactggtgactaaagaaagtgaaaggagccacagagtgaaaaaggctgatagacttggctctggttttatcacttactctctgtgagaccctataatttttctgggttagtttagttctcatttatttttatttttactttttccatcaaactgtgttgtctatgaagttttcccatttattaaatgaagggaattagagtggatgaactctaatgtctctttcacgaataaaaaaaaaaaaaaaaaa

SEQ ID NO: 237004 - DNA, 740 bp, Homo Sapiens
  misc_feature (721)..(721): n is a, c, g, or t
ctatgttgggcttctatccagcagaatgactatcacgtggaggaagaacgggaacttgtcatgcctcacagcagtgcgcacaagactgcccagcccaatggagactggacataccagaccctctcccatttagccttaaccccctcttacggggacacttacacctgtgtggtagagcacattggggctcctgagcccatccttcgggactggacacctgggctgtcccccatgcagaccctgaaggtttctgtgtctgcagtgactctgggcctgggcctcatcatcttctctcttggtgtgatcagctggcggagagctggccactctagttacactcctcttcctgggtccaattattcagaaggatggcacatttcctagaggcagaatcctacaacttccactccaagtgagaaggagattcaaactcaatgatgctaccatgcctctccaacatcttcaaccccctgacattatcttggatcctatggtttctccatccaattctttgaatttcccagtctcccctatgtaaaacttagcaacttgggggacctcattcctgggactatgctgtaaccaaattattgtccaaggctatatttctgggatgaatataatctgaggaagggagttaaagaccctcctggggctctcagtgtgccatagaggacagcaactggtgattgtttcagagaaataaactttggtggaaatntaaaaaaaaaaaaaaaaaa

SEQ ID NO: 237005 - DNA, 667 bp, Homo Sapiens
  misc_feature (667)..(667): n is a, c, g, or t
tcccagcgagcgagatgtttccctgttcagagaggaagtaacatcacttatgcttgactggtgtttcttttgttgttgtttgtttttctttcaattggaattctgtatttaagatgttatgtcagctgacacatgggacactcctgaagaggtgactggccccccaccctgtttggcggtgagtttccgcaccaccggcctcagaagtgtccctcttgcttcgtctcttgttcgcttgctttgtaaatactttggtcccaagctgagacaattgctgtgtaaaacgtgaagagtcaatcccaaagggtgttatttgtcagaagaacttgccgtgtgccttcaccgaaggcagtcaagtctgcagttggatttttctcactggtgaatgacaagaaacagggataattttgcactgcggagatattacgggagttgtctatatgattatatatagtacctgattctttgaacatattattgaactccaaaatgaattcgacctccattcaggcttcctgaaatctctgaagttgctgaaatttgtatattattttccttttccaatgcaagatctgctggtgacgggaaatgactgtctggttttattatggtttataaattaataaatgggctatttaattctgtatataaaaaaaaaaaaaaaaan

SEQ ID NO: 237006 - DNA, 637 bp, Homo Sapiens
tttctcagcttgtgaagtcattctaaagctagaggaagtatgtgatatacacatggactaaggctcaggtgacactatggctagattaacatctgggattaggactggaaacacatgtcattttgaactaagggaaactctttgtcatcctaatttggaatttggtccctggatggctagggatccatgaaccaggcaggtaccttttttgtttttgttttgttttgtttcttttctgtttgaattaagatgggctaagatggggcttgcaacattaaacatgagctgagcatccataagcattgaattgggattaaataaagatgttgggcaggaactgaacactgctaatatgatgataaatatgcctgactaaagccactacagaaatccagagattggctgttaaaatttgttttgtggaaagactaattctctttgatactgcagaggcagtggccatggatctgttcctctgtgctaaatgtcttgtggcagggtgtgtttgtgggggagtgttcactggtactcttgagtggcctgaagtgacccattctatgaattgttaattaaggtgccaaaaaaaattaataataaagcttggttttttgaaaaacccaaaaaaaaaaaaaaaaaa

SEQ ID NO: 237007 - DNA, 719 bp, Homo Sapiens
  misc_feature (136)..(136): n is a, c, g, or t
agtcagggccgaggacccttcctgtccaatgccagctccctgctgtccctgcacgtggacctggggccttccatcctggatgatgtcctgcagatcatggatcaggacctggacagcatgcagatccccacatagngacacgaggctgcctaggctggggtcccaggtggggcccagccaggaggtggggtgtggacccggccctggcggcggagtcagggtcccaagatcccacctgtatggtcgctggccagtgattctccttctgagccgtgtttcccctctccctccctctccacgtgggcagggcaggccccatcgctttcctctgataaccacatggacacatcctgaagtcagcccaggcgccctgagcatcttggggcacctggaccccatcacaatactccttcttccttcaggtccctgggtgaaggctttgctgaaaccgaccccccttttcacgtcccttctgcctctgccccgttggatgccctgactgggggcaggggaagagacagggcacagctggccacagggctcagccactgagcaggctgttccgggcctttggctttgcatcctggacggggagtgtcctgtcagggaccagatgtgtcctgcctcatccctagctccaatcccttccccacgtgaccggggattctggttgcaataaaacatgctgctgctggtggcggaaaaaaaaaaaaaaaaaa

SEQ ID NO: 237008 - DNA, 764 bp, Homo Sapiens
  misc_feature (79)..(79): n is a, c, g, or t
tgcagaagaggcagataggaagtatgaagagtggctcgtaagttggtgatcattgaaggagacttggaacgcacagagnaacgagctgagctggcagagtcccgttgccgagagatggatgagcagattagactgatggaccagaacctgaagtgtctgagtgctgctgaagaaaagtactctcaaaaagaagataaatatgaggaagaaatcaagattcttactgataaactcaaggaggcagagacccgtgctgagtttgctgagagatcggtagccaagctggaaaagacaattgatgacctggaagagcgtctctacagccaacttgagcgaaaccgcctgctttctaatgagctgaagctaacgctgcatgatctgtgtgactgatgggcagggctcaatgatgcccattaaactgagcttactgctcacaccactgacctggaccccaacaaaaagctgattgtctttttaaaagttattattttgccctgagcaaattgcattttaattggggcagttagaatgttgatttcctaacagcattgtgaagttgaccattgtgaagtttctgtccctttagaagagattatgggtgaagaagggaggggcctgagagattatagtgagaaaacttgcgagaattttgttttccacccttatttgctgctctttcacttgggcactgactgtaggatatgttcccttgcatggatgtttttaacaataaaaggactgacttgaaaaaaaaaaaaaaaaaa

SEQ ID NO: 237009 - DNA, 720 bp, Homo Sapiens
  misc_feature (49)..(49): n is a, c, g, or t
gcactcgagccaggacagactgctgccaatgaccgtggtgacaatgccnagcgccagggtgcaggacctgatcgggctcatctgctggcagtatacaagcgaaggacgggagccgaagctcaatgacaatgtcagtgcctactgcctgcatattgctgaggatgatggggaggtggacaccgatttccccccgctggattccaatgagcccattcataagtttggcttcagtactttggccctggttgaaaagtactcatctcctggtctgacatccaaagagtcactctttgttcgaataaatgctgctcatggattctcccttattcaggtggacaacacaaaggttaccatgaaggaaatcttactgaaggcagtgaagcgaagaaaaggatcccagaaagtttcaggtgcttgtgactaaattcactaatttcactggctgtcaaggctgtgttaaggaaaatgggtttgaactgctgtgggttttgagtactggactggatgtcagaaacctttgccatcacgggaaattctgtcactctggatttactgtctgttccccacagctaaattcctctgcagtgtgatttagcaccctggatccccatcaaccagttttggcatttatttgaatgcattaccccactggtttccataaactattttacaattgtttaaaataaatgactgtttatttccacaaaaaaaaaaaaaaaa

SEQ ID NO: 237010 - DNA, 745 bp, Homo Sapiens
  misc_feature (13)..(13): n is a, c, g, or t
  misc_feature (167)..(167): n is a, c, g, or t
gctgttctccgtntctgtgaggaacaacattgcttatgggctgcagagctgcgaagatgataaggtgatggcggctgcccaggctgcccacgcagatgacttcatccaggaaatggagcatggaatatacacagatgtaggcgagaaggggagccagctggctgcgngacagaaacaacgtctggccattgcccgggcccttgtacgagacccgcgggtcctcatcctggatgaggctactagtgccctagatgtgcagtgcgagcaggccctgcaggactggaattcccgtggggatcgcacagtgctggtgattgctcacaggctgcaggcagttcagcgcgcccaccagatcctggtgctccaggagggcaagctgcagaagcttgcccagctccaggagggacaggacctctattcccgcctggttcagcagcggctgatggactgaggccccagggatactgggccctcttctcaggggcgtctccaggacccagagctgttcctgctttgagtttccctagagctgtgcggccagatagctgttcctgagttgcaagcacgatggagatttggacactgtgtgcttttggtggggtggagaggtggggtggggtggggtgtggtggggtggaggctgtctgtgtccaggaaacttaattccctggtgactagagctttgcctggtgatgaggagtattttgtggcataatacatatattttaaaataaaaaaaaaaaaa

SEQ ID NO: 237011 - DNA, 730 bp, Homo Sapiens
gacagccaccgtgccccgcagctcaaggatgacggcaagccagccaagccgcctccctagccaggaacctcgcaaagcgcaggcgcacctacctgggtggcgcggctgggcggagtcaagagccggaagtcccttgtgccgcagtccttcccgggaaacctggggaccggaactgcccggagttcccgcccccagacagaaccctgggttgctgggcaaccgatgcggcccccgcagctggtctctgtggtgctgggagcgagcccagtatagctcccacctcctgcgctggtaacctcccgtcccgcccgcctcccttgttgtcgcctctcctcgcgtcgcggaatccttgcccttggcactacttacatctctccgggtcccacaacaccttagcgcccacctgcttcaaagccaagctccaccgaaagcgaggcagtcagcccccggacatggcctcagcgctgactgatcgcacctctcgggccccgagcacctacacctacaccagccggccccgagcactgccctgccagcgcagccgttaccgggacagcctgacgcagccgtgagtgaccaagccagcccctgtgtggtccatacttgcaccccatccccaggccggggtctggccccttcgccctggcaaaaaagctgcttatgctgtcttcccttggctgcactctgccgaaataaaagttctgccctaaggaaaaaaaaaaaaaaaaaa

SEQ ID NO: 237012 - DNA, 748 bp, Homo Sapiens
  misc_feature (35)..(35): n is a, c, g, or t
  misc_feature (91)..(91): n is a, c, g, or t
agacagaagcagcccagcaccaagctgtggtgacnggtctcaccccggaagtacatggaaaccattgagaagctgcagaacgacaaggctnaactagaagtgaaatctcagactctagaaaaggaagccaaggaatgtcgacttcgaacggaagaatgtcaattacagttaaagactcttcatgaagatttgtcaggtagattagaggaatccttatcaatcatcaatgaaaaagtaccttttaatgatacaaaatatagtcagtacaacgctctgaacgttccactccacaataggagacaccagctgaagatgcgagatattgctgggcaggccctggcttttgttcaggatcttgtgacggctcttctaaactttcatacctacacagaacagaggattcaaatttttcctgttgattctgccattgacactatatctccattgaatcagaagttctcacaataccttcatgaaaatgcgtcctatgtccgccctcttgaggaaggaatgcttcatttatttgaaagtatcactgaggatactgtgactgtcttggagacaactgtgaaattgaaaactttttcagaacacttaacctcctacatatgttttcttaggaagattcttccctatcagttaaaaaggtagttacccccggaggccagggaacttggggaattgtgggtgtaacctgatctggctggcgttaataaaatattaacatgtgaaaaaaaaaaaaaaaaaa

SEQ ID NO: 237013 - DNA, 726 bp, Homo Sapiens
  misc_feature (53)..(53): n is a, c, g, or t
  misc_feature (55)..(55): n is a, c, g, or t
ctccagctcccggagccagtcggcagcggtcacccccgtcatcccaccacctntnccacccgtgccaccccagccccttttgctccagcagctgcctcagcaactagcccgagccccgcgcccagttccgggaatggagccagcacagcagccagcccgacccagcccatccagctgagcgacctccagagcatcctggccacgatgaacgtaccagccgggccagcaggcggccagcaagtggacctggccagtgtgctgacgccggagataatggctcccatcctcgccaacgcggatgtccaggagcgcctgcttccctacttgccatctggggagtcgctgccgcagaccgcggatgagatccagaataccctgacctcgccccagttccagcaggccctgggcatgttcagcgcagccttggcctcggggcagctgggccccctcatgtgccagttcggtctgcctgcagaggctgtggaggccgccaacaagggcgatgtggaagcgtttgccaaagccatgcagaacaacgccaagcccgagcagaaagagggcgacacgaaggacaagaaggacgaagaggaggacatgagcctggactgagccacgcgccgtcctccgaggaactgggcgcttgcagtgcgttgcacaccctcacctcccacccactgattattaataaagtcttttcttttacctgccaaaaaaaaaaaaaaaaaa

SEQ ID NO: 237014 - DNA, 685 bp, Homo Sapiens
  misc_feature (43)..(43): n is a, c, g, or t
  misc_feature (661)..(661): n is a, c, g, or t
aagcatttctgtctgaatgtaaagcctgttctagtcctggtgngacacactggggttgggggtgggggaagatgcggtaatgaaaccggttagtcagtgttgtcttaatatccttgataatgctgtaaagtttatttttacaaatatttctgtttaagctatttcacctttgtttggaaatccttcccttttaaagagaaaatgtgacacttgtgaaaaggcttgtaggaaagctcctccctttttttctttaaacctttaaatgacaaacctaggtaattaatggttgtgaatttctatttttgctttgtttttaatgaacatttgtctttcagaataggattctgtgataatatttaaatggcaaaaacaaaacataattttgtgcaattaacaaagctactgcaagaaaaataaaacatttcttggtaaaaacgtatgtatttatatattatatatttatatataatatatattatatatttagcattgctgagctttttagatgcctattgtgtatcttttaaaggttttgaccattttgttatgagtaattacatatatattacattcactatattaaaattgtacttttttactatgtgtctcattggttcatagtctttattttgtcctttgaataaacattaaaagatttctnaacttcaaaaaaaaaaaaaaaaaa

SEQ ID NO: 237015 - DNA, 572 bp, Homo Sapiens
tctccggatggggagtccttggccagggtctctgactctgtgtcacctgacatttgcccatgagagccgctgggccttagagaggccttggcccagctgaccggttctgaagtatgggcctccggggttagcagatgccagcagtgcctgcccgtgtccccatgtcccggcatgaaggacactgctagagagttaccatgcacaccgatggtttcctgtatcacagcccaaagaggttctctggtggccacagctgtgtgctcagtcagtgcactgggcaagctagaagtgttggggggttaatgtccccaggagcagcaaccctgagtcaataaggagcaggacctcagcttcattgtccttgagcaggacaattctgaagtgtattctacataaactctcagaggatgcccagcaggatggagtcccagttgcccgcagcagtaacccactcattcatgtacttcctgcgggggctctcccttccctctcttccccactcccccgccttgggcttcctgggatggctcccaaaataaacctcttgcacccagaaaaaaaaaaaaaaaaaa

SEQ ID NO: 237016 - DNA, 715 bp, Homo Sapiens
tctgacgacgggaacctcggctctgtgtacatttatgtgctcctaatcgtgggaacccttgtctgtggcatcgtcctcggcttcctcttaaaaaggttccttaggatacagcggctgttcccgccagttccacagatcaaagacaaactgaatgataaccatgaggtggaagacgagatcatctgggaggaattcaccccagaggaagggaaaggctaccgcgaagaggtcttgaccgtgaaggaaattacctgagacccagagggtgtaggaatggcatggacatctccgcctccgcgacacgggggaactgttttcttgatgatgctgtgaacctttatatcattttctatgtttttatttaaaaacatgacatttggggccaggcgcggtggctcacgcctgtaatcccagcactttgggaggccaaggcaggcggatcacctgaggtcaggagttcaagaccagcctgcccaacatggtgaaaccccatctggactaaaaatgcagaaatttacccaggcacggcggcggacgcccatcatcccagctacttgggaggctgaggcaggagaattgcttgaacccgtgaggcggaggttgtagtgagccaagatcgcaccattgcacaccaacctgcgtgacagagcaagattgcatctcaaaacaaacaataataataaataataaaaacctgaaaaaaaaaaaaaaaaaa

SEQ ID NO: 237017 - DNA, 690 bp, Homo Sapiens
  misc_feature (29)..(29): n is a, c, g, or t
  misc_feature (83)..(83): n is a, c, g, or t
cggcacgaggagaggcgggggcgctaggnccgagatcatgtctgactgggagaggtttccttggcagcagaggacgctaggtntgggatgaaagaagctgggcagatgcaaaatctggagagcgcgagggccgggcggtcagtcagcacccagactggcagcatgaccggtcagataccaaggctttctaaagtcaaccttttcactctgctcagcctctggatggagctctttccagcagaagcccagcggcaaaaatctcagaaaaatgaagagggaaagcatggacccttaggagataatgaagagaggaccagagtatctactgacaaaagacagaaaaccatgttctgcttgtttgaaaatgattgtaaatgctggagttaaccgaatttcatactggcctgctgatccagaaataagtttgcttacggaggcttctagttctgaagatgcaaagttagatgccaaagcagtggaaagattgaagtcaaacagtcgggcccatgtgtgtgtcttacttcaacctttggtgtgttatatggtgcagtttgtagaggagacctcttacaaatgtgactttattcaaaaaattacaaaaacattgccggatgctaacactgacttttattatgaatgtaaacaagaaagaataaaagaatatgaaatgttaaaaaaaaaaaaaaaaaa

SEQ ID NO: 237018 - DNA, 723 bp, Homo Sapiens
  misc_feature (11)..(11): n is a, c, g, or t
  misc_feature (96)..(96): n is a, c, g, or t
cgagccaagtntgaggagtatgtccggtcatcgaatgtgacatcgtgaaagattatgccttcgtacacatggagcgggcagaggatgcagtggagnccatcaggggccttgacaacacagagtttcaaggtaggataattgcggactgaaccctcgggctgcggtcatatatgagaacttgctccgcgcggtcccctttgccgggatgtttccattgcttcatgtttcagtaaacaaaaggagtttgtgaccaactatgttttctttcttaattcttctaagttgacttttctttcctcctgaaactagtctctgtagcctttcactctgttccttatattctcagcctctgagcagccctaggtaaggattatgctggcatcccctttttcctgtgcagtggaacccctcttatcttgctttccctaggagttgaatccttctccctgcctacctgcagcatctcctttccctttaaaatgaccatgtagtggcaagcagccttttactcttctgttagctctggactcttaacacttaagttactcttctgaaattgctaggaccattgggggttttgttgttttgtttgttttttatgtccgacctgtgatcgtggtacagcattagctgaaatttacccttgttttactccactcctcccttttttaaaaaaattttttgacaaataaatgtttctaacacttaaaaaaaaaaaaaaaa

SEQ ID NO: 237019 - DNA, 728 bp, Homo Sapiens
  misc_feature (728)..(728): n is a, c, g, or t
gaggacggtaacgcttcggcggcttcggcagctacagccagcatcagtcctcctatgggcccatgaagagcggcggcggcggcggcggtggaggcagtagctggggcggtcgcagtaatagtggaccttacagaggcggctatggcggtgggggtggctatggaggcagctccttctaaaagaaaatttaaaatgcctgggagtggctataggggtagctctttccaacagcccaagtggggtcaactcctaagccccaccccctcacacacaccgccttccctgttttgcccttgggggagccacttctaaggctgcttacccttgggggtgttcctctatttgcctgccacctctcttgtctctccctctgaagatggactcggccccacatacacatttttgtgttacagtcattgatggactctatttttttattattacttggaccttggtcgtttttatactagcaaaatgtcttgttttaatttgtgttttttggggggagggagggagtgaacttgctgattctgtagcaaaacctgggtgggggttggggtggggggtagtttactttgttgtaaggacttgataacctggctacagcgttttctatgaaatctacttggatcccatgcctgaaatttggaagcatatgtacaaaaatcatttttacgttttatttttaataaatcattgtgtttgaccgtaaaaaaaaaaaaaaaaan

SEQ ID NO: 237020 - DNA, 638 bp, Homo Sapiens
  misc_feature (36)..(36): n is a, c, g, or t
  misc_feature (41)..(41): n is a, c, g, or t
  misc_feature (146)..(146): n is a, c, g, or t
ccaaccagcccagccactgttgctggctgtgtcgtntgtgntgtgtgtatggtactagcacaccactgcatgtctctagaatgctgttgccacttacgggggctggagaaggcctggataaagacagaagggcggcaacacaccancccagcccccacccccaccctctccttgagtttctgtgtattaaaatatttgcaaatccaaagagatgccttccaggatgaacaaaggcagaccagctccgaggggcggggtagggtggggcgggagctccctggctgacatctctttgttctccagctgtctcaaattcacacctctgtacagggcaaagttttcccacaggagcccccctactgatgctgggagccaaatgctggtgctttgagagtcccggaggccccggggttcccgccccgctggtgtgtatatgtgtgtctgtgtgagtgtgtgtgtgagtacagatgtgagaaggtggtcacacacagatgggtaagcccactgatctacttgtagtcactcagtgtaatcattaggctatcttcaaggaatcattgtgcagtcaaaaagaggattcaattatttatgaatagggtgtgtaaataaaatagtcatttaataaaaaaaaaaaaaaa

SEQ ID NO: 237021 - DNA, 705 bp, Homo Sapiens
  misc_feature (93)..(93): n is a, c, g, or t
gagcgagaggcgctcactcgcagctttcccgcccgagctccctcattgagcaggagaagcagcgcagcctggagaagcagcgccaggacctgnccaacctgcagaagcagcaggcccagtacctcgaggagaagcgcaggcgcgagcgtgagtgggaagctcgtgagagggagctgcgggagcgggaggccctcctggcccagcgcgaggaggaggtgcagcaggggcagcaggacctggaaaaggagcgggaggagctccagcagaagaagggcacataccagtatgacctggagcgactgcgtgctgcccagaaacagcttgagagggaacaggagcagctgcgccgggaggcagagcggctcagccagcggcagacagaacgggacctgtgtcaggtttcccatccacataccaagctgatgaggatcccatcgttcttccccagtcctgaggagcccccctcgccatctgcaccttccatagccaaatcagggtcattggactcagaactttcagtgtccccaaaaaggaacagcatctctcggacacacaaagataaggggccttttcacatactgagttcaaccagccagacaaacaaaggaccagaagggcagagccaggcccctgcgtccacctctgcctctacccgcctgtttgggttaacaaagccaaaggaaaagaaggaaaaaaaaaaaaaaa

SEQ ID NO: 237022 - DNA, 750 bp, Homo Sapiens
  misc_feature (15)..(15): n is a, c, g, or t
  misc_feature (30)..(30): n is a, c, g, or t
gagcagtcctcagcntagtggcccagttcnaaaagaacagcaagctctgacagtaaacctctcctaaagcacagggccccggctaagaaaacgatcattttcaggaggggccgggagttatgtatctgaagcagctttccaagcaaagccaaagttgactgtgttcttgtcccgcagccggtccacactgtgaggccaggcctcaacttccctcaccctgggcgtgacatgcacccagtgcaagacggttgtgggtgcgggtgcacacaaatgagtgggttgctgtgctgtctccggaagattctgtcgttgcccttggcctggctccctgcccggggctggtgctgtggtacctacatcttcaggaagctgtgcagcctctgccattgccatcccagggggatctggcatcctcctaaggaccggggcgcgtggcccagataagaataggtgttcctttgtgctcataaaacagaatgcggcgatggttgctttagccgtttctcaccatgcaatgcagagggacaaagggctgtgctacacttcccagttacattctgaagctcataaatgtatgagaaggtttgtgattttgcacaaggtgtgtgtagtaagttaaattgttgaacacaaaaatgttgctgcttgaggcataagttggataataggctttaaatgatcagggattcaggttcataatgaacttcacagtaaagaacacgtttgttctgtaaaaaaaaaaaaaaaaaa

SEQ ID NO: 237023 - DNA, 687 bp, Homo Sapiens
acagtcagtgtaggcgacctgactgaggtcaaagggcagaccagcggcagtgtctggagctcctaccgcaagagctgcgtggacatggtcatgaagtggctggtgccggagagcagcggccgctacgtcaacaggatgaccaatgaggcgctgcacaaagggtgctccctgaaggttctggcggacagcgagcgatatacgtggatcgtgctgtgagggccaggccgccccggacactgactccaactacctccgtggcctgggaccggcccccttcctggggtggcctcttcctggccggctggcccaccgactgatgaccggcactagtgttagcctgcggaacggggctgggcagggcagcctctgttggcctgagggtctggacgctttttatttatgcctatttaagttgggaaggggcagagagagggcgccccctgccccaccagcctgagtgccccgccttcaccccgagctgggcatgggcctggcccctcgtgcatttgcccttttctcggctacagctgtggacgttgccctcggggaggtcgaatggaccccattccccctgccctgcccgcccccagcctccccacccaggccggcaacctggccatccccattccgttcttcttcatgtaataaatgttttaatttctgaacctcaaaaaaaaaaaaaaaaaa

SEQ ID NO: 237024 - DNA, 648 bp, Homo Sapiens
ttgtctcttgtcttaggacctggtagttatttgcttgatttttttttccgttattttctacataggcaaagagaattcgagggatagacagtctccaagaaaagtgaagtggtgggagagaattgcttttttcttttttttcttttctctagtttttctttctggctgagatttccgtgcaagacagcacccaatagactatttagagttgacatttgacattttaatgggcgccatggctcattttgtagattgagaaggtgcgtctcccctgctccaagtctcatcatgacagcgtgctgacagctgggagtctgtggccttcctcacgcagaggccttaaagctggacacagaagcacgcctaggctgggcagggatgggacccatgccccctccttagaggacgggcttcctggttaggaaaggacacgtgggggtgccttgcataatagttcactggtcaccgtgcttttatgagtagtgtttttgtgcacttgccaggggttttctctctgtgtgcgaggggagtgatttaagcaatggtgtctggagtaagccttacaattttaatagactttttcttatcatatccctcatttctttccctgaaataaaaatacacacaagcaaaaaaaaaaaaaaaaaa

SEQ ID NO: 237025 - DNA, 742 bp, Homo Sapiens
aaggactcaggaggaggagtgacatctcttcgtcctaaccagtgtggacgacttcagcatgtctcaggccaccaagaggaagcatgtggtgaaggaggtgctaggggagcacatagtgccctccgaccagcagcagattgtcagggtactcaggaccccagggaacaatctgcatgaggtggagacagcccaagggcagcgcttcctggtgagcatgccctccaaataccgcaagaacatctggatcaagagaggggactttctcattgttgaccccattgaagagggagaaaaggtgaaggctgaaatctcgtttgtgctctgcaaggaccacgtgcgctctctgcagaaggaggggttttggcctgaggccttctctgaagtggctgagaaacacaacaacaggaacagacaaactcaaccagaactcccagctgagccacagttatcaggagaggagtccagctcagaagatgattctgacctgtttgttaacacaaaccgcagacagtatcatgagagtgaggaggagagtgaagaggaggaggcagcctgagactccaggacccaattctccacttgctcagggactggcccctggctcttctgggcttggacattcccagggtgctctgcacatcttcacccctgcatgaggacaaagcagggctcctctctgaactgatcttttgattcagagaattaaacccctggtgggttggtgaaaaaaaaaaaaaaaaaa

SEQ ID NO: 237026 - DNA, 609 bp, Homo Sapiens
attcggcacggaggggtaggtacggactggcgcatgtttccaagtggaacttcgagacgtggaatgagccagaccaccacgactttgacaacgtctccatgaccatgcaagggcaggtgtagacgcagtgctcccccggcccaggcttcctgaactactacgatgcccctgacccaagggcagctggttctggtctggtcggatgaacacgtgggctccaagtgcctgtggacatacgagatccagttctctcaggacggtaaggcgtacaccccggtcagcaggaagccatcgaccttcaacctctttgtgttcagcccagacacaggtgctgtctctggctcctaccgagttcgagccctggactactgggcccgaccaggccccttctcggaccctgtgccgtacctggaggtccctgtgccaagagggcccccatccccgggcaatccatgagcctgtgctgagccccagtgggttgcacctccaccggcagtcagcgagctggggctgcactgtgcccatgctgccctcccatcaccccctttgcaatatatttttatattttattattttcttttatatcttggtaaaaaaaaaaaaaaaaaa

SEQ ID NO: 237027 - DNA, 746 bp, Homo Sapiens
gtggtagcatcatcaccaagtgctccatccctgtgtgcactccagtgcggccatgctgaaaattgctgagatgaatacagcggtgccaacagcatcttcctgcgactgctgctggataagaagtatgcactgccttaccgggtgctggatgccctagtcttccacttcctggggttccggacagagaagcgtgaactgcctgtgctgtggcaccagtgcctcctgactttggtccagcgctacaaggccgacttggccacagaccagaaagaggccctcttagaactgctccggctgcagccccatccacagctatcgcccgaaatcaggcgtgagcttcagagtgcagtcccccgcgatgtggaagatgttcccatcaccgtggagtgaggaaaacagtcagctgtcctggccaaaggggtttggaaggacaccaagacccccgttggtgactgaagatgacactgagctttaatggctgaagacccagatcagggcagtgacagatcacagggacatctgtggctcccagtccaggacaggaaggactgagggtctggctggttccctcttccattctaggcccttatccctgtttagttctgagagccaacttgagataccatatgctagcattcccagtccccagctggggcttggtgtgagtactttttctatggctattgtgtcaggtcactgtggataaaggcaaagacagatatttattgaaaaaaaaaaaaaaaaaa

SEQ ID NO: 237028 - DNA, 712 bp, Homo Sapiens
tcacatttcctagagagcatatttgtgtgatgggggtggtaaacactcaacaaaagtttctttaaaaagaagaaaccatcctggtttgatgtaatcaatggttgcccactgctcccttcctgtgcctgtgacccttcccaaactgccctgttgcttgcaggctcgcctgagctgaaaggcagccctcacatcccgtcggcacctccctggggccttctttacaccctggagaacttcacagggaatctgtgtctgtaacacaaaggcttcctggtccagatgtagatactaaggctgactggttatttaagtcctgcggacttactctgccaaaattatttaatcatgtaaaaataatttataattcttataaagtatccccttcataatataatgaatgttggtgctattacatttaagtgcacatgtacagtatacaagattattaataataatgttttcaaatagttattgtcaaagctatttttcttatgtttatgaaagtgcttataaaattcatgttttatgaggctggagatgtatattttgtaatttcattctgatatttgttaatattcgcttccaatgctggttttgtttgatgagactgacattgcctaatttcaagctttttgaatgtgtattctttcagggcaagtatgaaataactagtaaaaaatatacaaatatgcttaacaaaaaaaaaaaaaaa

SEQ ID NO: 237029 - DNA, 720 bp, Homo Sapiens
agtatgcatctcgatggatggctcttgatgaaatggaaaagcagcagcgtgagcaggttgatagaaacatcagagaagccaaagagaaactggaggcagaaatggaagcagctaggcatgaacaccaattaatgctaatgaggcaagatctaatgaggcgtcaagaagaactcagacgcttggaagaactcagaaaccaagagttgcaaaaacggaagcaaatacaactaagacatgaagaggagcatcggcggcgtgaggaagaaatgatccgacacagagaacaggaggaactgaggcgacagcaagagggctttaagccaaactacatggaaaatggtgataaaagaaaatgtggctgaagttacccgaagttcagcttgcagtgtaattcagaagagttaagaccagaagtactggaatcatacttcctttcaggtcaaaacattttgtgggaaatatcctgttcgtgacctaggagaaacaagacagaaaacaaatctttcttcatttatgaatttcttactccatacaagcagtttatggatgtctgggcaatcatagcacttgccatttaaaaacatgctacaggggcacattttctgtggttaaaaatgatctccagaataagtgtaaactgcagttttcctttgcattgagggttttggctttttatttgtaaattaaatcaagatgttacccaaaaaaaaaaaaaaaaaa

SEQ ID NO: 237030 - DNA, 700 bp, Homo Sapiens
gccctcacagaaactgctggatgcatccaaacgagccaaaaatttgtgagctccaagggtatccccgttactgcactgtcacgactctctcagatggctctgtggtcctaaacggaggccgttcccggagggggaaactgaggggcccaccggagagcagagagtggggtaacgcgctgaaggggtgtgatgatccccttttccttgacttcttaaaacagtgtttagagtgggatcctgcagtgcgcatgaccccaggccaggctttgcggcacccctggctgaggaggcggttgccaaagcctcccaccggggagaaaacgtcagtgaaaaggataactgagagcaccggtgctatcacatctatatccaagttacctccaccttctagctcagcttccaaactgaggactaatttggcgcagatgacagatgccaatgggaatattcagcagaggacagtgttgccaaaacttgttagctgagctcacgtcccctgatgctggtaacctgaaagatacgacattgctgagccttactgggttgaaaaggagtagctcagacctgtttttatttgctcaataactctactcatttgtatcttttcagcacttaattttaatgtaagaaagttgttcattttgtttttataaaatacatgaggacaatgctttaagtttttaaaaaaaaaaaaaaaaaa

SEQ ID NO: 237031 - DNA, 674 bp, Homo Sapiens
caaggaaggacaacctctctggctcctgacacaagccaggcctcggtgcttttatctgttgtggtggtttttcttctttccctttttaaaagacgcatgaccaagacaacctagggagtttgtcttgcttgcctttgactatttccttaatccaaccatgctctcgagggctgagcagagactagactcaaggcacaggtttctggtgatggagtaaagttacagcggtatctcatgtctacacaagaagaggaacgttctgaaagctccaacaacttcttgagggggatggaccaatacagctttgggctcaggattccctagcctcctctgcccatcgcgtgcactgattggaggagtctggcccaaacactctcatatgaacctcgacatgctggagtggggtctggcaggagctgatgacagtttgagggacttgagtgtccctagcctggcagttggctcccggaagcactagacactgacactcattggtagaccctccctccccgccgttgtgtttggttcttttgcactccatgtactgcagaaggatggaaggacctgggtgctggctgggctgtgtatactgtgtatacaagggagctggctgctgaggtgaccacagccttctcctaataaagctgtaagtatttaaaaaaaaaaaaaaaaaa

SEQ ID NO: 237032 - DNA, 706 bp, Homo Sapiens
  misc_feature (43)..(44): n is a, c, g, or t
ttcctgaataagtcagaagaagttccagtccgagaaatgtgtnntgtggtaggaaggaatggtggcctactccatgagcagagcctgtgggggctgaacctgacttcacttacagtgatgatggaggagattggggagctgctacctgtccttctagaagccacggtctggacaaactttctccaggatcacagaagaactgcagcttcctggggagcagtttcacctccacaggcatcgcttcatactcctcactgtcaatgctaaaagagccccctgctccctggggagaagagaatattcagaacagctcaaacacatcagtggcctactggagttggaggtctcacagcagcaccagaagaagttcattatggaaaacaacatcctctcttgaggagctatcctaatgttcttttacaaaaaaaaattcagtgcctactacgatgggcacagtgctggttctggaaacatcctaattctaccatccatgaaaaaggatttattttctttttttggcccctatctcctcccagagtattttgggatttgaacaacatggttataattttcaaatatgtattaaaaggcaagggtcctgccatgtcttaaggaactcatatacatagtctttctatattatgctaatccttctcaaataaaaataaagacagctaattctcttatgaaaaaaaaaaaaaaaaaa

SEQ ID NO: 237033 - DNA, 657 bp, Homo Sapiens
  misc_feature (637)..(637): n is a, c, g, or t
atcgcatctgcctgggcaagttcaccttccctgggatgtccctggacaagagacaaggagaaggccttaggatctactgggggagtccggaggagcagtctcttctgtcccgctggaacccatggtccactgaagttccttatgctactttcactgagcatcctatgaaatacaccagtgagaaattccttgaaatttgcaagttgtctgggttcatgtctaagcttgttccagctatccagaatgcccacaagaattcaactggatctggaagaggaaagaaactgatggtgttaactgaacccattttgattgagacctacacagggctgatgtcattcattggaaaccgcaacaaacttggctattcccttgcccgtgggagtattggtttttgagagtctttttggtaccataagcatatcatccacagatacgtcactttgaaaattccagtttgacccacgctatttttggactgaaacaattaattatttttaaatgacgctttatgatttagaaatttagtatttccgaaaatttaaaagcttgattggactgatagatacacactttagacctcatacaagaataatcaaattttcttaaaactagaaaataaatgctgctgagcctntcaaaaaaaaaaaaaaaaaa

SEQ ID NO: 237034 - DNA, 700 bp, Homo Sapiens
  misc_feature (62)..(62): n is a, c, g, or t
cgacaggctgaccacgaccagcctgaacaagcacctccaggagctgatggacgggctgacgnccaaggtgttccggacctacaacgcctccatcactctgcaggagcagctgcgggccctgacgcgcgccgaggacagcatagcagctaagatcttatcctacaaccgagccaaccgagtcgtggccattctctgcaaccatcagcgagcaacccccagtacgttcgagaagtcgatgcagaatctccagacgaagatccaggcaaagaaggagcaggtggctgaggccagggcagagctgaggagggcgagggctgagcacaaagcccaaggggatggcaagtccaggagtgtcctggagaagaagaggtggctcctggagaagctgcaggagcagctggcgcagctgagtgtgcaggccacggacaaggaggagaacaagcaggtggccctgggcacgtccaagctcaactacctggaccccaggatcagcattgcctggtgcaagcggttcagggtgccagtggagaagatctacagcaaaacacagcgggagaggttcgcctgggctctcgccatggcaggagaagactttgaattctaacgacgagccgtgttgaaacttcttttgtatgtgtgtgtgtttttttcactattaaagcagtactggggaattttgtacaataaaaaaaaaaaaaaa

SEQ ID NO: 237035 - DNA, 672 bp, Homo Sapiens
agttcattatttattttaccttttactgacaatgtgaaactcgaagaaaatttctctttttaaatatacagtcataaactgttcaaggtaaccataaccaactaggtgttatttattaacgtattataaaataatgtttgatccagtatgtgcttgtcttatttaaaattggaatgtgagacatgttgctgtgacctgtttttctttctcattcacatttgtagatattgtgtgaactacagtatataatgataacaattaaaaggatattctgtggatgtcacgtattttgaaatgatagaactacattagctttgtatcatgtttggataattcatcaatgttcacagtttaaaacatcattaaacattatgtaattacaatgagaaagaatcttacttaaatttggagattttcccccacatctcttttccggatacattataattctggacccctatttatctcaaaactcttaatatatgcagaccaacaggtctttgcattccttttaaataactggttgtgacaaagcttgttgttgatcagattcactgtttcatcatatttattgtaatatattttttgttttgtaaatatgttacaacaaaatgtgattggtctaaaatatttgtaatgtatattaaaaggttcaaaaataaaaaaaaaaaa

SEQ ID NO: 237036 - DNA, 729 bp, Homo Sapiens
tagcagagaggaaacatggtcccagtcttcacccagcgaaatcctgaacacctcatccgagtgtttgatcagtaccagcggagcactgggcaagagctggaggaggctgtccagaaccgtttccatggagatgctcaggtggctctgctcggcctagcttcggtgatcaagaacacaccgctgtactttgctgacaaacttcatcaagccctccaggaaactgagcccaattaccaagtcctgattcgcatccttatctctcgatgtgagactgaccttctgagtatcagagctgagttcaggaagaaatttgggaagtccctctactcttctctccaggatgcagtgaaaggggattgccagtcagccctcctggccttgtgcagggctgaagacatgtgagacttccctgccccaccccacatgacatccgaggatctgagatttccgtgtttggctgaacctgggagaccagctgggcctccaagtaggataacccctcactgagcaccacattctctagcttcttgttgaggctggaactgtttctttaaaatcccttaattttcccatctcaaaattatatctgtacctgggtcatccagctccttcttgggtgtggggaaatgagttttctttgatagtttctgcctcactcatccctcctgtaccctggccagaacatctcactgatactcgaattcttttggcaaaaaaaaaaaaaaaaaa

SEQ ID NO: 237037 - DNA, 744 bp, Homo Sapiens
gggaaacagggtcagccttgaaaaatcaaggaattcattgtacctaataactgaagtaaaaataactagttgttcaacttttcctaaactcaaatctatttttataaacaaatgtaaataatgtttatattagagttgaactggttttcatttttataactggtagactagaccttccttaaacttttagaaataaaatgaaggcttcactggatttgtgaggataaaatacattttctttaattgtcctagagcaaagtacattagtcaccatgtgttttttgtgccaatgtaaattgtaatttaccaaagaaaaatacatacattgcttggtcttgcagaaaagttcccttgaaagaacctttccaataaataaaacgtcccaaattagcagtaccttgggctgtttttcatgagtaagaagattcaccatcccatgtgatctgtgtggaaaaagaccatgtcctcttggtggaagacatgagagagctgaactgaagtggaggaggtggtgcaagagggaccttcctgctcaaggcccgcccaggcagcggaatggagtgcagtgcttggctgcagaaaccctttgtccctcacctatatatacacggacagtcaagtttgttgctctaacgtaaggcacagcgttaatcctgtatggccaggaaactgagtagactcctgtgtaaccctgtttggaactttgccttcttaaaatgatttttcaaagaaaaaaaaaaaaaa

SEQ ID NO: 237038 - DNA, 793 bp, Homo Sapiens
  misc_feature (41)..(41): n is a, c, g, or t
  misc_feature (49)..(49): n is a, c, g, or t
  misc_feature (155)..(155): n is a, c, g, or t
acatggcaggtccagcgtcggaagtggaagctgaacctgantgcagagntggagtccagagtctgctttgagcctgtccctctgccagccgaccccaatggaactgaaaaatctggagtataggccagtgaaggtcagggggtgctttgaccatnccaaggagctgtatatgatgccccggaccatggtggaccctgtccgggaggcccgggagggcggcctcatctcctcctcaactcagagtggggcctatgtggtcactcccttccactgcaccgacctgggagtcaccatcctggtaaatagagggttcgttcccaggaagaaagtgaatcctgaaacccggcagaaaggccagattgagggagaagtggacctcattgggatggtgaggctgacagaaaccaggcagccttttgtccctgagaacaatccagaaaggaaccactggcattatcgagacctggaagctatggccagaatcacaggcgcagagcccatcttcattgatgccaacttccagagcacagtccctggaggacccattggagggcaaaccagagttactctgaggaacgagcatctgcagtacatcgtgacctggtatggactctctgcagctacatcctacctgtggtttaagaaattcctacgtgggacacctggtgtgtgacagatcagctgctgaagccctgtccctggataatgcagtatttcaagactgcctttatgctggatcatgtgctactggtataaagttctggccttctaccttaaaaaaaaaaaaaaaaaa

SEQ ID NO: 237039 - DNA, 664 bp, Homo Sapiens
  misc_feature (138)..(138): n is a, c, g, or t
ttttcccttcctatgatcaatactgcaaattattgctgctcacagcttttataggattctcccaactgaaagttgcaggctttttctgtccctgtgcatcagtactaacaaaagacagcctcaccaagtctgtatatntgaacagaggcaagttaattcatccccccgtgtcagagccacaggcatgttgagggggttgatacgtagcactggaccagggcgcaaagcccagatagttccagccatgagaggagagcacaagaatgctctgcactctgcactcagcaccatcttgggtctgctttgcccagatgagggaccactaacaaccttctcagcacatgtgaatgtggactgattttaaaatgcattcattctgctaggattgggctggaagctggaacagtgagagtactttttctgctcctagtcatctccctttctcagcgtgacatcctcctgcagcaagcctagtatcactagcagtagttcctgcgactcttagcaacacaacccgaatatttgctccctgcatctgggtcctccaccaggatgggcctgcgcatctgcattgctgtacagacaaacaggccttttaatttacatcctcctttaattctcattaaaatcgcagggtttttgtttgaaaaaaaaaaaaaaaaaa

SEQ ID NO: 237040 - DNA, 671 bp, Homo Sapiens
  misc_feature (5)..(5): n is a, c, g, or t
  misc_feature (44)..(44): n is a, c, g, or t
  misc_feature (143)..(143): n is a, c, g, or t
tggtntatctctccagcctcggcccacacgcaagggagtcgggngacggacggcccgctgctggccgctctcttctctgcctctcaccaggacagccgccccccagggtactcctgcccttgcttgactcagtttccctcctntgaaagggaaggagcaaaacggccatttgggatgccagggtggatgaaaaggtgaagaaatcaggggattgaggacttgggtgggtgggcatctctcaggagccccatctccgggcgtgtcacctcctgggcagggttctgggaccctctgtgggtgacgcacaccctgggatggggctagtagagccttcaggcgccttcgggcgtggactctggcgcactctagtggacaggagaaggaacgccttccaggaacctgtggactaggggtgcagggacttccctttgcaaggggtaacagaccgctggaaaacactgtcactttcagagctcggtggctcacagcgtgtcctgccccggtttgcggacgagagaaatcgcggcccacaagcatccccccatcccttgcaggctgggggctgggcatgctgcatcttaaccttttgtatttattccctcaccttctgcagggctccgtgcgggctgaaattaaagatttcttagaggctgaaaaaaaaaaaaaaaaaa

SEQ ID NO: 237041 - DNA, 718 bp, Homo Sapiens
  misc_feature (47)..(47): n is a, c, g, or t
gttcgcccaccactcactcttcctgcatgtgcgcaaggccacgcggnccatggggctgctgaacacgctctcgctggccttcgtgggtgcctcccactagcctaccagcagacctcggccttcgcccggcagccccgcgatgagctggagcgcgtgcgtgtcagctgcaccatcatcttcctggccagcatcttccagctggccatgtggaccacggcgctgctgcaccaggcggagacgctgcagccctcggtgtggtttggcggccgggagcatgtgctcatgttcgccaagctggcgctgtacccctgtgccagcctgctggccttcgcctccacctgcctgctgagcaggttcagtgtgggcatcttccacctcatgcagatcgccgtgccctgcgccttcctgttgctgcgcctgctcgtgggcctggccctggccaccctgcgggtcctgcggggcctcgcccggcccgaacaccccccgccagcccccacgggccaggacgacccacagtcccagctcctccctgccccctgctagcagccacagagcccactcccagccgtcctcaccagagatggaccagggaggacaggatgctgggcaggggaagccaagtcacgggcaggccgcagtggttcttgcgtggcctggttttattttcattgtgaaatatcatgctcttatttcagtcctcaaaaaaaaaaaaaaaaaa

SEQ ID NO: 237042 - DNA, 670 bp, Homo Sapiens
  misc_feature (31)..(31): n is a, c, g, or t
  misc_feature (56)..(56): n is a, c, g, or t
  misc_feature (196)..(196): n is a, c, g, or t
ctggggcgccctatggggctcgaatgccctntgggggccaggtgcccctgggagcnccgccaccctttcccacttggccggggtgcccgcagccgccacccctgcacgcatggcaggctggcacccccccaccgccctccccacagccagcagcctttccacagtcactgcccttcccgcagtccccagccttccntacggcctcacccgcaccccctcagagcccagggctgcaacccctcattatccaccacgcacagatggtacagctggggctgaacaaccacatgtggaaccagagagggtcccaggcgcccgaggacaagacgcaggaggcagaatgaccgcgtgtccttgcctgaccacctggggaacacccctggacccaggcatcggccaggaccccatagagcaccccggtctgccctgtgccctgtggacagtggaagatgaggtcatctgccactttcaggacattgtccgggagcccttcatttaggacaaaacgggcgcgatgatgccctggctttcagggtggtcagaactggatacggtgtttacaattccaatctctctatttctgggtgaagggtcttggtggtgggggtattgctacggtcttttaattataataaatatttattgaatgcttaaaaaaaaaaaaaaaaaa

SEQ ID NO: 237043 - DNA, 628 bp, Homo Sapiens
  misc_feature (445)..(445): n is a, c, g, or t
acgtcgcaggacagttgtgaaaataacatgacgctcgtccaaggccacttcctgagggcaagtcctaatagccctgagacaccgagacggcatgttcttcattagacggaaagggaaactgaggctcaggagagaggcgctccaggccgctgcagccaacaaaccggcgccctcttcacacgtagctcctcaggccattccccatgagtcccccacacccaccccatcctcggtctttgcaaagaagggcccgagcttagtttccccaggactggcctaggaaggagcaccggccacagctgctccccgtgccactcagggtggacccagcatctcaggagcacctcagggtgtcggttaagagacaggcctccacccctgcaccagagcctgctcttagctcccggtgcccccagaccccgcagctctgtgcccggcaagaagnagctagacacacgccatggcgccaagcacggccagctccgcggacccatggacaagcccagccccgcctcagggaaaacagggcctttccctacaggacacgccccagagctgtggcagattgcaggagccatcgtgtggggagaatttaataaaagcccttttgaaaaaaaaaaaaaaaaaa

SEQ ID NO: 237044 - DNA, 715 bp, Homo Sapiens
tacaaaaacaaattttgtctgtacttctgaaaagaatttgttgtttctcagctgttttccaaaagcaaaggaagtctttatggtttttttctatttcatgttattgtgatttgtttataagtttgggtggggtgcataccatattcttggttcttaaaatctatcacttttcaccttacacttgatgtgtgaaaactataaaaacaatgtgtgaaacccaggggttctaaaatacaagcatagattttatcagggtgttttgtcaaagcaggttattcagtgattcctccccaccattcttaagaacgttaaataatgctgttgtgttagctctgagtagaaaggaaaaagtaaaacctctgtttggaggtaatattgggttgaattctgactgcccctttctagctggacctttaacaaatcacccaatcttttttgtgtttctctaaagtcatttatacattaaatgtaattatagcaactgtggggttctgttgagaattaagagctaacactatatatgtaaagtttccagtactagtcccagaatttagaatatgctcaacacaaagtaaacagcattatataagtttatatttttgtgagttataaagtactttgatatattctcattaaatctgtaaatcacctctataagtaagtggtaataataaagcagatatttttgtccccatttaaaaaaaaaaaaaaaaaa

SEQ ID NO: 237045 - DNA, 710 bp, Homo Sapiens
caacccagccacgactgccatgtaaggttgtgcagggtgtgtactgcacaaggacattgtatgcagggagcactgttcacatcatagataaagctgatttgtatatttattatgacaatttctggcagatgtaggtaaagaggaaaaggatccttttcctaattcacacaaagactccttgtggactggctgtgcccctgatgcagcctgtggcttggagtggccaaataggagggagactgtggtaggggcagggaggcaacactgctgtccacatgacctccatttcccaaagtcctctgctccagcaactgcccttccaggtgggtgtgggacacctgggagaaggtctccaagggagggtgcagccctcttgcccgcacccctccctgcttgcacacttccccatctttgatccttctgagctccacctctggtggctcctcctaggaaaccagctcgtgggctgggaatgggggagagaagggaaaagatccccaagaccccctggggtgggatctgagctcccacctcccttcccacctactgcactttcccccttcccgccttccaaaacctgcttccttcagtttgtaaagtcggtgattatatttttgggggctttccttttattttttaaatgtaaaatttatttatattccgtatttaaagttgtaaaaaaaaataaccacaaaacaaaaaaaaaaaaa

SEQ ID NO: 237046 - DNA, 611 bp, Homo Sapiens
  misc_feature (10)..(10): n is a, c, g, or t
attatctttntgttaaagtcaggctcatttggggtaatgtgatgactgtttaggtttacatgaccctcctctcctttccctacccccaaatatgtatatatacatatataaaatatgtatatattttacctatataaaatatatatatatacacatatatgtatctatattcctttgtttctttgcctgcttatactggccataaaagagggagctgccttcaatgtataaagtataagaagagtgccagggaatgccataatggaggcttttggatctgaatttggaccatttcactaaagagaacatgagtttgctcagccctttcctcacaagagggagggccccggttccccagacttctccacgcgctggctccataaaggccagctttggccaggctgccacaggggcctgaggagctcactctgggcctacctggtttcagttagagggtcctcctgttatttttccatttaaaaagtatgtcctcagaaaactgtactggaaggatgggtggcaggaacttgtatagttcagcttccaacactttggaacagattaaaaagggaatcttttaaataaaaacgtgtaaaaataaaaaaaaaaaa

SEQ ID NO: 237047 - DNA, 747 bp, Homo Sapiens
  misc_feature (21)..(21): n is a, c, g, or t
  misc_feature (97)..(97): n is a, c, g, or t
  misc_feature (104)..(104): n is a, c, g, or t
  misc_feature (121)..(121): n is a, c, g, or t
taatttagatattcatacttnccaacattatcctgtgtgattacagcatagggtccactttggtaatgtgtcaaagagatgaggaaataagactttnagcggtntgcaaacaaaatgatgngaaagtggaacaatgcgtcggttgtaggactaaataatgatcttccaaatattagccaaagaggcattcagcaattaaagacatttaaaatagttttctaaatgtttctttttcttttttgagtgtgcaatatgtaacatgtctaaagttagggcatttttcttggatctttttgcagactagctaattagctctcgcctcaggctttttccatatagtttgttttctttttctgtcttgtaggtaagttggctcacatcatgtaatagtggctttcatttcttattaaccaaattaacctttcaggaaagtatctctactttcctgatgttgataatagtaatggttctagaaggatgaacagttctcccttcaactgtataccgtgtgctccagtgttttcttgtgttgttttctctgatcacaacttttctgctacctggttttcattattttcccacaattcttttgaaagatggtaatcttttctgaggtttagcgttttaagccctacgatgggatcattatttcatgactggtgcgttcctaaactctgaaatcagccttgcacaagtacttgagaataaatgagcattttttaaaatgtgaaaaaaaaaaaaaaaaaa

SEQ ID NO: 237048 - DNA, 684 bp, Homo Sapiens
ctagaattcctcatgttacctcaccaggcccacctcctgccttccagtagcgtctacaagtttggctcctgcctcccatggatctctccaggccccaaactttctcaagtcaacctcaccaggcccggcttctccctttcatcagccttccaaaggccagcttttgcttcatgtctgccttccgagtcccagctcctgttttatggcagcctcctgaggcccagctcctgcctcctagtggcctcttttggcccaactctttcctcaccagggccttccagaccacgttcctgccttttagcagccactacaggcccagctttgcgtcctttcaagagtcctgcctcacagtggcctcccaagggcaactttctgcctcatgtcagcctcttgtgccctggtcctgcttcctggtagactctgcaggccctgctcctgccttacgttgccccttttataaagatccagttcctgcctcctggctgcctctatgagcccaaatcctgcctaacaacaacctgtttttgcccagctcctgcttcctggcagcctccttaggccaaaaatttccttcagttgacctctccaggcccagctcctgcctctcagcaccctctttaggcccagctcctgccttaataaatttgaataaattattgttatgtgaaaaaaaaaaaaaaaaaa

SEQ ID NO: 237049 - DNA, 706 bp, Homo Sapiens
  misc_feature (26)..(26): n is a, c, g, or t
cctatattgcatctcctgtatctgcntaccaggtgcaaagggaaaccagagaaaacaagtatcggggctctgctatcaaggtgcaaagtccttcgtggatgcaacctcaaccatatattctacagcaccctggtgccgtgttaactccctcaatggagcacaccatgtcactacagcccgcatcaatgatcagccctctggcccagcagatgagtcatctgtcactaggcagcaccggaacatacatgcctgcaacgtcagctatgcaaggagcctacttgccacagtatgcacatatgcagacgacagcggttcctgttgaggaggcaagtggtcaacagcaggtggctgtcgagacgtctaatgaccattctccatatacctttcaacctaataagtaactgtgagatgtacagaaaggtgttcttacatgaagaagggtgtgaaggctgaacaatcatggatttttctgatcaattgtgctttaggaaattattgacagttttgcacaggttcttgaaaacgttatttataatgaaatcaactaaaactatttttgctataagttctataaggtgcataaaacccttaaattcatctagtagctgttcccccgaacaggtttattttagtaaaaaaaaaaaaacaaaaaacaaaaacaaaagatttttatcaaatgttatgatgcaaaaaaaaaaaaaaaaaa

SEQ ID NO: 237050 - DNA, 698 bp, Homo Sapiens
tggagaaaagaaaatttaaggaaagatatggagagagatttgaaggctgactcaaacatgccactcaacaattctagccaagaggtcacaaaggatctgcttgatatgattgaccatacaagcatccgaactattgaagaattggctggaaaaatagaatttgaaaacgaattgaaccacatgtgtggtcattgccaagattcacccttcaaagaggaagcctgggccctgctcatggacaagagccctcagaaggccacagatgctgaccctggcagcctcaaacaggcttttgatgatcataatattgttgagactgttctggacttggaagaggactacaatgtgatgacgtcttttaaataccaaattgagtaaggacagttatctaagctttgattccttacagcaggaggctgcccttgagcctgagcagaagcagctacaatggccgtcaggggccacatttctcaaaaggttggcagaacctgaattaccagaccctttttaaatcccagttgtgtccctttttaagctgtgagaccagttttttgaattccattgctttgaaatgtttcctattactgatttttttttttaactttccttgacatcttgaatgtgttttttttgattgatgttcaatatacccagtacccatggtaggtgtgggtcatgggaaaaaaaaaaaaaaaaaa

SEQ ID NO: 237051 - DNA, 712 bp, Homo Sapiens
  misc_feature (30)..(30): n is a, c, g, or t
gaagagaaaagcatttagttctatctaatntcaatatgcacgtgaattagttcatgttactctaacaatgtattcttactgtccttttttatgaaataggaaagtaaaactgaaagaactatttcttgtgtttttaaaactagccttttctaatatttgatatctaattaaagttagataatatgtaatatgcttttgaacaataatctaaccagaaaatattgtataataaattaccaagaaatcattacattaattataaaaggaacatgtcaatacaacaaatgtttatttaacacctactgttactccaaatactgtgttagaatttgactattcgaagatgaataatagtctttgccctctggaaggccacaatgtagaagtaattctctgtatcagatatttccttgagtgttaagtgtattagtaatcatgttgtaaatcccagtgtaagtcaagaagcaatatcaccaccaccacctccctatgattttgtgataatttggcattttcaatgcttgttaactttcatgttttcatttttatgaaatcatgcagagcttgttataatttttagtggggtttggattaaaatgcttttttgatgtagcagaagatacattttttcccattttacattgttttccttaaatattaagaataatgagtaaaataaactgattttaaaatcaaaaaaaaaaaaaaaaaa

SEQ ID NO: 237052 - DNA, 723 bp, Homo Sapiens
ccatgtataaagtaggaccggtgctgtctgtcagtcatggtatgggcattccttctatctcaatcatgttgcatgagctcataaagctgctgtactatgcccggtgctccaacgtcactatcatccgcattggcacttctggtgggataggtctggagcccggcactgtggtcataacagagcaggcagtggatacctgcttcaaggcagagtttgagcagattgtcctggggaagcgggtcatccggaaaacggaccttaacaagaagctggtgcaggagctgttgctgtgttctgcagagctgagcgagttcaccacagtggtggggaacaccatgtgcaccttggacttctatgaagggcaaggccgtctggatggggctctctgctcctacacggagaaggacaagcaggcgtatctggaggcagcctatgcagccggcgtccgcaatatcgagatggagtcctcggtgtttgccgccatgtgcagcgcctgcggcctccaagcggccgtggtgtgtgtcaccctcctgaaccgcctggaaggggaccagatcagcagccctcgcaatgtgctcagcgagtaccagcagaggccgcagcggctggtgagctacttcatcaagaagaaactgagcaaggcctgagcgctgccctgcacctccgcagacctgctgtgatgacttgccattaaaagcattgtccaaaaaaaaaaaaaaaaaa

SEQ ID NO: 237053 - DNA, 731 bp, Homo Sapiens
ggctcatctcaggaagctgggcctgggctatcgtgcccgttacgtgagtgccagtgcccgagccatcctggaagaacagggcgggctagcctggctgcagcagctacgagagtcctcatatgaggaggcccacaaggccctctgcatcctgcctggagtgggcaccaaggtggctgactgcatctgcctgatggccctagacaagccccaggctgtgcccgtggatgtccatatgtggcacattgcccaacgtgactacagctggcaccctaccacgtcccaggcgaagggaccgagcccccagaccaacaaggaactgggaaactttttccggagcctgtggggaccttatgctggctgggcccaagcggtgctgttcagtgccgacctgcgccaatcccgccatgctcaggagccaccagcaaagcgcagaaagggttccaaagggccggaaggctagatggggcaccctggacaaagaaattccccaagcaccttcccctccattccccacttctctctccccatccccacccagtctcatgttggggaggggcctccctgtgactacctcaaaggccaggcacccccaaatcaagcagtcagtttgcacaacaagatggggtgggggatattgagggagacagcgctaaggatggttttatcttccctttattacaagaaggaacaataaaatagaaacatttgtatggaaaaaaaaaaaaaaaaaa

SEQ ID NO: 237054 - DNA, 542 bp, Homo Sapiens
  misc_feature (121)..(121): n is a, c, g, or t
cttccctgaggatgaactcatgacgtggcagtttgtcgttcctgcacacctgcgggccagcgtctccttcctcaacttcaacctctccaactgtgagaggaaggaggagcgggttgaatantacatcccgggctccaccaccaaccccgaggtgttcaagctggaggacaagcagcctgggaacatggcggggaacttcaacctctctttgcaaggctgtgaccaagatgcccaaagtccagggatcctccggctgcagttccaagttttggtccaacatccacaaaatgaaagcagtgagtgagccccactttcctttttcttcctcctccagcaccttcgttgtttcctgggtagtctgcctgggtgaggctcccttcctgtttctcatctgtggcttctgaaacacttagactctggacccagcaagagtttcaggaagtgggttgctaggcagttagacaggcttgttggtgaacacccggtatgtagttccatttcagcacaataaaaagaaatcttgcaaaaaaaaaaaaaaaaaa

SEQ ID NO: 237055 - DNA, 603 bp, Homo Sapiens
tttttcctcttttaagggatagtagcaggtcttacttgaatgaaagtctgatatttgctgatggcagaatgattattctgtaccctggttgatgtgtagagtagattgtctggtgctctcagttgtttttatttacatttgtcacgttgttgtaagagaatgttaacatggtataaaactctgtgacaagataagcctcctgctttatataacttcttgaatccagctaagagatttataaactaatggcataaatgtctggagccaaccttggcagttatagcaggagaacactgtcttaatatttctttacattctttcaaaaggcaaaataggattgccctgtattgatgtagaaatgtctgtaaacagagcttgtatggtttgctgggtcaaacaatgtttccaacttaaaatcaatctcattgccactttaactacttttagtcatatttattaagtaatgcagtttgtactttttttattttgtaacattttgtgatttttttgtacaaaactgtatttgtacaatagagcaattcccagctgatggaatgaatgaataaaatgcaaaattatacttttaaaaaaaaaaaaaaaaaa

SEQ ID NO: 237056 - DNA, 741 bp, Homo Sapiens
  misc_feature (48)..(48): n is a, c, g, or t
gtcattaataaaatagcatatgatgtgcagtgcccaaagagagaaaanccaagtaatgagcacactgctgagatggaacacatgaaatccttggttcacagactattaccaatcttgcatttagaagagtctcagaaaaagagagagcaccatttactggagaaaattgaccacctgaaggaacagctgcagccccttgaacaggtgaaagctggaatagaagctcattcggaagccaaaaccagtggactcctgtgggctggattggcactgctgtccattcagggtggggcactggcctggctcacgtggtgggtgtactcctgggatatcatggagccagttacatacttcatcacatttgcaaattctatggtcttttttgcatactttatagtcactcgacaggattatacttactcagctgttaagagtaggcaatttcttcagttcttccacaagaaatcaaagcaacagcactttgatgtgcagcaatacaacaagttaaaagaagaccttgctaaggctaaagaatccctgaaacaggcgcgtcattctctctgtttgcaaatgcaagtagaagaactcaatgaaaagaattaatcttacagttttaaatgtcgtcagattttccattatgtattgattttgcaacttaggatgtttttgagtcccatggttcattttgattgtttaatctttgttattaaattcttgtaaaacagaaaaaaaaaaaaaaaa

SEQ ID NO: 237057 - DNA, 701 bp, Homo Sapiens
  misc_feature (26)..(26): n is a, c, g, or t
ctgcccagcccgaccctgccccggcnccgcttccaccttgcgcatttggtactggcttttgtgatacttaggaaccctggcatcttttctatattatccagtgtgataatcttttcacgttttatagagcaaagacagagcagttactcttcatattgcaatatctgtgtttgactaggaataatagtatttttatggaacatttacaaaattatattttttaagaaaacaatcaaaacaagcattgggggattggggcaaggatggaaggagcagtggggcagctgccagagctcaggcgagccatggggtctgctgtggggtctgccctggccacccactgtgtgtctgggtccttgaggtttgtacgtttctctttgatgaccaggaagaaatcccagcaccccagccacaggctgtggctgctcccagcagaggcggggccggcagagaaggggcctcctccacccagagtcctggccttggcccgctgtcaccttcaaagctgactgtgccccgctgcgggaggggacggcaccccagtggtggcagagcttgggggcctgggcaggggcccgcttggcgggccgggcaacacgtcaacattcttttctgttcttggcattaattattgctgtctttttttaaaaaaaaaaagtttaaataaaatgtctcagagcatcaaaaaaaaaaaaaaaaaa

SEQ ID NO: 237058 - DNA, 465 bp, Homo Sapiens
  misc_feature (10)..(10): n is a, c, g, or t
aaaggaattntacctcactccgaactctcctgcagaaatgctgcacaacgtcaccctggcgctggagctgctgaaggacgagggcctgctcagctgccctgtcagccctgaagatatcgtgaacaaggatgccaagagcacactgcgggtgctctatggtctgttctgcaagcacacgcagaaggcacacagggacaggacgccccatggagccccgaattgaccctcactgcctccaaagcccagagcctgcctgtcagcccagctggagggcccgaggctgcagggtgtcctcccacagtcccgctgtttcctgtgcattcgtgacccgcttccctcccaccctgtctcctgtctccatcgttggattatctttgaacccccttgtgtggatcattttgagccgcctggccttgctcagtttattttaataaaagtatttctgggaaaaaaaaaaaaaaaaaa

SEQ ID NO: 237059 - DNA, 706 bp, Homo Sapiens
ccacctgccggcaacaccagtgccaggaaaaggccaaaagaatgtctgtttctaacaaatccacaaatagccccgagattcaccgtcctagagcttaggcctgtcttccacccctcctgacccgtatagtgtgccacaggacctgggtcggtctagaactctctcaggatgccttttctaccccatccctcacagcctcttgctgctaaaatagatgtttcatttttctgactcatgcaatcattcccctttgcctgtggctaagacttggcttcatttcgtcatgtaattgtatatttttatttggaggcatattttcttttcttacagtcattgccagacagaggcatacaagtctgtttgctgcatacacatttctggtgagggcgactgggtgggtgaagcaccgtgtcctcgctgaggagagaaagggaggcgtgcctgagagggtagcctgtgcatctggtgagtgtgtcacgagctttgttactgccaaactcactcctttttagaaaaaacaaaaaaaaaagggccagaaagtcattccttccatcttccttgcagaaaccacgagaacaaagccagttccctgtcagtgacagggcttcttgtaatttgtggtatgtgccttaaacctgaatgtctgtagccaaaacttgtttccacattaagagtcagccagctctggaaaaaaaaaaaaaaaaaa

SEQ ID NO: 237060 - DNA, 728 bp, Homo Sapiens
  misc_feature (666)..(666): n is a, c, g, or t
ctcacccaccccatgaaacctctcaccccgtcgtgcctccacttggcccgtccatagagccagggctgtgtcacttgctccccaatcatccagccgcctgcaaccccccttcagcccccaccccacattgctgtccagtacccccaagcccccagggacgtcagaaccacggagctgctcctccatctcgacggcgctgcctcaggtcaacgaggaccttgtgtcccttccacaccagttgccagaggccagtgagcccccccggagcccctctgagaagaggaaaaagacctttgtgggagagccgcagaggctgggctcagagacgtgcctcccacagcacatcagggaggccactgcggctccccacgggaagaggaagaggaagaagaagaagcgcccggaggacacagctgccagcgccctgcaggaggggcagacacagagacagcctgggagccccatgtacaggagggagggccaggcacagctgcccgctgtcagacggcaggaagatggcacacagccacaggtgaatggccagcaggtgggatgtgttacggacggccaccacgcgagcagcaggaagcggaggaggaaaggagcagaaggtcttggtgaagaaggcggcctgcaccaggacccacttcggcacagctgctctcnccatgggtgatggtgatccagaggccatggaagagtctccaaggaaaaaaaaaaaaaaaaaa

SEQ ID NO: 237061 - DNA, 692 bp, Homo Sapiens
  misc_feature (11)..(11): n is a, c, g, or t
  misc_feature (39)..(39): n is a, c, g, or t
gctggtggctnggcctcagggtgggcaacgttaggggtntggcgaaagcccgccccatgggattgagggacggggctgcactccaaccgtctgcacctgctcttcccccacccctgtgggacctcatcttcacgtgccatgtgtgctgaaggcccagggcccagcagggggcagtggcacctgttgacggaaaaggccgaggtgcttaccagtggaccttctggcccgcccctcccctgtcacttgtcgggcatccagggccccgacctgtgcctagccgccagggtgacagaaggcagaactgaagcggggtctgggccacgggccaggccactgccttttgtcctcagtgaccatacattcctgctctcggacttgaactctactgtaactgttttcttgaaatgaagctgtacaggacgattcactgccatgccagtcaggcgggcttgccatgttctgtgaatctcgagtgagcggtgccacccgcccccatacctccgccaccggccgctgtcggggatgccacagcctgccacggtcgcagccagacgtgagcttggcattgaagttgcaaagcggcccctggccgggctcgccgtcgctgtccagggccgtgtccggtgctgtggctgtaaagctgtaggaccctttttaataaatagagaattattaataaaaaaaaaaaaaaa

SEQ ID NO: 237062 - DNA, 731 bp, Homo Sapiens
  misc_feature (85)..(85): n is a, c, g, or t
ctccctccagacagggatgtactagatggcgagcagaccagcccctccttattgagcacagcatgcttgtcttcaagactttctntgcctctcttcttccagaaggccccccagccatcgcaaactgatggtgtttgtgctgtagctgttggaggctttgacaggaatggactggatcacctgactccagctagattgcctctcctggacatggcaatgatgagtttttaaaaaacagtgtggatgatgatatgcttttgtgagcaagcaaaagcagaaacgtgaagccgtgatacaaattggtgaacaaaaaatgcccaaggcttctcatgtctttattctgaagagctttaatatatactctatgtagtttaataagcactgtacgtagaaggccttaggtgttgcatgtctatgcttgaggaacttttccaaatgtgtgtgtctgcatgtgtgtttgtacatagaagtcatagatgcagaagtggttctgctggtacgatttgattcctgttggaatgtttaaattacactaagtgtactactttatataatcaatgaaattgctagacatgttttagcaggacttttctaggaaagacttatgtataattgctttttaaaatgcagtgctttactttaaactaaggggaactttgcggaggtgaaaacctttgctgggttttctgttcaataaagttttactatgaatgaaaaaaaaaaaaaaaaaa

SEQ ID NO: 237063 - DNA, 625 bp, Homo Sapiens
gaggtcgggagtttgagaccatcctgaccaacataaagaagtcctatctctactaaaaacacaaaattagctgggcgtggtggtgcatgcctgtattccagctacttgggaggctgaggcagaagaatcgcttgaacccaggaggcggaggttgcagtgagccgagatcgcgccattgcactccagcctgggcaacaagagcgaaattccgtctcaaaaaaaaaaaaaaaaaattggagttttacagataaccacatcttattctgggaaaggatttgaagcaagttgggttttatatttggctgtacttgtcctcttcagcagtataataagccccttaaggctgaagtaaccttattcctattgtttagtagctaatagcatgcttttgatatgcttatgatcatactaataatttaatatttgaattgtatggaagtacaattcagtatcattttacatatggtatattgtgatgctgtatcatattttatgttacggtttataagaaaagctcctaggtataaaatgctacatagcaggaacttggtttttcaatgttattatttcctactgtttttgacgtaacggcaataaaatttgtttgaaccaaaaaaaaaaaaaa

SEQ ID NO: 237064 - DNA, 778 bp, Homo Sapiens
  misc_feature (24)..(24): n is a, c, g, or t
  misc_feature (72)..(72): n is a, c, g, or t
gcacatttctcctttcattccccntaaaaacagagtgacctggaagtagatgtctttgctccttgtcagagntgaagaggctgagacttggcccactgctaagcggcagaggcagggccagccatgctgtcgcaagcccgtgctggggctgccctttctgtttccagtccagttacggacttcccggccgccactgggccctgccggtcaccaggccactgtgcagtgggcgcagagcatggtcaggagtggcctgcccgtactcctccacccagatgagggccctccagagcctgcaggcatctgtggggaatcccagcctgcaggttcttggagaagcaggtgaacctaaggatgaaagcaaaggagggccttgaggaagcagcccccaggcctggcagccacgcagcggctgagctcatgaacttggttcgcagcctgccttgcccctggaggccacgccaggcgctcacccctgagcccacagcccctgcttgggctgcctggcaccctcagggtggcccggcctcctcctgccactctgagcacatgtccgggggttgccaccagagacggctttgttctcccagctaaggccgtggagctgctgtgtgactgtgtcaggcctggacaaggaagacccttagggatgacgtccccgctgcatatttattcaaggtgactcttgtacttggcaagggaagtccactgtgtgattgtctgtattcttaatataatttgttaaataaacgtttgttttaaaaaaaaaaaaaaaaaa

SEQ ID NO: 237065 - DNA, 643 bp, Homo Sapiens
gcataggccaggtcaccccacaccaatctcttctggacaggtgctgggtaggccttcctggtctctgcccgcctgctgccagggcatggccatccccagcaaccggagctggccaagccagaggcctcgctccgcactccacactttcctttctgtgctccttccaagttaaattaaaccccctctccacgattcccacggcaggcgtcattcccgagatgggagccagtccaggggtcagcaggagccagcgctgggcacacgtgccctggctgaggccagcggcatcctgggtggcccaggtccatcctgggcagcaaaggcgtgtccccttctgtcagacagcttcacagagtgtggcttcaccagtcagagggagcagtccggagaggcaagatgaccccaccgggactgcagagcctcctccttactaacaaggacctgtccgcagccgcgaggtccttcactcccaccctgtaattgtggggggagtgccagcaacaggcctgtcccctggcaagttggccacggaacccaccatgcactgcaaggctgtgacagcctgggcacccctgcttctcctctgcttgtacggttccccccaataaatcctattttccatctcaaaaaaaaaaaaaaaaaa

SEQ ID NO: 237066 - DNA, 655 bp, Homo Sapiens
gctcaacgtgctgcagagcctgctgctcccgttcgccgtgctgcccatcctcacgttcaccagcatgcccaccctcatgcaggagtttgccaatggcctgctgaacaaggtcgtcacctcttccatcatggtgctagtctgcgccatcaacctctacttcgtggtcagctatctgcccagcctgccccaccctgcctacttcggccttgcagccttgctggccgcagcctacctgggcctcagcacctacctggtctggacctgttgccttgcccacggagccacctttctggcccacagctcccaccaccacttcctgtatgggctccttgaagaggaccagaaaggggagacctctggctaggcccacaccagggcctggctgggagtggcatgtatgacgtgactggcctgctggatgtggagggggcgcgtgcaggcagcaggatagagtgggacagttcctgagaccagccaacctgggggctttagggacctgctgtttcctagcgcagccatgtgattaccctctgggtctcagtgtcctcatctgtaaaatggagacaccaccacccttgccatggaggttaagcactttaacacagtgtctggcacttgggacaaaaacaaacaaacgaaaaacaaaaaaaaaaaa

SEQ ID NO: 237067 - DNA, 767 bp, Homo Sapiens
cagaaaaagaaaactggaaaatatagtagaactagagcaagatttagatcatttgaaagatgaaaaagaaaaatgctcaaagaaaaaggagaaaatgacaaaaccttcacctactgaaaaaacaactcagcaccttatatctcgaagttttcagcatgctacgtgatgaagatggaaaaccttattctcctagtgaatactccctgcagcaaacaagagatggcaatgttttccttgttcccaaaagtaagaagccagatgttaagaaaaactagatttaggaggatttgaccttttctgagctagtttttttgtactattatactaaaagctcctactgtgatgtgaaatgctcatactttataagtaattctatgcaaaatcatagccaaaactagtatagaaaataatacgaaactttaaaaagcattggagtgtcagtatgttgaatcagtagtttcactttaactgtaaacaatttcttaggacaccatttgggctagtttctgtgtaagtgtaaatactacaaaaacttatttatactgttcttatgtcatttgttatattcatagatttatatgatgatatgacatctggctaaaaagaaattattgcaaaactaaccactatgtacttttttataaatactgtatggacaaaaaatggcattttttatattaaattgtttagctctggcaaaaaaaaaaaattttaagagctggtactaataaaggattattatgactgttaaaaaaaaaaaaaaaaaa

SEQ ID NO: 237068 - DNA, 655 bp, Homo Sapiens
aatgatgaaagcatgtaccctccacccttttcctggccccctaatggggcctgggccctttcccaacccctcctaggatgtgcgggcagtgtgctggcgcctcacagccagccgggctgcccattcacgcagagctctctgagcgggaggtggaagaaaggatggctctggttgccacagagctgggacttcatgttcttctagagagggccacaagagggccacaggggtggccgggagttgtcagctgatgcctgctgagaggcaggaattgtgccagtgagtgacagtcatgagggagtgtctcttcttggggaggaaagaaggtagagcctttctgtctgaatgaaaggccaaggctacagtacagggccccgccccagccagggtgttaatgcccacgtagtggaggcctctggcagatcctgcattccaaggtcactggactgtacgtttttatggttgtgggaagggtgggtggctttagaattaagggccttgtaggctttggcaggtaagagggcccaaggtaagaacgagagccaacgggcacaagcattctatatataagtggctcattaggtgtttattttgttctatttaagaatttgttttattaaattaatataaaaatcttaaaaaaaaaaaaaaaaaa

SEQ ID NO: 237069 - DNA, 681 bp, Homo Sapiens
gacagagggcacagctaagcacagctgccactgcaggagacaggccccatgtcaggatgccatagtgctgtggggagcacagtattacccagtgggtagggcttctgtcttccctgggagcagggatggtatcttagtcaatttttttcccttgagatgaggtctgtgcctgatgtacaacggatactccataaatgtttgacaaaccaacgaagaatgaaaaaaagcctagtcagactcccatccaaagtaggaactatctctttaacattcttgactcactatcactttacctcaaaaaaaaaaaaaagaagaaaaaaacataagtgattgcagaattttgttcttctcataatttctggtttagaaaattatggagccttacatcctgatcatgctgggccttagaattctgacacagtgagtcatcacatttcctcccactgcctgtggccttgttccaccatgactctcacagtacagtgtaggcttagtgtagtagtattcccttggaaagggtctggcctaccatcacatgccccaagaaacttctggttggtaaagaagataggctgcttattgccatgtgtagtcacttccaagtgcccactgcctttccatcctgcaattgtggcctgtgtataattaaatgattttagcctcaaaaaaaaaaaaaaaaaa

SEQ ID NO: 237070 - DNA, 778 bp, Homo Sapiens
  misc_feature (15)..(15): n is a, c, g, or t
  misc_feature (100)..(100): n is a, c, g, or t
gatggcccactctgncccgatcctgcaccagcaatggatgttgacctgtctgctgagtcttgagcccaccactgccaaggacacccagctggagctaatntgctgggctgagtcatagcatctgcacttctcagaacttctggatgagttttcccagaacgtcttgggtcagctcctgaatgatcctttcctctcagagaagagtgtgtcaatggaggtggaaccttccccgacgtccccggcgcctctcatccaggctgagcacagctactccctgtgcgaggagcctcgggcccagtcgcccttcacccacattaccagtgacagcttcaatgacgatgaggtggaaagtgagaaatggtacctgtctacagacttcccttcaacatccatcaagacagagccaattacagacgaaccacccccaggactcgttccgtctgtcactctgaccatcacagccatctccaccccgttggaaaaggaggaacctcctctggaaatgaacactggggttgattcctcgtgccagaccattattcctaaaattaagctggagcctcatgaagtggatcagtttctaaacttctctcctaaagaaggtctgtctgccctccctgtgtccctttgggttatggatatggtctctgggtctacagagagggaatatggcgagagagctgggatgagtttgtaccacagatgttgtagctggctttatgaaatagctctgttcttaaaaaataaaaattttgcttccaaataaaaaaaaaaaaaa

SEQ ID NO: 237071 - DNA, 658 bp, Homo Sapiens
ctgtctgcatctctttgagtagtattactgcctgcatacttatctactggtatcgacaaggagacttagaaccgaaatttagaaagctaatttactatatcatattttctatcatcatgttgtgtatatgtgcaaacctgtacttccatgatgtgggaaggtgaggctgccaaggagaagtacttaccaggactcttcaaaatgatacattaggacagtgagtaatttttggataaggtatgctgaagaatctcctgcagaagtctgatacatgattttcatgttaattgtaaatgttaattccctcttgcaagggagacatatcctagatcactttgctttttctttaaggagctgatgttgcacctaaacattccaacccttaaagctaaaacagcacaaaaaaatttcacttttgaaatgaaatttttataattgtatggcaaaaggctatgtaaaaacaaatcttgcatcttaagacaaatattcttttatttctgttaaactgaatatacaattgttccctaggcaaccaacttttgcttataactacaatttaatttcacgttgacaaaacacagtgaaaagacaactttgtgaagatctaattacaataataaataaaataatttatacaaggaaaaaaaaaaaaaaaaaa

SEQ ID NO: 237072 - DNA, 647 bp, Homo Sapiens
  misc_feature (212)..(212): n is a, c, g, or t
gcagaagaacatcctaaaaaagcattcaactcagaaacagacagtttcaagctggcctatggagggcaccagtatcacgccagctgtgccaacttctggatcaactgtgtcgaaccaaagcctcctggcctcgtcctgcctgacctgctctgaacaactcctctgtgaagcattgacttttttttttctgtgacaccccacggggtgacagngaccaataaatagaatgcgagcactgcacagttcgcttccctgaatcgatatgaagaacaccgcaagggacggggcccccgtcatccccacggccagtctgcaggacttcaggtaaaattgtcccacccaaactgcacgtggcaccagaagcttgctcacttatctctacttaagattttctgaaatacggaccacggctttcttgatctaaggaagaacttgctgctgcagtattgaaactgtgaagaactgacatttgaagaaaaatagattaccgttgcgggactagaatgggcgactgcttggagccagtgcttgtttttatctaggacacttactgtcctgtgaagtagaatacatttatctgcatttagtttgttaatgtctgaaatgaataaaaagaggaaattgcgattaaaaaaaaaaaaaaaaaa

SEQ ID NO: 237073 - DNA, 710 bp, Homo Sapiens
  misc_feature (22)..(22): n is a, c, g, or t
atggcatccaagagaagctccnaagtggtggataaggtgactcaaaggaaagacgactcaacctggaactcagaggtcatgatgaggtccaaaaggcaagaactaaattgcccgaaagtccagatcgaaagaaaagaaaaaggagaaagatatctgttcaagctcaaaaaggagatttcagaaaaatattcaccgaagaggaaaacccaaaagtgacactgtggattttcactgttctaagctccccgtgacctgtggtgaggcgaaagggattttatataagaagaaaatgaaacacggatcctcagtgaagtgcattcggaatgaggatggaacttggttaacaccaaatgaatttgaagtcgaaggaaaaggaaggaacgcaaagaactggaaacggaatatacgttgtgaaggaacgaccctaggagagctgctgaagagtggacttttgctctgtcctccaagaataaatctcaagagagagttaaatagcaagtgaatttctactaccctctcagtcaccatgttgcagactttccctgtctggaggctcaccttagagcttctgagtttccaagctctgagtcacctccacatttgggcatggcatcttcaaaacaattaatttgcatagttaatttgggatggggaagcaaatgactctaaaataaaaattaaatgaaaaagctaaaaaaaaaaaaaaaaaa

SEQ ID NO: 237074 - DNA, 727 bp, Homo Sapiens
  misc_feature (129)..(129): n is a, c, g, or t
ccaccaggaacgcgcctatgagtacgtggagtgtcccattaggggcactgcggctgagaataaggagaacctagatccttcaaatctgatgccaccaccaaatcaaacaccagctccagatcagccatntgcattgtctactgtcagagaagagtcatccattccgagagcagattcagagaaaaagtgggtttacccttctgagcagatgttctggaatgcaatgttaaagaaagggtggaagtggaaggatgaggatatcagtcagaaggatatgtataatatcattagaattcacaatcagaataacgagcaggcttggaaggagattttgaagtgggaagcccttcatgctgcagagtgtccttgtggtccatcattgatccggtttggagggaaagcaaaagagtattcaccaagggcacgaattcgttcctggatggggtatgagttgccttttgataggcacgattggatcataaaccgttgcgggacagaagttagatatgtgattgattattatgatggtggtgaagtcaacaaggactaccagttcaccatcctggacgtccgtcctgccttagattcactttcggcagtatgggacagaatgaaagtcgcttggtggcgttggacctcgtaaagcactgtttcagatggaaaaatataaactatttttttctgagcgatacattaaactattttccccagaaaaaaaaaaaaaaaa

SEQ ID NO: 237075 - DNA, 702 bp, Homo Sapiens
tgggctactcacaaaagatgcgattcacctactgagcatcctccagcttccctggtctgttcgctgcagttttccccatcagtactcaagcactataagccttagattcctttcctcagagtttcaggttttttcagttacatctagagctgaaatctggatagtacctgcaggaacaatattcctgtagccatggaagagggccaaggctcagtcactccttggatggcctcctaaatctccccgtggcaacaggtccaggagaggcccatggagcagtctcttccatggagtaagaaggaagggagcatgtacgcttggtccaagattggctagttccttgatagcatcttactctcaccttctttgtgtctgtgatgaaaggaacagtctgtgcaatgggttttacttaaacttcactgttcaacctatgagcaaatctgtatgtgtgagtataagttgagcatagcatacttccagaggtggtcttatggagatggcaagaaaggaggaaatgatttcttcagatctcaaaggagtctgaaatatcatatttctgtgtgtgtctctctcagcccctgcccaggctagagggaaacagctactgataatcgaaaactgctgtttgtggcaggaacccctggctgtgcaaataaatggggctgaggcccctgtgtgatattgaaaaaaaaaaaaaaaaaa

SEQ ID NO: 237076 - DNA, 639 bp, Homo Sapiens
agcagccctagtcatggtgctggtgctaccgccttgttttaggagcctgcctcctgtcagtatgaaaccctcacctgaaaaatgccagcctggacaccaaacactgagccccttcaacaggcacattatttccccctgagatccataagggaatttagtttctactattgtagagttctgaaaagaggtaaaatagtagtcctttggtcatcctatttttgctttcaattttgatatttcagactgtaaaaggccttgggggatgatagtacatgtggtagcagtaatttttttgaagcaactgcactgacattcatttgagttttctctcattatcagattctgttccaaacaagtattctgtagatccaaatggattaccagtgtgctacagacttcttattatagaacagcattctattctacatcaaaaatagtttgtgtaagttagttttggttaccatctaaaatatttttaaatgttctttacataaaaatttatgttgtgttttaaaatccttaggggctttatctatttttctaagtcagttaactgtacttctaaaaaaagtattttgtatctacttttgtaacttcgtcagaataaaatatattgaaagcaaaaaaaaaaaaaaaaaa

SEQ ID NO: 237077 - DNA, 673 bp, Homo Sapiens
tcagctcttctgcagatgcttgtcatgcagaactgctcaggactataagcactactatggggaaactaatgcctaacctgcttccagctggagctgacttttttggattttctcatccagccatccacaacctgatccagagctgtccaggagctcgaaaatgcatcaattaccagtgggtgaaatttgatgtgtgcaaacctggagatgggcagctacctgaggggctgccggagaatgatgcagctatgagctttgaagcctttcagagacagatctttgatgaagatcagaatgatccccttctgccaggatccttggacctcccagagcttcagcctgcagcctttgtgtcttcttaccagcccatgtacctgacacatgaacccttggtagatactcacctgcagcacttgaagtctccatcacagggtagcccaattcagtcttcagattgaacaagaagggatcagatgccacatcgtttttgtcgtgattaatttaacttaaactaaaattttgggtatatgaaagaaggcagcaattcagaagtaaagaagatactaacgtatttcatcatggagggtcctgtggtgatggttttccctgggaaaaccttcagctgctttatttttagtaataaatttctcttgtcaaaaaaaaaaaaaaaaaa

SEQ ID NO: 237078 - DNA, 749 bp, Homo Sapiens
  misc_feature (59)..(59): n is a, c, g, or t
acatgttcagtggagccacccaggagcatccatgagcggggaaggggtccacaccctancatggcaagttgatacgatggggtgcttggtggatgggccatggaggtccgtgagctggaactgggcacacgccatcccagagggctcaggatgccccaggaaggaaagaagggcaacagactacacgattggacgtgtgtggttgactgggatgaagttggagggaggggcagggccttgcaggggattggtactgatcccagggaggaagtgttggggcttcatgaactaggatgaaaggaggcccctgagccatgacaaggggcacatccaggatttccgccaccctgaatttagtagagctagtaggccctggtcgtcactctgggcagggatgccgtcagccttgagggtcgccacccacctgtgtgttgccctctgtcctggcggggaaacatacaccccttgtctcaccaccaaccttgcttgtgtagtcagcagggctggccctgccccaaggactcactgcatgtacccggacccctaggcctggcctttgcagcatagttgggagcttctggattccatctgcacctgtgagccccatgctggctgtgcactgcgcgggcctgagactgctggatacaatgttgggcaacaactcagccagcctgatggcagcctcagaggcttactctaacccatcccagaataaatggagacttcatgtgaaaaaaaaaaaaaaaaaa

SEQ ID NO: 237079 - DNA, 690 bp, Homo Sapiens
tatatctgtaaagggtatctgatcaagccaacaacagtgacggaatcctccatacatctgcagaatcctactggatgtccacttggatgtcctgaagccacctgaaactcagcatatctacgaatgatcaaatgggatgccagcactcagttatccaagcaagaaatatgctccatgcttgactctttaccctcactaacaaaactgggcaaagtcctgctggtctctctctttaatacttctcaaatctgtccctttagtttcatccctctgttactgttctcattcagattcttattacatctcaccaaagccactgcagcacattcttaactgtgtccaagtggtaataattaaaaacagcttactgtctttatcattatcactcttaacccaccctaaaatttcctaaaggtatcccgttgacctcaggatacattaaagctacttagtggtgactggtttctgcctaccacttcctcccctaccacctaacactcacacatacaaatacttggttcaactgtttgctctccttgaaatgaatgcctcctctgtgcccagctagcagttacccatcctttaaaactcatcccctctaagatgtgccctaccacctgcagatttgggttaagtgtctcaataaaatcttaaatgaataaatgcatggctaataaaaaaaaaaaaaaa

SEQ ID NO: 237080 - DNA, 627 bp, Homo Sapiens
gcgccatgtgcagaaacaggaggccgagaaccagcagctggcagatgccgtcctggcagggcggaggcaggtggaggagctgcagctacaggtccaggcccagcagcaggcctggcaggctctacacagagaacagagggagctggttgctgtgctgagggagcctgagtgaggagaccgccagccccagaagcagagggcagtcaaggtcaagagcctgtggtccagcatgcctggcctgggcgggctacctctgagaacggctgaaatggtgcccagtccatcagcagtgatggaatttgctggaggactaggccagagcaagcctcactgccactgtgcctttggggcacccttggggttggacatacaccccctttagattcctctgtttcttctacctggataattcttggccatgttctctcttctctaggttcaggtcagctctgcccctccgcccccctcctgctggttccccagcccttttccctggccctggcttggagaatctgttttcaatctccactgattgcccccttgctggccagcccaggggcctttaccatgttctctccacatccgtaaataaacttccttcactacactgtaaaaaaaaaaaaaaaa

SEQ ID NO: 237081 - DNA, 748 bp, Homo Sapiens
  misc_feature (8)..(8): n is a, c, g, or t
gaatcacntgaactcaggaggaggaggttacagtgagcccagatcgtgccatgcactccagcctgggcaaaaagagcaaaactccatctcaaaaaacaaaaacacctcactgctgtttcctaagtacatacttaagaaaattgggatacatggtggtggttcatggatgttgataaggaattaaaatgtaccgtgcgactctctgtttcagtggtgacttttacctgtttagtataaatattcctttgcttccaaccataaatgtgttcttagaaatgggcctatagtttagtaacctatagtttggtaataggcttgtttgttttcagatggattttggttctgtgagctaaagctattttgcattaaagccttcgtcctcacacattgttttgacatatttctagtcttcataaacttttttaatttagatttttttcccttcacaagtatacatctgttttagcaaatagccttatgaaggttgtagatgtattattttgggcatgcctggtgatttctatattttttccaattacatttaaagctttatgttttaggaatataagtacattttatttctactttttattatatatatttaattgcacaagtactactgtctagaaaaaaatgggatgttgctaacacagcattgttggcttgtaggcagtgctgtcctgtaaatagattgaaatgtatttttatcagctggtatataaatttgaggaaagaaaaaaaaaaaaaa

SEQ ID NO: 237082 - DNA, 711 bp, Homo Sapiens
cgtgctggcgggcaccgcctgcctcttcaccccgttggcgatgcccttagattattcccactacatttccctgcccgctggtgtgctgagcctggcctgctgcaccctctatgggatctcctggcagtttgacccttgctgcaagtaccaagtggagtacgacgcctataaactgtcgcgcctgcctctgcacacactcacctcctccaccccggtggtgctggtccggaaggacgacctgcacagaaagagactgcacaacacgatagcactggccgccctggtgtactgtgtaaagaagatttacgaactctatgccgtatgatttcagtagaacagggagcgaagcaaaaccacccggcccacaagagacaacagagtattcagatcgccacactctgtgaggcagcagagcctgggcaggtgtttggcttagtatttgttatttttaaaaaataacagatcacgggtgtacccagggtttttcagctcattacactaagatgtggatttccataacccaagaggggggtctgaggctgtggaagtccgactgggcagtggaatgctgatggaggcagacgctgccgagggggtgtggacgtgctttgggggaggtctttaagtctattgtttaactgtaccatccagagcccaccagaagctattgatcattaaaattatgagaatttcaaaaaaaaaaaaaaaaaa

SEQ ID NO: 237083 - DNA, 713 bp, Homo Sapiens
gaccctctgtacgacagcattgaggagaccctgccccctcgacctgaccacatatacgatgagcccgagggagtggctgccctgtccctctatgacagcccgcaggagccccggggtgaggcatggaggaggcaggcgacagctgacagggaccctgctggcctccagcatgtccagccagccgggcaggatttctctgcttctggctggcagccaggaactgagtatgacaatgttgtactaaagaaaggcccaaagtgacagaggcagcagagggatggtccaccgccccttggcttctgctggtgactcctcctggccactgcatcagaagaacctcctctgccccttctggagcccgaggcctggcctgtcttcgttggggctgataaattgcctctcccagggcctgctgggtgagtcaccatcccaaagcaggaagggtgccctggagagaaccaccctcctcctactctttttccacttcctcctctttctttccccagctgaggaggaacctggggcatttagggcagaggacaaaaggatgtcagcaattgcttgggctgcttggctatgcaagcctcctgcctgctgatggccacttcagggacagcctgggcccaggcacccagggggatggcggcagcttcctgcacctttcagatttcttggtggcattaaagcattttcagaacaaaaaaaaaaaaaaa

SEQ ID NO: 237084 - DNA, 792 bp, Homo Sapiens
cagcgagctgagctggaggagacccgatcctcagccgcactccgagtccagtgcatccctcagatttctctgagcataattgtcagccgtattatgcatctgatgtgcaacgtatggtcttcttcagggctctgccttgccaaccctcgggctgacagcatccacaacacttactcaactgaccatgcttctgcagcaccaccttcagttacaaggtcaccagttgaaaatgacggttacatagaggaaggaagcatcactaagcacccttcaacctggtcggtggaagcagtggtcctatttctaaaacaaacagatcctcttgcattatgccctcttgtcgacctcttcagaagccatgaaattgacgggaaggctctgctcctactcacgagtgacgtgttgctgaagcacttgggggtgaagctgggaacggctgtgaagctatgctactacattgaccgacttaaacaaggaaaatgctttgaaaattgaaaaaatccttgtgcaaatttagattgggccaacttctagaggcaccaatgccttcttagtgtggaatcatttttctgccctttagtcgtttttgttttgtagaaagtatctctcaaaatatattatagctagaattgtagaactatgttatagtccagtctacttctttaaaaaccatttaaactgctagatagtattagaatagtccaatagaaaattcattctttataggtctttaaaaattacttttattatattgtttacaaatatatttcatgcaaaaaaaaaaaaaaaaaa

SEQ ID NO: 237085 - DNA, 684 bp, Homo Sapiens
acattgatgggtcccgccacatccagaagatttcagcagaggcagatgtggagctcaacctggtgcgcattgctatccagaacctgctgtactacggcgttgtgacactggtgtccatcctccagtactccaatgtatactgcccaacgcccaaggtccaggacctggtagatgacaagtccctgcaagaggcatgtctatcctacgtgaccaagcaagggcacaagagggccagtctccgggatgtgttccagctatactgcagcctgagccctggcactaccgtgcgagacctcattggccgccacccccagcagctgcagcatgttgatgaacggaagctgatccagttcgggcttatgaagaacctcatcaggcgactacagaagtatcctgtgcgggtgactcgggaagagcagagccaccctgcccggctttatacaggctgccacagctatgacgagatctgctgcaagacaggcatgagctaccatgagctggatgagcggcttgaaaatgaccccaacatcatcatctgctggaagtgaggctggtagtgactggatggacacattgctgtgggtagtccctcctactaggaggcttgtcatactgtctagaggttgactcttagttctgtaaataaagacatccatttcaaacagcaaaaaaaaaaaaaaaaaa

SEQ ID NO: 237086 - DNA, 769 bp, Homo Sapiens
  misc_feature (32)..(32): n is a, c, g, or t
agttaaaatagcactctcagtttttcagtatnacagagagcaaatagttcctctcctgctctgtgcagtagcttttccagaactatggacaaattgatcagaagaagattgattatttcctcatctttttttcttttttttgagacagagtctctctctgtcccccaggctgaagtgcagcggcatgatctcagctcactgcaacctctgcctcccgggttcaagtgattctcctgcctcagcctcctgagtagctgggattacaggcacccaccaccacacctggctaattttttgtatttttagtagagacagggttttaccatgttggtcaggctggtctcaaactcctggcctcaggtgatccacctgcctcggcctcccaaagtgctgggattacaggcgtgagccactgcgcccggcctatttccccacctttcgtgtaaggtgctactgaacatgacagcttcttgtcatgacaggaaacttgcatcagttggatatccttttgagaaactgaattttgcaaagggccaaatttccccaaactgaacgggctcaggaaatgttcctttacactcagaacattctattttaagtatattatttattgttggcagttcctcagggatttcccttttctctgtattggtcagtgtagttgatgtaaaaccgttttgtggatggaaaatatttttattttattgctcttttagtttggtaggttaaataaaggttcttggtaatttggaaaaaaaaaaaaaaaaaa

SEQ ID NO: 237087 - DNA, 665 bp, Homo Sapiens
  misc_feature (17)..(17): n is a, c, g, or t
cccaaatggacttattntgagtcacttgccaaatggcccaactgctcattttaaaatgagcagtgttcgtcttcgtaaagaaattaagagaagaggcaaggaccccacagaacacatacctgaaataattctgaataattttacaacacggctgggtcattcaattggacgtatgtttgcatctctctttcctcataatcctcaatttatcggaaggcaggttgccacattccacaatcaacgggattacatattcttcagatttcacagatacatattcaggagtgaaaagaaagtgggaattcaggaacttggaccacgttttaccttaaaattaaggtctcttcagaaaggaacctttgattctaaatatggagagtatgaatgggtccataagccccgggaaatggatacaagtagaagaaaattccatttataaagtactgagagaatgatattggattttgctgaacaggcctatcttgaactttggtaaattatttttgacagaatactcttttcaaaatggcatttgctgatttcataaacctttcacgtctggacgaattaccaaatgccatgaattgccactgtgtgtttatgtagaaaatacaaataaaagttattttgatggcttaggtttccttaaaaaaaaaaaaaaaaaa

SEQ ID NO: 237088 - DNA, 731 bp, Homo Sapiens
  misc_feature (80)..(80): n is a, c, g, or t
  misc_feature (656)..(656): n is a, c, g, or t
gatagatgggtgcggggacggagacaaatgacggcctttgggctcggaatacccacctttctggtaatgcagcccagcgngtcccagcctcgttttccagccctcactccaaaatggagtcgctctggttcgaacgcctctgacaagtgtgtacctacgtgtcaggcccatccttcctgcaggcctttgtcttggtgtcaccctgcctgagctggccccaaccacagtagcaacagtgatgctgatgtgtgactgctgccaggagcctgctcacatgaccgtgtggagaaagttctttccctgaggaccatctggagtggacgcgtgcactacccctctctgaatacaccctccccacgaggccctctggagcatcctgtagagccagcccctacccagagaccctgagcccagagaatgcgctgggtggtgagcctggggacgaatgcagagccctaggtctcctctccagaaagaccggattttgccatgttggccaggctggtcttgaactcctgacctcaagtgatccacctgcctcggcctcccaaagtgcagggattacaggtgtgagccactgcacccggcctcaggcagatatttttaccagccgaatactcttgcactgtgcactcttcgtgttcatcatcagtccncccggatgggtgtttaaggcatttccaaagctctgttattaaaaacacgatgcaatgaaaaaaaaaaaaaaaaaa

SEQ ID NO: 237089 - DNA, 731 bp, Homo Sapiens
  misc_feature (684)..(684): n is a, c, g, or t
caggtcagagcggcctggcctgtgtgcagcacggcctgccttcctccagcagctccagccaaagcatcccagcctgcaaacatcacactctcgtgggctttcttgcgacagagggaggtcagagcagtgccactgatgcacagccaggcaacaccttaagtcctgccaacaattcacactccagaaaggcagaagtgatttacagagtccaaattgtggatcccagtcaaattctggaagggatcaacctgtctaaaaggaaagagctacagtggcctgatgaaggaatccggttaaaagctgggagaaatagctggaaagactggagtccgcaggagggcatggaaggccatgtgattcaccgatgggtgccttgcagcagagatccaggtaccagatcccacatcgacaaggcagtgcttctggtccagattgatgataaatatgtgactgtaattgaaactggggtactagaacttggggctgaagtgtgagccagtgtttattataaagacatttctttttccctctcaattccaaggcattggaaaaagagaggaacaagcagaagatgcctgcaggtatcactttgatcctatgtgggagcgactgaaaatagaatgagcttggttaagcacctctcctttgcccttcaccctgactcctgtcactgtctccatcccncaaataaagctgaaatatttttttaagttaaaaaaaaaaaaaaaaaa

SEQ ID NO: 237090 - DNA, 740 bp, Homo Sapiens
gagccacaggaagagcctagcggggaatgtcatgaatcgacctccatcctgagctctccaggcctgggacaatggaaagtggataggggctgtcttcccagaaggaagctgggtcagaggttggtgccccatgggctccacccagagccccatggcagtctccatccattggtgccaggacctgctgggaacaggctgagagggtggttggcccagtgcacagtgcctggcactaacaacctgatcgtgggccaggtgtctgcctcgaaactgcctgaaggcaggcagggtaggacaatgtctggaggctcacggttttatagactaggggtccccaacccctgggctacagaccggtaccagaaccgggccacacagcaggaggtgagcagcaggcgagcaagggaagcttcatctgtatttacagccacccccccattgatcccacagcagcctgagctccgcctcctgtcagatcagtggcggctggagattgtcataggagctggaaccctatggtgaactgcgcatgtgaggaggttgcgcgcttcttttgaaaacctaatgcctgatctgtcgttgttgcccatcacctccagataggactgtctagttgcaggaaaacaagctcagggctcccacggatcctacattactgtgagttgtatatttcactatatgttacaatgtaataataatagaaataaaatgtacataaatgtaaaaaaaaaaaaaaaaaa

SEQ ID NO: 237091 - DNA, 689 bp, Homo Sapiens
acgtgccggccaccaaggtgtttcctaagcttccgcaggcccttctggcgcgaggagcacattgaaggcggccactcaaacaccgatcgcccgtcgcgcatgattttctacccgccgccgcgcgagggcgcgctgctgctggcctcgtacacgtggtcggacgcggcggcagcgttcgccggcttgagccgggaagaggcgttgcgcttggcgctcgacgacgtggcggcattgcacgggcctgtcgtgcgccagctctgggacggcaccggcgtcgtcaagcgttgggcggaggaccagcacagccagggtggctttgtggtacagccgccggcgctctggcaaaccgaaaaggatgactggacggtcccttatggccgcatctactttgccggcgagcacaccgcctacccgcacggctgggtggagacggcggtcaagtcggcgctgcgcgccgccatcaagatcaacagccggaaggggcctgcatcggacacggccagccccgaggggcacgcatctgacatggaggggcaggggcatgtgcatggggtggccagcagcccctcgcatgacctggcaaaggaagaaggcagccaccctccagtccaaggccagttatctctccaaaacacgacccacacgaggacctcgcattaaagtattttcggaaaaaaaaaaaaaaaaaa

SEQ ID NO: 237092 - DNA, 781 bp, Homo Sapiens
tgaccccaaagtgctgagcaggtctgcaacaaaaggagcacacgatcaacatggaggagtgccggctgcgggtgcaggtccagcccttggagctgcccatggtcaccaccatccaggtgatggtgtccagccagttgagtggccggagggtgttggtcactggatttcctgccagcctcaggctgagtgaggaggagctgctggacaagctagagatcttctttggcaagactaggaacggaggtggcgatgtggacgttcgggagctactgccagggagtgtcatgctggggtttgctagggatggagtggctcagcgtctgtgccaaatcggccagttcacagtgccactgggtgggcagcaagtccctctgagagtctctccgtatgtgaatggggagatccagaaggctgagatcaggtcgcagccagttccccgctcggtactggtgctcaacattcctgatatcttggatggcccggagctgcatgacgtcctggagatccacttccagaagcccacccgcgggggcggggaggtagaggccctgacagtcgtaccccaaggacagcagggcctagcagtcttcacctctgagtcaggctaggggcctccccttctcatcctccccacccccccgccaaggttctcacactggcctgggcttgggtgcccatataggaggtctgtatgttcaccaacagtgcggaggggtcacacattgcaaaacactgcccagaacagtaaaaagagcctgcatgcaaaaaaaaaaaaaaaaaa

SEQ ID NO: 237093 - DNA, 706 bp, Homo Sapiens
  misc_feature (21)..(21): n is a, c, g, or t
gccctccatgtgacttcctcncaggagccagatgcgatcctcaggctgctctcaccgtggcctgtccacggtccaggtccatctcagcagcgtgagggtgcactcagggtgttgttagagcgtctcgtgtgtgctagacgcacccctactcgttcctatagaacacagaggacataggaaacccttaaaacacacatgggattctctggtcacagttttgggttcaggctatgctgctttgggcaggtggagcaccccccgaggaagcctgcaagtccagggcacaggctgccttttggagggagggctggcccataggtgctgctggctccccgccaccagctgggcctcagccctcacggcattcctgctgagcaccgtggggcacccagggagcaggggcgtcagggatcctgctgccggcacccctgtgccgctggcatgagggccgtgtccccactgtgaaggatgaagagcaaggccctcaggacccgtgtcctcagagcaccacacactgagcacccagagacagcgggcctggcagcgggccgggccatgcagggagcgcctccctatgttgcctgccactctgggcaccggccagcaccctctggtgagaagaggtcccccctttttatgtgcactaccccaccatctgtgattataataaatttattattcctgtgttaaaaaaaaaaaaaaaaaa

SEQ ID NO: 237094 - DNA, 779 bp, Homo Sapiens
  misc_feature (59)..(59): n is a, c, g, or t
  misc_feature (86)..(86): n is a, c, g, or t
tgccctaactgtatggcatgctgttctcatcagtcgaggtgagactagcatcgaaagcnacatcaacaagaaggagagacgtcgcntacagccaaggggcagagtatttaggaatcctacaaactacggctgcttggacaactggaaggtattcctgggtgtggatacaggaaggcactggcttactcgggtgctcttaccttctagtcacttgccccatgggaatggaatgagctgggagccccctccctgggtgactgctcactcagcctctgtgatggcagtgtgagctggactgtgtcagccacgactcgagcactcattctgctccctatgttatttcaagggcctccaagggcagcttttctcagaatccttgatcaaaaagagccagtgggcctgccttagggtaccatgcaggacaattcaaggaccagcctttttaccactgcagaagaaagacacaatgtggagaaatcttaggactgacatccctttactcaggcaaacagaagttccaaccccagactaggggtcaggcagctagctacctaccttgcccagtgctgacccggacctcctccaggatacagcactggagttggccaccacctcttctacttgctgtctgaaaaaacacctgactagtacagctgagatcttggcttctcaacagggcaaagataccaggcctgctgctgaggtcactgccacttctcacatgctgcttaagggagcacaaataaaggtattcgatttttaaaaaaaaaaaaaaaaaa

SEQ ID NO: 237095 - DNA, 803 bp, Homo Sapiens
cctgaacaggtgtccagcgtcacgtcgtcctggcccagctctggctgggctgaggcaaccttgccccccacccaagagccttgccctccagccacagcagtccacagcagcagggttaagactcagcacagggccagcagcagcacaaccttgaccagagcttgggtcctacctgtttacctggagtgaacagtccctgactgcctgtaggctgcgtggatgcgcaacacaccccctccttctctgctttgggtcccttctctcaccaaattcaaactccattcccacctacctagaaaatcacagcctccttataatgcctcctcctcctgccattctctctccacctatccattagccttcctaacgtcctactcctcacactgctctactgctcagaaaccaccaagactgttgatgccttagccttgcactccagggccctacctgcatttcccacatgactttctggaagcctcccaactattcttgcttttcccagacagctcccactcccatgtctctgctcatttagtcccgtcttcctcaccgccccagcaggggaacgctcaagcctggttgaaatgctgcctcttcagtgaagtcatcctctttcagctctggccgcattctgcagacttcctatcttcgtgctgtatgtttttttttttcccccttcactctaatggactgttccagggaagggatgggggcagcagctgcttcggatccacactgtatctgtgtcatccccacatgggtcctcataaaggattattcaatggaaaaaaaaaaaaaaaaaa

SEQ ID NO: 237096 - DNA, 740 bp, Homo Sapiens
gggacattgtacagtgagtgaagtatagcctttatgccacactctgtggccctaaaatggtgaatcagagcatatctagttgtctcaacccttgaagcaatatgtattataaactcagagaacagaagtgcaatgtgatgggaggaacatagcaatatctgctccttttcgagttgtttgagaaatgtaggctattttttcagtgtatatccactcagattttgtgtatttttgatgtacactgttctctaaattctgaatctttgggaaaaaatgtaaagcatttatgatctcagaggttaacttatttaagggggatgtacatatattctctgaaactaggatgcatgcaattgtgttggaagtgtccttggtgccttgtgtgatgtagacaatgttacaaggtctgcatgtaaatgggttgccttattatggagaaaaaaatcactccctgagtttagtatggctgtatatttctgcctattaatatttggaattttttttagaaagtatatttttgtatgctttgttttgtgacttaaaagtgttacctttgtagtcaaatttcagataagaatgtacataatgttaccggagctgatttgtttggtcattagctcttaatagttgtgaaaaaataaatctattctaacgcaaaaccactaactgaagttcagataatggatggtttgtgactatagtgtaaataaatacttttcaacaataaaaaaaaaaaaaaa

SEQ ID NO: 237097 - DNA, 789 bp, Homo Sapiens
gtgacaggaagttaagctgttcctctccctggctgctgctctggatggccagagaacaagatgctcccttgctgagctcctgggagcgtggaaggagatgctaggccctggcacagtgttatgtggactgggccacgatagggtggagtgagctagtgaagaaggcagagggagacttggcttctggtctcagctatgcctgttttgtgaccttgattgagttgcttgggctttacttctgcctacaaatcaggggtaaaaatacctgttgggaggagaaatgagaacatagaggaaagcctcttggaggaaaggtgcttggaccaagtctcaggtgtgtctgcctgtggctgcacaggctctctaaccgaaacctcactttcagagagatgtgggtcctttgtctccaggatccacaccctagattttaacactgcattctcactataacatgccctataatggctgcatcccttttgagcaacctccaaaatctacatttacacagtaggtaaattagggatgactgcattatcaaaatactctcagggttcctataaatggcagctctcctgttgtattcaggtgttgtttacagactaacaaatgtgttggcaaatccctggttagatgcacttcctggtgttgagatgaacacgtcgatttttcaccaatcgatgaagccatgctctgcaatgacaatattaatgtgatccgaccctaacattttctctatggaagacgtatgttgcataaagcaaggcacacttcaaaaaaaaaaaaaaaaaa

SEQ ID NO: 237098 - DNA, 681 bp, Homo Sapiens
tccacgttgtggccagcctgtggtgtggctctgaggcctaggcaacgagcgacagggctgccagttgcccctgggttcctttgtgctgctgtgtgcctcctctcctgccgccctttgtcctccgctaagagaccctgccctacctggccgctgggccccgtgactttcccttcctgcccaggaaagtgagggtcggctggccccaccttccctgtcctgatgccgacagcttagggaagggcagtgaacttgcatatggggcttagccttctagtcacagcctctatatttgatgctagaaaacacatatttttaaatggaagaaaaataaaaaggcattcccccttcatccccctaccttaaacatataatattttaaaggtcaaaaaagcaatccaacccactgcagaagctctttttgagcacttggtggcatcagagcaggaggagccccagagccacctctggtgtccccccaggctacctgctcaggaaccccttctgttctctgagaagtcaagagaggacattggctcacgcactgtgagattttgtttttatacttggaagtggtgaattattttatataaagtcatttaaatatctatttaaaagataggaagctgcttatatatttaataataaaagaagtgcacaagctgcaaaacaaaaaaaaaaaaa

SEQ ID NO: 237099 - DNA, 697 bp, Homo Sapiens
  misc_feature (188)..(188): n is a, c, g, or t
agggccagaccacagactacttataggagcatcttcaaggcggtcacagtgaaaaccttgaaatggccttttttaatatatataaataaatgttaatattatttatgtttattatttgcacagaagagttctagggagatgtatttctaaatgtttcccaggctaatacaggaaacaagaggtaccanaaaaagaaagtttattttttaaaattctaagtagagtatattgaaaagaaaaagaagagccttaacatatataaaagtttaaagaagagtaacacttgaaaagtgtgtttagatttattttttcatctcatttttaagaacaagcagtacgatttgttttcttcaacatgtgtgactgcgcactgagtacaaatgtgtgactgctcatggttaatgcaggcaggtgtgaacatgggggaacaatgagcagagatggcagagggcagagcacatggcccccagaggcttccagtctcactgacacaggagggctgggctccacttcatccagatgaaggaaaggaagacctcaagaaaaattcacagttgagtgcatcccagcattctgttccgggcaggcatttcaggaagaccgccttgtaggtattacatccctggtgtcgtattttgcctgttaaatcgtaacaagcaataaacaactttcactttgcaaaaaaaaaaaaaaaaaa

SEQ ID NO: 237100 - DNA, 691 bp, Homo Sapiens
tccagagtgcatggcccatccccaaagactcattcgcttctccctggacaacaggagagcttctacagccaggacctgcccccaggagcctctcagggggacaccgggtggggcgctgtggctgggggtcctgcggctgctgctcttcaagctgctgctgtttgacctgctcctgacctgcagctgcctgtgcgaccccgcgggcccgctgccttcccccgcaaccaccacccgcctgcgagccctcggctcccatcgactgcacccggccacggagactgggggacgagaggccaccagctcacccagaccccagcctcgggaccgccgctggggtgacacccctccgggtcggaagcccgggagcccagtatggggggaagggtcttacctcagcagttaccccacttgcccagcacaggcctggtgctcaagatctgccctcagggctccttcctccagtcttggagcattttttgcaggtgacctgcctcctcctctgcaggctggagctgcctgagggcagggctctacctcccctgcgtcacactgtgtgaggctgtgtctctgccatccaaaagggggccccttgagaatggtgatccacccagttacaggggcatttagggagcagatgactgagaacattaaaaaagaacttaaatgacacagcaaaaaaaaaaaaaaaaaa

SEQ ID NO: 237101 - DNA, 771 bp, Homo Sapiens
  misc_feature (46)..(46): n is a, c, g, or t
  misc_feature (135)..(135): n is a, c, g, or t
  misc_feature (148)..(148): n is a, c, g, or t
  misc_feature (181)..(181): n is a, c, g, or t
ggccagccagatgctctgtgctgcagccagtgtacacggatttacntgaaggaaatgtcacgtttccacagacaactgaagaaaaagactctttggattaccctaattgtgatttactcattggaaccactgttntggattgtccaanaattaagtctcaaagcttaaatatgaggcttcnagggagttatctgaaatcagtgcttggtatcttcttgttttttgcttgttttttaaaaccttaattctcatatttttctgtcatatttctcagtgcctggtacattatcaccattaatccatgccagttatgtacagttttgcatgtttgttttttattttactcttttctctccttcattccctattcctgttcccccataggtgcccagtctaatgtatttgatatctgtccttagagcctccgtatctgtgaagactagagtcatgcacttcatcacatttcagtaacgatgggccgcatgtaccacagtcccatgagatgatagaggtgcagaaaaattcctgtcatctagtgacatcgtagccatcataacatcacaacacgactctcatttgtggtgaccctggtgtacacaaacctactgtactgccagttgtataaaagtctagcacatccagctacgcacagtacatacttgaaaattataataaatgaccatgttactggtttatgtaattactatattatactttttaatcattattttagagtgtacaacttctacttgtaaaaaaaaaaaaaaaaaa

SEQ ID NO: 237102 - DNA, 643 bp, Homo Sapiens
cagggaacttatgcctctccacctcccatgtcacccatgaaagcaatgagtaatccagcaggcactcctcctccacaagtcaggccgggaagtgctgggataccaatggaagttggcagttatccaaatatgccccatcctcagccatctcaccagccccctggtgccatgggaatcggacagaggaatatgggccccagaaacatgcagcagtctcgtccatttataggcatgtcctcggcaccaagggaattgactgggcacatgaggccaaatggttgtcctggtgttggccttggagacccacaagcaatccaggaacgactgatacctggccaacaacatcctggtcaacagccatcttttcagcagttgccaacctgtcctccactgcagcctcacccgggcttgcaccaccagtcttcacctccacaccctcatcaccagccttgggcacagctccacccatcaccccagaacaccccgcagaaagtgcctgtgcatcagcattccccgtcggagccctttctagagaaaccagtgccggatatgactcaggttagtggaccgaatgctcagatagtgaagagtgatgattacctaccatcaatagaacagcagccacaacaaaaaaaaaaaaaaa

SEQ ID NO: 237103 - DNA, 700 bp, Homo Sapiens
atcgtagcagtcagcgcagtgacgtgggctggcgcttgtttgatgacagcacagtgacaacggtagacgagagccaggttgtgacgcgttatgcctatgtactcttctaccgccggcggaactctcctgtggagaggccccccagggcaggtcactctgagcaccacccagacctaggccctgcagctgaggctgctgccagccagggactaggccctggccaggcccccgaggtggcccccacgcggacagcccctgaacgcttcgccccccctgttgatcggccagcccccacctacagcaacatggaggaggtggattagcaggtccctggctgatgggggggactgggtttgggacacccacacagagggccagctccttgccgcttctccttctctaacccagaggacactggctctgtcaatgggaagctgaggggtatgatttgggtgtggagacctctcaggttgggacttcttgtcagcttggacccctgaccagtgggctttggcttctccagccgcctccagtgctgcgtgatttgattctgttgtaccttcaattcttctgacccgcattataaacattataattttattctaaaaattgtaattttttttgcattttggaagtgactgctgctgtttaaatatattttaaaaataaataataagtaagtagaaaaaaaaaaaaaaaa

SEQ ID NO: 237104 - DNA, 701 bp, Homo Sapiens
  misc_feature (40)..(40): n is a, c, g, or t
  misc_feature (174)..(174): n is a, c, g, or t
gcaagtactcagaatcacctccaccacgtctggcactgcncacaatcagacccgggccctcagggcatcagagtccggcatatgaaggcgcatggttctggacggcccagcagctcctgtggccacagcagctttgtacacgaagaccatccatcctcccttcgtccaccactntactccctccaccctccctccctgatcccgtgtgccaccaggagggagtggcagctatagtctggcaccaaagtccaggacacccagtggggtggagtcggagccactggtcctgctgctggctgcctctctgctccaccttgtgacccagggtggggacaggggctggcccagggctgcaatgcagcatgttgccctggcacctgtggccagtactcgggacagactaagggcgcttgtcccatcctggacttttcctctcatgtctttgctgcagaactgaagagactaggcgctggggctcagcttccctcttaagctaagactgatgtcagaggccccatggcgaggccccttggggccactgcctgaggctcacggtacagaggcctgccctgcctggccgggcaggaggttctcactgttgtgaaggttgtagacgttgtgtaatgtgtttttatctgttaaaatttttcagtgttgacacttaaaattaaacacatgcatacagaaaaaaaaaaaaaaaa

SEQ ID NO: 237105 - DNA, 783 bp, Homo Sapiens
  misc_feature (105)..(105): n is a, c, g, or t
  misc_feature (150)..(150): n is a, c, g, or t
caccaggaggcccagccattaagcatagatactatatggtatcatgggacccatctattttttaccagtggactacaggattacttgagagttattagggctgcntaacagaccaggagatctggggttgcaccagggaatcgccatatntgaccagcatgttttaaaagctcttggtaggattagttggttctaaggatccctctagggacctcattatttcaagaggaacccaaagtccagcctcctacatagatgctgccccacgaaggacccacaaaactaacctagttcagggttctcaggcaggcagttctgcttcagcttagagcagaacccataaaatactcaagtactgggataggcaagcatgtgtgtttactgtggattggtccctgaaggctcctttgggtgagaacatgtgaaccaggcaccctggtttgtttggagcattgctgcccagaagcttctatgggataggtggtgcttgggattgatgtgttgtggccatgcagccctccctgaggattgacttctgcactaatccagtgaaggaggctgtgtcaaaagaagggctcagaagccctcttttcagaggcaatgattcctgtcagtatgaggtcccttagttactaaaaagggacatgatttaactccagtttgatgaacctcctccgagtttactttattgtcttcaaatcttttgttttcttcctttttgtgagatttgtgggttttgtgccttataaatggaaatgtatgaacacaaaaaaaaaaaaaaaa

SEQ ID NO: 237106 - DNA, 746 bp, Homo Sapiens
tacgagaagtgagccgggcttacgctactattacgacaagaacatcatccacaagacgtcggggaagcgctacgtgtaccgcttcgtgtgcgacctccagaacttgctggggttcacgcccgaggaactgcacgccatcctgggcgtccagcccgacacggaggactgaggtcgccgggaccaccctgagccggccccaggctcgtggactgagtgggaagcccatcctgaccagctgctccgaggacccaggaaaggcaggattgaaaatgtccaggaaagtggccaagaagcagtggccttattgcatcccaaaccacgcctcttgaccaggctgcctcccttgtggcagcaacggcacagctaattctactcacagtgcttttaagtgaaaatggtcgagaaagaggcaccgggaagccgtcctggcgcctggcagtccgtgggacgggatggttctggctgtttgagattctcaaaggagcgagcatgtcgtggacacacacagactatttttagattttcttttgccttttgcaaccaggaacagcaaatgcaaaaactctttgagagggtaggagggtgggaaggaaacaaccatgtcatttcagaagttagtttgtatatattataataatcttataattgttctcagaatcccttaacagttgtatttaacagaaattgtatattgtaatttaaaataattatataactgtatttgaaataagaaaaaaaaaaaaaaa

SEQ ID NO: 237107 - DNA, 703 bp, Homo Sapiens
  misc_feature (40)..(40): n is a, c, g, or t
tcctgaccttgtggccgcccacctcagcctcccaaagtgntgggattacaggcgtgagccaccgcacccggccttcattcactttctttaaatgcctccaagttgattattctcctagctcatatctccttgatgtgcatgagggagcactgggtctaatttttgggggctgagaaggtaagaaggtgaggtcagtttttcccaggagtcctaaaaaattctggtaccttacattgagggtgtgggagaaagggtgtcatagttctgaaaataggcagtagcatgaagcaccagacctgtctcattccttattagatgtctatctcaaatgacagagtttgaaaaatattggttttatcatttgatatttccatgcctgactcgggaaaataacattttctgacttttttctattttcttgccctgcacagaccctacctggtacaattttctatttcttagctcaaagtgtctatacaatgggttgcctggtatgtcagctgccctcactcttgtgtaatagaaatatattgccaggctggggacgtggaggagacgaactggattcctccctcctcctgttgccaggcctctctgcattggcactttatcctttcagtgtttctggctgtgttgggttcatttgtgagactgatgtaataataaagtgaaatcttcccctctgaaaaaaaaaaaaaaaaaa

SEQ ID NO: 237108 - DNA, 647 bp, Homo Sapiens
gcagggagccagggtgagggcagagtgtggtgacagccgaacttggagtaatgtccgtgtagaaaaaggaccatgttcttatccagccaatactgggagtgctgtctccacaatttcagggcatctgaatgtttgatgtggttttgtgtgtgtgtatgtatgtgtttaatattgaagtggatcatgagatgtaaagaaaacaataatggcaatgacttatattcaaatctgtatttgtttctttatcaatgtaatctgctgaggaccttttgtctaagattcagtagtgttttaaggttctgatatcgaattaatgaagtaaagttgttgatggtggtgaaacaccgtagggcatgtggttcaaagagaagcaggagggcaagggaaagttaccctgatcttagtttgtagcttatgacttatttaatgaatggatgcccagccaagctcagagtaggcgcccaaagcattgtggattattttcctgttttgtctttttttttttttttttttaagccatgacatcccagaagaggacagtgaattactcctaggtcggctcttatagagtggccatagtgttctgtcaaaacacttgcttccattttcagagataaaaatcattgattacaaaaaaaaaaaaaaaa

SEQ ID NO: 237109 - DNA, 780 bp, Homo Sapiens
cagctgcatctgtgccctcacggccgagtgttcctgtgtgcctcctgctcctgctgtgtgtcgggcttattattgtgaccatcctgctgctccagagtgcctttccaggtttcctttagcttccctgcttcctgggaatcaggagcctggacactgccatctctagagcagagtggaggcctggactccctttgctcactccattcgggtccacagctgaggttgcctctgacaagatgaatgggcactgcctgcccttctagtgaaaaggcttggctatggccctgtgtgactccaggtcccaggaaccttgccttcgtcatctgtggatccatccagaacagcggtatctgaagcccaggccatactccctgcctcctttcttctgcctaccagaggctccagagttgagcttgtccttatctagaaacatgtgaagatgcccaagagcctggaggcactgctgtccttcctgcagaaacagtttctcctcctcccctcagccttgtggccagttcctcttcacatgaagcccctggcatttgctggggaagggactggcctggtacttgctgttagggcaggaaggggcaaaaggaagacttgggtagtaatctgggggttcagatgggtagcactaagccagctggcctaaagatgcaataagttcctaggtagtctacccttaccttgaggaatgggaaaatgaacctcagcccattaggcaggaaaagttgatatttaataaacaaggaaagagtgaaaaaaaaaaaaaaaaaa

SEQ ID NO: 237110 - DNA, 693 bp, Homo Sapiens
  misc_feature (66)..(66): n is a, c, g, or t
ctcacacagatgcttgaggctaatggcccccattctgaggtcatttttgtgtagaaaccctttccncaggagagagccttatctctgccctcctttaccctgaaggcttcaaacggaagacaggacctagatctaaacctagatactagcattttgtgggattgtctagaatttggggaagatttgggttcctaagatgcacaagcgttttacaccagtggtgattaactcaactaaaacccactgtaggaagttagcttccccagacagctaatgccgagatcttctaccagcgtagagttgacagaagcaggccagcgaggaggtgtgggacataatagcctgagtgcttgggttaccatggagactggagtgtgtgaggccacagcctgtgctaaagagccatggagccctcccctggccatgtctggggacagatagaacctgttgggggaaatattccctcaccccagggttctttctgcagagcaagggttgcctttgtcctatccctgagcttgctcaacaagagaaacaaggtttcttaagtgttttggttaaagttttcattcttatttgactatgtatatgtaattgtaaagaaacgatcctatgcattgtctttcttttatattcttgtaatattctgaaattaaaattgttttgtttcatatccaaaaaaaaaaaaaaaaa

SEQ ID NO: 237111 - DNA, 618 bp, Homo Sapiens
aaagagagctgtacccagagagtcctgtgctgaatgtggactcaatccctagggctggcagaaagggaacagaaaggtttttgagtacggctatagcctggactttcctgttgtctacaccaatgcccaactgcctgccttagggtagtgctaagaggatctcctgtccatcagccaggacagtcagctctctcctttcagggccaatccccagcccttttgttgagccaggcctctctcacctctcctactcacttaaagcccgcctgacagaaaccacggccacatttggttctaagaaaccctctgtcattcgctcccacattctgatgagcaaccgcttccctatttatttatttatttgtttgtttgttttattcattggtctaatttattcaaagggggcaagaagtagcagtgtctgtaaaagagcctagtttttaatagctatggaatcaattcaatttggactggtgtgctctctttaaatcaagtcctttaattaagactgaaaatatataagctcagattatttaaatgggaatatttataaatgagcaaatatcatactgttcaatggttctgaaataaacttcactgaagaaaaaaaaaaaaaaa

SEQ ID NO: 237112 - DNA, 480 bp, Homo Sapiens
caccctctctgggcttccagagtctgtggcaacacagaggaaagtgaggtgcttgctcagagactcgccagctgtgactggccaggggtttgatcccagtcatttctgctctgtggtgggggacttgtcgggaggggcaggtagaggtgagctcagtagaaccaagagcccccaggacacagggcatccaggaggcctgtgcttccacagcctgttcactccttcatgcacccgcctccccctcctcactgcactcctgcccacactgcccactccccaaccccctcctctctctagggctgaaagcaagaggctcacatgggggctggcccgatgattggcagagtcgataaaggccacttggaaaccctcctgctccaggtggttccccgctggcatttgtagctgggattccgaggccagagctgaacccagagatcatttatcacacagcctcaaatggaggcttttctggaaaaa

SEQ ID NO: 237113 - DNA, 937 bp, Homo Sapiens
  misc_feature (922)..(922): n is a, c, g, or t
accaaaacctcttgaattaacagtttcatgctgtgaatttctagtgggagatcttttccttgatattgacgacacaatttyccatgtacttttaaagcagggagtggggaaaagtwttttgagggkacattttcatcatcagttcagcttttttttttggttgttgctcttttttgggggggttgggtttgttggtttcactgaaacatttaactacctgtaaaatctaaacatggctgttagtgtcacaccaattcgggacacaaaatggctaacactggaagtatgtagagagttccagaggggcacttgctcacggccagacacggaatgtaaatttgcacatccttcgaaaagctgccaagttgaaaatggacgagtaatcgcctgctttgattcattgaaaacagttgatggtgcactcgtagctgcaaaatgaaggacattaaatttggctgtgacattgagtggttacacagaagacctgcttctacaacatttggaaacattgtgaaacattactattcagttgctatttttccatctcaaaatatttttttttagttgctgctcacttatggccacagaacagtccctttttgagtaaagcagcaaggttgcttaattacatgctatgtggttaacaagattcwactgccacwtcaaggactttaaataatttcaagattttaaatgtatttatgaaatgaactcattacagcagctaatcaatgcaaactttgtcctttttctttgtctttctaagagaaactgaatttaatttaaatttaaattacagtgtctaaaacttggtaaaatattttaaatttgaataagaggaaaaaaaaaacatgaatttatttatgatggagcttcatacccaggacagtagcttcttaaattttagtaaaataattataandwtttttwaaacaat

SEQ ID NO: 237114 - DNA, 1000 bp, Homo Sapiens
atacagaagtaaaggkagatctrgtctgaatgrggaattaagaccacctgacttaaaacctctttgttatgctatgtgtaatgcccttctacatttwacccttgcataaaagcatacagattaccagaggtaagcacagatgtattttttgttgggagatgggtgtcctgcatgaagtttgtgtcattttcaactaccaagaatattttgcagttttgtcaatgctagtgacaractttagttacataatagagtttttattaagttattattaactttttccctccttttctctcttctcccaccctaccctatttggagcttaataaatataaaccatttttattgtggatgatactagagactagccataaataaccttgataagaatttggctacttttaccgttactgaagtaactgtcattaattacaattgttattgtcaccaatatagtttctttgactagactttttgcatatttacagtactgtgtgtttgggtctgttttacagtgatattattgttcttgtgagtgatacagcaagagggtgggaamacttacatttccttgtgtcaaaatgtaatgatctaattcttatggaggtctacttgttggaagagtaattgcctactctttgtgtgcagaggtgcattttaggacaaagggaactttcttgagtcctttaaatcactgggtgatatggataaataaaatatcaacaaatatttggtatagaaacttgattgctgtcttcttatttggcaaataagactgtttcaaaatgaaccaaaacaaagccaggtaccttctacttacaaattatttcatgaggtaaaaaacattttaatgccgagaaaaaaaaaggacatgatctcataataaagagaaactctaatagaataaaataaacctatcctataccgcgttgttmtctttcatattttttcctgaggattgttgaaaactttgtctaaaggacatatgggaattacsatg

SEQ ID NO: 237115 - DNA, 1000 bp, Homo Sapiens
ggaawtgtttagagttcwggmctatargatgaccatgccaaaatactatrgctcttactagtcacccctattkgttggtcccaccaacaaaggcactgcagttacattcaccacatttgtaacggagccattgaagcatattggaaaaggaactggggaatttattaaagcactcatgaaggaaattccagcgctgcttcatcttccagtgctgataattatggcattagccatcctgagtttctgctatggtgctggaaaatcagttcatgtgctgagacatataggcggtcctgagagcgaacctcccccaggcacttcggccacgggatagaagacggcaggaggaaattgattatagacctgatggtggagcaggtgatgccgatttccattataggggccaaatgggccccactgagcaaggcccttatgccaaaacgtatgagggtagaagagagattttgagagagagagatgttgacttgagatttcagactggcaacaagagccctgaagtgctccgggcatttgatgtaccagacgcagaggcacgagagcatcccacggtggtacccagtcataaatcacctgttttggatacaaagcccaaggagacaggtggaatcctgggggaaggcacaccgaaagaaagcagtactgaaagcagccagtcggccaagcctgtctctggccaagacacatcagggaatacagaaggttcacccgcagcggaaaaggcccagctcaagtctgaagccgcaggcagcccagaccaaggcagcacatacagccccscaagaggtgtggctggaccacgtggacaggatccggtcagcagcccctgtggctagaggaacaccagcacaaacgacagcctcaagtctccttcgagctttatatccatttggggatgaagtctactttgacagctagcaaggcgacatgcaactgttgttgaatgatgacagcaattcaggaaagacttaaatatgaaagc

SEQ ID NO: 237116 - DNA, 1000 bp, Homo Sapiens
  misc_feature (992)..(992): n is a, c, g, or t
ggagcgcccccgaagccagascaagagccagagcaggtcataaaaaamytacacggaagagctgaaagtscccccagatgaggactgcatcatctgcatggagaagstgtccgcagcatctggatacagcgatgtgactgacagcaaggcaatcgggtccctggctgtgggccmcctcaccaagtgcagccatgccttccacctgctgtgcctcctggccatgtactgcaacggcaataaggatggaagtctgcagtgtccctcctgcaaaaccatctatggagagaagacgggacccagccccagggaaagatggaggtattacggttccagatgtcgctccccggccacgaggactgcgggaccatcctcatagtttacagcattccccatggcatccagggccctgagcaccccaatcccggaaagccgttcactgccagagggtttccccgccagtgctaccttccagacaacgcccagggccgcaaggtcctagagctcctgaaggtggcctggaagaggcggctcatcttcacagtgggcacgtccagcaccacgggtgagacggacaccgtggtatggaacgagatccaccacaagacagagatggaccgcaacattacgggccacggctatcccgaccccaactacctgcagaacgtgctggctgagctggctgcccagggggtgaccgaggactgcctggagcagcagtgacctcgcaccccagcacgcccgcctctggtggccaccccgctgccccatggctggctgggtggccaggcaggaagtgcccagcccgagaggctgggaggtttgttgagggtgtggggtgtgccccacctgaagccggggctccccctgcctgcctctctctcctcctcccctctgggaattgggcagccctgggcagttgtactcatgggggcttaagatgcagctacctcagtgcgcagggcccgtctgtcctctgggggctgcttcgggcncgcggtgc

SEQ ID NO: 237117 - DNA, 472 bp, Homo Sapiens
ttaaccatcacagtgcttcatatattgaatgagatcatgtccaagtcagtgtactttaggggtgttttgagcagggcagaaagaagctaatgctaccaccaaagagagctctgctttgttactggactgccatccactagaatttatgattaaacccattcctacctgctgtttactaggggagaggctgttgtttatttttggcagagcaaacgaacacagtgaggactactgggagactcacttgaagacaggcggattgcatctaagaggtggtgttgcccacactgcaaattgtgcttgtgtctgtctaaacagcaatgaaaactggccaggttcatagtaccctttcaaagtggagttctctaaggaaacattagcttcagttgataactctcaaagaaactaggacagttcccaggctgctctgtatttgtgtagataaacaacaggcattaatagttccatactg

SEQ ID NO: 237118 - DNA, 481 bp, Homo Sapiens
gaggacctgggtcagttgtgtgttgcgaagttacttgagaccagttcctttcctgagcacctaggtttttgtttgggggtgagggaggtggtggttatttttggatggtgactggaggcaagactgagactgagccttgctaaggtggctgcacagagaggaagacaagaagacagcagtggtgtcatgagaaggtctggtctcttggatcttagcaaactcagaagtgttttgtagcaaggctgcttggtataagtccaagaatggtggctacctggaggaatgggatagggtgtgttcttttcaaaggtattcagaagtcaaaattattttagatctgtgcttggtctcacaagacatggtgaattaggcccaactacttccatttagagccctgccttagactccctaaaggccctgcagctctgatctttcatgatttggtagtaatttaaaactcaaaccaaaagctacacaccta

SEQ ID NO: 237119 - DNA, 731 bp, Homo Sapiens
gccccgcggcgcccaaaaaggaaatggttctaggaaaggcttcttggaggggccggaggccgggccgaacaagggttttttttattttggggttgttttgtttccccttttttttttttttgaagggttggaagattctttaatgagagacatatgcagcaagttaaagcttgtaagcttacttcatctcagtaatgcagaaaactccttaaactgttgattttcttttggagggcactctgaactatgcaaaatatcatctgattcctcaaggaaaactaggaaacaatgaagaaaaagtaccttcaaactttatgaatgtctcggccaccccctgctgcatccatcaaataccagattgaattagtgagattcaaataccagagattttatggtaatgggatatttagaaatcattccccgaggttccgcctatgttggagtgagcctgtgtgctcacagtgatagaatttggggctagatcccagtgttggttcaattattaggctaggtgatcttccacagcttattttaaattgcagttttccaagatttataagactgcatttttggactttctctaatgcactcaagcaaaaaaaaaaaaaatcatttgcctgtacactgatgactatacctggtaaggctatataaatgtgtacaaatttgtaccaatactttaactttattggttcacttgcaggtttcatagtcacttgaccgtcattccc

SEQ ID NO: 237120 - DNA, 522 bp, Homo Sapiens
  misc_feature (1)..(1): n is a, c, g, or t
  misc_feature (12)..(12): n is a, c, g, or t
  misc_feature (35)..(35): n is a, c, g, or t
  misc_feature (93)..(93): n is a, c, g, or t
nttttttttttnttttttttttttttttttttttntttttttttttttttttttttttttttttttttttttttttttttttttttttttttnttttataaaaaacaattgttatttgtgtacttttaaaacctcacagtaatattttcacactaccttcttggctgaaagttcacactcggaattccagagcagtccatggccaggcccactgggctccccttgctctctccttggctttggtaaccactggccccagggactcagcctgctttcctatccatcccctcagtagctgtcaccatgcaggttaccccttctgtttcttctaccactaactccatgtctgactgcaagtgaaaggaacagaagcccaaacctttgggttttaaggagtttattgctaatctgtaaaacagaaagagacaggagataagcatgacaaaatatagggaagaaatgacttttgcctaaacttccaaactgtgtacaattgaagcctctgctttatagctcttagca

SEQ ID NO: 237121 - DNA, 605 bp, Homo Sapiens
  misc_feature (1)..(1): n is a, c, g, or t
  misc_feature (3)..(4): n is a, c, g, or t
  misc_feature (6)..(6): n is a, c, g, or t
  misc_feature (9)..(9): n is a, c, g, or t
ntnntnttncccatctttgaagtcctttattcccagcagttcacatcagttactcattgagctggggttcgtcatattaaccaagaattcattcatctttcttttgatattgtaatcttgtcctcatctccacaactgagttggggcctgaggggtttaagagttctcactccatcacaggaggcaaggggtacccttgtgaaccagacttcaactcctggaagtcttgttcagttcataggcaaatatctttgcaagtttagtatgagacagcccaacggttaaataaataagacacagtgccatggttctaggcatttggagagggaaaaggcacattacacagattcccctggagaaaatacaggccattctcatcttctcaacatgcattttcccactcttcagtgacttttaatcttatcccctggtctatgagaaaccataacccacgtgctactgaatacatttttattttcccttcatgacatagacttggttccaagtatattttattttcctcccttatgcctataagacatccaattttgttcaggtcccttttaatggcacggaataaatatacattctgagacctggtccgg

SEQ ID NO: 237122 - DNA, 563 bp, Homo Sapiens
  misc_feature (1)..(1): n is a, c, g, or t
nttttttttacaaccaacaatatttaatatttccacattgaagaatagatgtgataattaaatcttttataaggttttaaaaagacatgaaacataaacctaattatacataaaagaaaagaattttaaacaagagcttattgtgatgacattactcataacttttacctttaaaaccttttcttgggtagctattcaaaagtaaagaccacaagttttgttgcccagatttcttatgttttgtatatttaagctctttatttattgaacagatgtgtcattaattcatttggagcattactattatcagtaaaatttgatttttttttcccctcagtcataggtaaatcagctccacctggaatttctaaggacccagttttagtcaatattttcaagtaatcatgacctcagaaatagtcttaattaagataacaaatattagccatcaaaatggaaccaagacaagattctaatgtttgtaaacagtcaatccatatttatgaatattagcatatattggtgaatagttaaggcaaaaggttctagcagatgtaatctcc

SEQ ID NO: 237123 - DNA, 715 bp, Homo Sapiens
  misc_feature (1)..(1): n is a, c, g, or t
  misc_feature (28)..(28): n is a, c, g, or t
ntttcaaaaatcctcttttaataatacnatgtagcccaacattgctgcaatcagtataaaaacaaagttattcctgattttgtataaatgaacacgtcgagagtcaggattataaagcatcaagatacaagtaccaagtgggaggaccaaagacaactcacagtgaagagaaacgcttgagaacaagaaatgtcagagttgtaggacgtggtaacaacccagggtgctgaaacggtcagaggtgcaggtgcagacgcaggcttctgcctctgcaagggcaagggggccgttggtggctggctgcaaaggaccagtgccaggcagcggggcagagagcaccaggggtctcgactctgcagattgggctttgcagaggattcctgtttcccacctccccacccctctgacagagactgaggagaccacacacgttgacctcctcttcatagccagccatcatttccactccaacattctgctgcgggtgtcattctggaaaataattccttgctgttccttgctcctttcagatcacagcttgcctggtcagaccccttcccaacatgcacagtctgagtccaggaggccctcgaaagtcaggcacaacacccagatctggtcctcttgggtggcttatgactggatatatccactgtgtgtgacggcctctcagctctctgctgtaagatcattggcaccaccaggtcaaagagcc

SEQ ID NO: 237124 - DNA, 656 bp, Homo Sapiens
  misc_feature (1)..(1): n is a, c, g, or t
nttgcccatcccaaaacaggtcttttttatttaacataaggccaaagaagctatcaggcgttgctgaatactgtccactaactgtacaaaatattgactgcatgcctcgcaaacaccaaaatatccgctggaatgccatagaaataaataacttctgctataaacacatgaaaacatatcaaactgttatctctttaaacatattgtaaataaaaaaattaccagtacttctacacaataaatattaagaaaccattgacatagttgaaatgcactcatataaattaacaactttaattacattagccaaacagacattggttaaagaactgcatgtagtatgcaaaacaaaacaaaacaaaacaaaaaacaaagtaaaaaaccaacaaaatagaaacaaacaaacaaacaacatcaaccacagaacataaaaagttttaaaataaaacaggcttcagattatcttggctttcataattatatttttcttttaaagaaaaatatcaacccattgtcaatgcactgtttttcaaagcatttaaatagagggtaaaaccctttggaaattaatacagaagaaatgattcactttatgcataaaaaataaataataatatagctgagacatgtggtttgcttctgctcttgaagatgcc

SEQ ID NO: 237125 - DNA, 390 bp, Homo Sapiens
aagaagcaagcactggcctggccttgaaagaacggaagtctttcccattcacttctctagaatgctgccaagacagaggcagaaagaaatggatgataattctgtcaagcacacttctattctttattaagagaagcaattatgtttggaattcagcatctttggttggaacgcattggcttttttttcttgttgtgatagaaatggaattaagtaaaattatagtttgtcttttctgttgtcttcaaattttataatgtcttttatttttaatttaatcccattcaattatttaattgttatacattgacattaactgctgtattttatgactttgttcaataattttgttctttcagggctagaaataaacttttttaagaaatgtgc

SEQ ID NO: 237126 - DNA, 481 bp, Homo Sapiens
gtaaaacaaaattttacaaaaatcttacaaagattctttagataacagggtgcttccaaaaaaaaaaaaaaaagaaatttcactaatagaaatttttttttaatttcaagcaaaaagtttctgcttgattgaggctcagttatcacctgaacagaatgtacttctttatgtacgtgctaattatgaaaatcacaggcattgacaggtacggtacccagccccacccaggcaaacagctccgacatgtttcgtaagtgagacaagccagtgcaagtttttttttttcctttttttttttttgtcttttgcttaccttcttgcttaatggaattgttatggctaagcacatagaaggccaaaaaaggagttttccaaacccagcaaatcaagtgcttggattctgaactgccaaaagaaaactgcacttcccctcttaagtaaaacgaaatgagtttcttaggtaaatgtattcatcagccca

SEQ ID NO: 237127 - DNA, 609 bp, Homo Sapiens
aagggtttcgccggtgtgcccggccccctgggtgagaccgcatcaaaggcatggaggggagccaggagagctgggagaaccgtggcttccgggtgaggtcggcatgcgggggccccaaggaccacctggactccccggacctcctggacgtgtcggagctcctgtaagtgaaggcacttgtctgggctagggttctaccccttctccaggaatcaaaaaccaggttctagcaagttcctccacctgcatctagacagtaatgctgttttgccttactgatgccaatgaagtgttggtatctcctttcttagaccagaaattatcagatgttacagtccataagaatcacccagagaacaagtttaaatgcatattcctgggacccctttctcacatcaagaagcagggtagatcccaggaatctgcatttttaaccagcaccacaggatttttgacacttgatctaaagaattcattttccccagcctgtcctgtactgtactcttgtaagaagggtggagtctactgaattcttagcccctggaacagtgccagactgtccagtatggtgttcagtatgtccagtgaataaagaggtgaacaaacaga

SEQ ID NO: 237128 - DNA, 373 bp, Homo Sapiens
taaataaacccaaacatctatggtgaactgattattgacaagggggccaagatcattcaataaggaaagaacagtctcttcagtgaatgttcctggagcaactggataaccacatgcaaaagaacaaagttggaaaaaaaaaaaaaaagaacaaagttggaccctgcgatggttaacttcatgtgtcatcttgggtaggccacattacccagatatttggtaaaataccagtctgaatgttgctgtgaaggtatttttttttctttttataatgataaactggcaatttataattgcgcagatttatagcatgcaaagttgtgttataatctatgaatgcagtgtggaataattaaatcaagctggttaacat

SEQ ID NO: 237129 - DNA, 612 bp, Homo Sapiens
  misc_feature (44)..(44): n is a, c, g, or t
  misc_feature (117)..(117): n is a, c, g, or t
ccaggcaggccagggagctgaagctctaagcctacctgtgactngtctcttttcctttacagaaaaagggatcatagtattatattatttgtctgaacccttgaattgagattttanacataatcttttgctttgttaattctgaaataaaaagaaacaccttttctaaaatgtcttctaggtaattttgattggagggaggtcagagaaaagatgatttatgataaggactgatgtgaacatggcttagatgtttttacaaacataccaaagttcttgtgctttcttttctttaaagaaaagttgggctgagcgtggtgggtcactcctgtaatcctagcactttgggaggttgaggtgggcagattgcttgagctcaggagttcagcagcctgggcaacatggagaaactctgtctttacaaaaaatattatacaaaaataagccgggcatggtggcgcacgcctgtggtccaagctacttgggtggctgaagcaggaggatcacttaaccgcaggaggtccaggctgcagtgagctgtgactgtgccaccgcactccagcctgggcaacagagtgagaccctgtctcaagaaaaaaaaaaaaaaaaaaa

SEQ ID NO: 237130 - DNA, 523 bp, Homo Sapiens
  misc_feature (15)..(15): n is a, c, g, or t
gggggcatttgccanatctggtttcctttcctcagcatcagagagcattgaggaacctgaggaaataataaggtctttctttctgggatgatgaatctgatacgttcttcctcttcaccttaaagctgagactcagctaaactggaaaccaccaccaatcccaccatccttcaagattgcagggaaagttgattttctgcatgcttcttagtttttaatgtgcatcagaatcacatggaggtcttgttaaaacaaagattgctgggcaacatccccagagtgtaagattcagtaggtctggggtgagacttttaaaatttgtacctctaataagtttccagatgatagtgattttgctggtcgggaaccacactgcaaaaattatttgtatagctaaaaccttgtcggagtgaatatgggggcaagatcactgctgagaattttaagcaaccagctgacccttgtataatttgcagtgcgaatttaacgctgtgtaggtgatctaaaaaaaaaaaaaaagaaa

SEQ ID NO: 237131 - DNA, 485 bp, Homo Sapiens
tcagttactaattataaaccatccagatttcagagctgtgagtactgggtgaagcattgaaggtatgcttttgaagccattacatatggcagttactgagctgaaaggattaaatgctgcagcttccccagttgcccttcctccatgagagcagtgcctgcccccagcattctgtggcacttggaagacaagacagaggccaaatgcagatttttaccctgggcttccctctacagtgtggaactcaggttgtttcttctttcctccctgaaatgacatgagtttgcagcggatggtgaactgaagaaaccataggaggctctgtcttcttgcctgaatttcagttggaagcttggagatttggggttcaacagagataaggaagtgtaagccttcatcccgtctggtggttggcgatcacacaccgctctgtgctgaggctaatggccatgatcagagttgacctaaaaaaaaaaaaaaaaaaa

SEQ ID NO: 237132 - DNA, 664 bp, Homo Sapiens
  misc_feature (70)..(70): n is a, c, g, or t
caggcacctgccaccacgcccggctagtttttttgtatttttattagagatggggtttcactgtgttagncaggatgttctcaatctcctaacctcgtgatccgaccacctcggcctccgaaagtgctgggattacaggcatgagccaccgtgcccggcctagattcatttctttaagaacattatttttaaaaaggatgtaataagtttgtagacataaaattgaatgtgatatcactcatatttccttttctggtttttaggaaaagaaacagcacactcaaatagtttaagcctatagagatttattaggggttaaagataacttaaaatttgatggaaaggtgaaggcagattttcaactgaacttcaggaatggctctcagaaccaaactgcaaagaaccaaactgcaaactagctccctaagggtgaaactcggaaatttgaaaacaccgaatcaggtaagtatcaccccagctgccctttttgaactctcgtgcatgttggctgttgtgttggtatacacagggcaaggagacattcccagagttgagagaggccaaaacactgagacccacctgcctaagaatcaatgactgaacttgccaagatgccgcagttccttcaagaagacacagatgctgcatccccaatggagcttac

SEQ ID NO: 237133 - DNA, 550 bp, Homo Sapiens
gagatcatgccactctaaatggagcactgcaatttgccaccaaacagctaagccgaacattgagtagagccactcccatacctgaatacctaaaacagatccctaattcatgtgtttctgggtgttgctgtggctggctgactaaaacagttaaggaaacaactcgtactgaacccatcaacactacttattcttacactgacttccaaaaggcagttaacaaactcctaactgcatcactgtaaagatctaccatttgctctgatatctctgatgttgctaattgagaaagtggtacaaagttagtcattacacagcccactaatgccttctcagtcaaactctcttatgccctggcaagccaatgaggataccctttgacaaaccctgtggataaaatgataatatcaaggtcaggcatggtggctcacacctgtaatcccagcactttgggaggctgaggcgggtggatctgctgaagtcagaagtttgagaccagccttgccaacacagtgaaaccctgtctctactaaaaaaaaaaaaaaaaaaa

SEQ ID NO: 237134 - DNA, 692 bp, Homo Sapiens
  misc_feature (107)..(107): n is a, c, g, or t
  misc_feature (623)..(623): n is a, c, g, or t
aacatagggaggataagaagagtgttcttctggtaaagctaaaattctggaccactgaagctaaaagccctattgcaagtatgaaattaagtacttgagctataggncaaaccttgggcatttaaccatttactgtctggctttgcccttaaaatagggttgcaattaaaatgtgattggcttaggtaatcccaaaaactaacaaataacaaaggtgcataatttatttatctactttttaggtgctctgagttgaggcaaagtagagcggcaacattaagtgctatgctagtcacttagctgacgtaaccagcttggttaagcagcttatgaaaccatataaagaattcttttgaggatggaattctgtccacaaaataattttgtgagcccagatatcattaggatcacacagagttaaatatagaaaaatgaaaccatcattatattctttcgtgttttttcttttattataaacaaggggattattctttagttctcagaggtagggacaaaaccacatcaggttttcagaaggaaaaaacatttaaaaacccaccatcacatgagagaatcacttgaacccaggaggcagaggttgcagtgagctgagatcgcatcantgcactgcagtctgagtgacagagtgagactccatctcattaaaaaaaacgaaaaaaaaaaaaaaaaaa

SEQ ID NO: 237135 - DNA, 590 bp, Homo Sapiens
cgctgggaacgtccaaattttaatattaaaggaatcagatttgatctttgtttaactgaacagcaaatgaaagaagctcagaagtggaatcagccatggcttgaatttgatatgatgagggaatatgatacttcaaaaattgaagctgcaatatggaaggaaattgaagcgtcgaaaaggtcttgattctgagaatgaatttggttagttgcagaagatacattggctctaagaggatatattttgagaccaatttaatttcatttataagaacatagtaattaagtgaactaagcattcattgttttattaatactttttttctaaaataaaacttgtacaccagtttattactctaaaaagagaattacacatgccaaatggaccaatgtccatttgcttattggaggcaaagctacaatagaagtcagagcatcaccagaatggtctttaatgagcatggaacctgagcaaagggaataggtgggatgaattttttttttaattgtgaaacaattcataagcacaatatgatttacagaataataaacattcatgtacccactatcaggttaagaaatagaacattt

SEQ ID NO: 237136 - DNA, 514 bp, Homo Sapiens
cccgccaccacgcccagctaagtttttgtatttttagtagaggtggggtttcaccgtgttagccaggatggtctcaatctcctgacctcgtgatccacccgcctcagccccccaaagtgctgggattacaggcgtgagccaccgcacccggccagaatttctttaagtctagtagttggaaaaccagaactctatccaaatgatatagatatcttgactgttaagagttggagacgtttcagaagttctcacatactcctacggatcccagactgaagcaggaatttacaaaggaagtgagctactactggcttgatacaagctaagacagagacacaaaccgctgaagcctatcaatacttaagccagagacccacctacaaaaagaggattggtcatagcagatccttagggcacagagatgaaccccaaatccaggtggaacaatttaatgcaagatgatgaaactcaaaaatcaagaacaaaaatatagataaccctgtcaacccaatat

SEQ ID NO: 237137 - DNA, 531 bp, Homo Sapiens
ccccctagcaaccactggtgttttctgtccctcttgttcattgacatttattttaaaataaaatattttaaaatctactttttggtgtacagttctgagttttggcaaatgcagtcaagtcactaccaccaccacaattaacagctatatcaccctccagtaaattccctgtggtcagctccttccccaccttttaccgtggcaaccgtcaagctattctctgtccctataccaggtgtcatcaaatttttttctggaaaggcccatgcagtaaatagttcaagctttgtgggcttttatagtctctgttgctgctgctgaactcagctgttgtagcacgaaagcagccaggtaattactagatgaaggaatgcaggtggctgtgtttcaatagagctttatttctgcaaactgaaacttgagttttgtgtaattttcatgtgtcatgaaatactgttttctccaaccatttaataatgtaaatacttgctagcttatgtgccattaaaaaatgacttgatttggcttaca

SEQ ID NO: 237138 - DNA, 422 bp, Homo Sapiens
acttatgtagacaaaggactaattttcttaataaaaacatttatcagtaaatttaaatgggcaaaggaaatacttggacaatcatatcatgtatgtaatattaatatttataaatcaataaaatgggctagggatataaatcagcaattcaaggggagggtaaaaagaccaactaatatatgtaaagatgcacaaattcattcatgattaaatgtgaattaacaacgttggcctctcggattcccaaaactttaaaagattaataatatccagtattggttgggattataagcagatatgatatttcactgatagagaccagcatgactgtctcaattgttaaactattgaaatgcatctgtgtcaatggtaaatagtattattgtaagtacaacactaaaatttataaattgtgtaaattc

SEQ ID NO: 237139 - DNA, 622 bp, Homo Sapiens
  misc_feature (31)..(31): n is a, c, g, or t
ggctgctgtgttaagaatttgtcactcatancctgacaattccagatccagtgtgcagtaacacagccatccaaatccctccccttgaaaagttggcagagcaccgctcaggaatttcacaggtaagggaatatatttttagcaagttaagcacagagaaaggacagtacagtttctaagtaaatacagacccagatactgcatcacttactgcatcaagattgaaacaagcagcaggatactaagtctgtttggtaagaagcaaagccattgtttgacatcaatgctgaaccaattttgtgacttcagataactacaaactaaattaaattggtacatataacaattgatagcttgaaagacaatacatcagtgatttgaaattaatacgaaactgaaatgagcaagaaaggaccacttccgagagggttaccatgattcttacgctttagagttaaaagtgacagacatacaactggaaaattatctaaattttgagagattgttctaacaaaaataactagtactaggcaccaaactagagcctccgaaagattctgaaagctgaatggaccatgctaccaccatgccaaaagagtcatatcacttggcatttgtatcc

SEQ ID NO: 237140 - DNA, 794 bp, Homo Sapiens
  misc_feature (1)..(1): n is a, c, g, or t
  misc_feature (96)..(96): n is a, c, g, or t
ntttataatgatttccttaaagtttgagaggcatatttgtgacatcagtaccctttaaaacatactttattcccatcgatacatctgtcaaggttntggggaatcaacccacaaatgaagaactacacattttgaactggggtttttttttgtgattaaaaaaaaaaaagagcttctttttgctgcataaaataaatctaaaggactgaattatggtctacctgtacagccattatacatacatacattaaagtactggacaataacctgtcacctaagaagtataaccgaccgcatttatgaacaaacggggaaaacacattctctagttctaataaatcatatattatgtgtatgaaagctaggttaccaaaaacacatcaacacacacacctatttctgaaccaccaaaaagcctcagggaagctaaagaaaacacatattcttgaggcaggcaggacagttggcttccacttgatgaagacatgcttgactgagtgatcctgggcaagatgcatggaggaaaaaaatcaatgccaccacccattggcaaaagaatcacttttgtctaacctcctatcatcttgtaacctagagatggcctaaatctagactgaacttctgtctacagaaatagccctttaaataggcttttttaataaaagaggtcctaaactaggttcctctcctactactagataactatgttttaatttataaatatatgaatgggtacctcttttccaagccattcaatatctaccaaaattaagtagaattaaaggattacctct

SEQ ID NO: 237141 - DNA, 787 bp, Homo Sapiens
  misc_feature (11)..(11): n is a, c, g, or t
cttcccctacnaactaaccatattacctactatacagtaaaagcttaatgacatctctggctacatataattcatacccaatattataaaataaaatgttaggccagtaagctttcacaatttttattaaatcctagtctagttgaacaatatctgatgttacagacatcatcccatggtgaacatgtttaataagtgaaagcaagtcagacatctcatctaagtcattattttctgcagactaagcaataactacacagaacactatgggtaaacaaacacctgctcagttttcacacaagccatgttgtttatcaaattagatctgctaatattgaatacagtagattcggtgattgtagttctcatataagtatcttattgagataacattttgacagtttcactgactttccaaataagcataccataatcaaagaaaagaataaagagtgaagtaaaaactgaacatgaagagattaagttattaaaggaaaatgaagtaaataaaaagagtgaaaaaccattgggggtggaagtcaaacaagcctagacatttgattggaagagaaaagatcaaatatgaagttcacaaaccaaaagtttataaactcaatgcaatacaaatcctttttattgtaaaagctgagttgaaactaaaagatctataaaaactgttacttttggccttaaacagtaccaactcttatgatcaaaaaaggccacaacagttaagattgtattacttgattttattttacactaggtggtgggcagggattaccct

SEQ ID NO: 237142 - DNA, 813 bp, Homo Sapiens
  misc_feature (48)..(48): n is a, c, g, or t
  misc_feature (96)..(96): n is a, c, g, or t
  misc_feature (122)..(122): n is a, c, g, or t
ctgcgctggagaagttagagtacacattatgtatctgaggagatgttnaatgaaccaagttatgaagattcttcaagtacctgaggacttctgggnaaatacaagatagcattcttaggtcncatatgtctagaagacttttcataactgtaagcaacttttgcaaatggtttgggaacataaaactcttccagcatagaagaaaatgggtactattaacattcagatggttatgggaccatcataacagtttgatgtgatatgcaaaatgctgcatccccaactatgaccctcagtatgacttttaaaggaattataagctccaaatactttttggagtatgaacagtacttgactttttcacacatttgctaatacccttctcataagttttatttctttctgatgtttcagctaacactgagttaacagaagctaaataataataaaatgaagaacagatagtaaatatattgaaattgtcattcctggccgggtgtggtggcttacgcctataatcccagcactttgggaggccaaggcaggcagatcacgaggtcaggagatcgaggccatcctggccaacatggtgaaaccctgtctccactaaaaatacaaaaattagctgggtatggtgacgcatgcctataatcccagctactcgggagactgaggcataagaatcacttgaacccaggaggtcgcgccgctgcactccagcccggtgacagagcaagactccgtctcaaaaaaaaaaaaaaaaaagggattacctcttgtcgaccacccgacatagatgtcatctatgtcggg

SEQ ID NO: 237143 - DNA, 804 bp, Homo Sapiens
  misc_feature (1)..(1): n is a, c, g, or t
  misc_feature (53)..(53): n is a, c, g, or t
ntcgagtaacagatatgagaaactctgtcatgtcattccttgaactacctctnctactccttattaccccaccttagaccacccagactagtcaagtatcttctttctttttccagtatcccagttcacccaactgaacttttgctataccatgctttccacaaacaattttaacttgccaacaaagaattacaaaaaaggtcattctttaatgattacacatttttctactatcagtgagcaaatatagtgtcccttctgttacatgaactataataggatatccgggtaactagtaatttttctctcttccatgaatgtggcccctacaaaaacaaaacaacaaaacaaacaaacaaaaaacagctggaatgtgtagaacacgttgaactaaacggtcttatgccccgtatgctgccatatctggaggtgagggtaggaggaactttgcaattccattagccaaaattaatttttatttatttcttatatccacttacttatttagccaagccagcatctggttctgtgctattcccttaggataggaccaagacagatcaagccagaaggggcatcatattagttcataagactggtctgttatctctaatcagggttttctgggttactttcccaagctggagccaagttggggcaattttgatgagatatctctgtgcccatgccacccattttgctctcaactgctgagtaatctcatgaaaatgttgctgccaagagaagcatattttcaggattacctcttgtcgaccacctgacatagatgtcatctatgtcggg

SEQ ID NO: 237144 - DNA, 839 bp, Homo Sapiens
  misc_feature (21)..(21): n is a, c, g, or t
  misc_feature (55)..(55): n is a, c, g, or t
  misc_feature (61)..(61): n is a, c, g, or t
  misc_feature (86)..(86): n is a, c, g, or t
  misc_feature (97)..(97): n is a, c, g, or t
  misc_feature (106)..(107): n is a, c, g, or t
  misc_feature (118)..(118): n is a, c, g, or t
  misc_feature (121)..(121): n is a, c, g, or t
  misc_feature (136)..(136): n is a, c, g, or t
  misc_feature (174)..(174): n is a, c, g, or t
ccactgacatcaatatacagnaaggtccatccagactcaaagacagtctgatctnccacanggagattctgacgagtcctagagtnaaggaagcaangttataggnnaagtaagtatnaanaagaatggctactcngtagacaaagcagcccaagggctgctgattgcccattnttatggctatttcttgatgatatgctaaacgaggggtggattattcatgcctcccctttttagactatatatatagagtaacttcctgactttgccacagcacttgtaaactgtcatggggcttgtgggagtgtggcagtgagaacaaccagaggtcactctcgtggccatctttgttttggtgggttttagctggcttctttactgcaacctgttttaccagcaaggtctttatgacctgtatcttgtgctgaccaactatctcatccagtgagttagaatgccttaaccgtctgggaatgcagcccagtaggtctcagcctcattttacccagctcctattcaaaatggagttgctctggttcacacgcctcttgacaaaactactttttaagaggtttgaatctcaattaagctgaacagattaagaatgtttatttctgagttaggcaccaaaggaaggacagtaggctaaaaagagatcacaaagaagggcagtgacaccctgagggtccactcctcaagcacagggacaggccgattccaagaccaacctaaacactcaagagcaggcaggtaattattgaagcctgtgacaatcatgctttttaaattgttattttaataatctggattctgctcttgtttagctttgggattactct

SEQ ID NO: 237145 - DNA, 828 bp, Homo Sapiens
  misc_feature (68)..(68): n is a, c, g, or t
ggagccctctgaactgattagggcatcttcagctattgtactgtagcattactgtcagagcttataanagtttaaagccaccatgactagcatgaaggtatgcgtaagtccagatatgataaaaatcaaccagcatgtcattacttcaactctcatttaaataggcactgtgaaaacgggaatgctgctgtacaacgagtagtatataatgaaattagtgttctttaaggagtacctgctctacattaattccctttagttaaagatgcacatgaaatattcagaaaaaaattttatcagtctataaaaggagttagtgtttagaaatgaaaatgaagcacttgcatcttcatttttaaaaacttcacaaaggtgcaaacaacacaatgctttccaggctcacatgggcagatcagtactattgtgtctagttttcctagatgtaccatcatctcgtggcagtgctttctgcaaatttgacatagcagcagttctctcgatgtctatcacggcatacagctctgtgcgcctggtaggggtttgtggaaggggagttgtaggcgtttttggagtctgagggttgtcagagtcactgccaccttccaagtcaacctgtatgtaattaagctgcctgtgttctaaacttgggcgtctgatatcaaagttaaagactgttggtgtacagtcccgacgccttgaatattctattttgtgagcacttgctggcactgttacattctctgtatttacatagttatgcattggatctagattattatggtagccatttagagatggggtctttggtcctaaattgggattacctct

SEQ ID NO: 237146 - DNA, 804 bp, Homo Sapiens
  misc_feature (65)..(65): n is a, c, g, or t
  misc_feature (69)..(70): n is a, c, g, or t
  misc_feature (107)..(107): n is a, c, g, or t
ctggccatatacagcatattttcctaaaagtgtattagctacgtatatcatctaaaagtactgtnactnnaatcagaaacatatataaatagtggagatgagtaacnaacaaaaaaaaagtttttttactttatcaatcagcagtatgtcctttattccatacgtactacttgcccagtcttatattacttgtgatcttgaaatggaaaccatgtcctgttattgaacaagctcttctctattttttcatcagaaagccacaaatatagataaagcatttttttatttgccttggagcaatatattttgaattaagcccagcctcccatgtttcagtttaggtagctaagatacatgctggtgaaaagtaaaaaactaaattatttgtctttctgcctaccacataactattttaaataattttcttaggtgcttagttatcatggtcatgacatcataaagagtcccactttgtctttcctttaataataagcaacctctgtttatacgtatttgaaaaactgcctcatgtgatattgacagagctatagtattaaatacaaagatgaataaatggtgtgagtgaaaaatagtgtattcgactccaagctagctcaaaggcttacacgtccatttcaacattgggaacaattcactatagaatgtgaaaggaaaatgacagaccaatatacaaatttttgtaggaataattttgcatatataccacaagatcattatcacatattaaaaataaatacactgtttgttaggtaattctgaaattgtcatttctggattacctct

SEQ ID NO: 237147 - DNA, 840 bp, Homo Sapiens
  misc_feature (76)..(76): n is a, c, g, or t
  misc_feature (80)..(80): n is a, c, g, or t
gagtgtgagttcactcagtcttaaacatagtctacagacagcctgcgatgacagcagtatttaagagtgtgatgangtcnaataagttcatttagcatggaaaagcaccactgaagatgaaacaggaaatgagagcatctcccaaaataagtcgaaaatgtgctaatagacacaccaggcccaaaaaagaaaaatcgagttttcttttcaaaggagatggatccaagcctttagagccagccaagcaagccatgtctccttctgtggccgaatgtgccagagctgtgtttgcttccttcctctggcatgaaggcatagtacatgatgcaatggcttgttcttctttcctaaagtttcatcctgaactttccaaagaacatgctcctataaggagtagtttaaatagccaacaacctacagaggaaaaagaaaccaagttaaaaaatagacattcattagaaatatcatctgcactgaatatgtttaatattgcaccccatggaccagatatatctaagatgggtagcatcaacaaaaacaaggtattgtctatgcttaaggaaccacctctgcatgaaaaatgtgaggatgggaaaaccgagaccacttttgaaatgtccatgcataacacaatgaagtctaagtctcctcttcccttaactttacaacatttagtggctttttgggaagacatctctttggctactatcaaagctgcttcccagaatatgatttttccaagtcctggttcctgtgcagttcttaaaaagaaagagtgtgagaaagagaataagaagtccaaaaaggaaaaaaaaaaaaaaagggcggcggattacctct

SEQ ID NO: 237148 - DNA, 634 bp, Homo Sapiens
aaagcaaatatagtagatatgttaatgtgttggataaaataggttgtatgtccagctggcatttagttgccagaaatcctttcaaattttgctagtttatacgctgtaggtagaaagtatttttatcttatggtttctgtagcacttggtactcaacaaggatacttgtttccaaatatcagatcactttgagaatatattgtgacaggcagatgtccttgaggctttactactcctattcaggcctaaaagtttatagtggaattctttaaccactgatttcctcacttgacaaaggctacagagaatatgaagatttcttgtcaagtcttttgaaaagacctaagcataaatatgccactcatgagtgtagtaaagggtaccgcatttatgtcaaatgtgggtatttaatatgatttcagacaccactgattcaattaaaaggggttctcagttcaaatgtaaaaatgatcttttgtaaaatcagcatagaatgattttgagaaataggtaggggatagatgaggcttagaataagtcactccagtgaaattagggtagaaaatgttcatttaaggattatcacttccactacactgaggcctctgaaaatgttcacaaatttctcaaaagc

SEQ ID NO: 237149 - DNA, 651 bp, Homo Sapiens
  misc_feature (59)..(59): n is a, c, g, or t
ttttctcctgtatgattctctgatgctgaatgagaaataattgtgtactgaaggcttgnccacactccttacagtcataaggtttctctcccagaatgaattctctgatgctgaataaggtttgattgtctgttgaaggctttcccacattctttgcacttgtaaggtttctctccactatgaattctctgatgatgaattagattagagctatgactaaaggctttcccacactgattacactcatgatgtttctctcctgtatgaatttttagatgttgaacataagatgaatgtgtactaaaagctttcccacatttaatacactcatagggtttttctctagtgtgaattttacaatgctgaataaagtatgagtgaacactgaaagatttgccacaatcctcacatgtgtagagtttcttaccagtgtggattctctgatgtttactgaggatagagggccaactgaaagcttttccacattcattgtgctcataggtcttctctccactatgaaatctctggtgctggttaaaagctctgttctgattgtaagtttttccacacccagtactctcaaaccatctctctggattattcatcctctgattctcactaagaactgagctctgtctgggcactttcact

SEQ ID NO: 237150 - DNA, 630 bp, Homo Sapiens
cagtgacagtgcgcgtcttacaactaattccactaggcatgggaatgtcacctcctttgccactgtaccccatcaagcttactctgaatcaaaggttttgtaaaacttttgaaaatgaacttagctgcaaaatatagctaaccactttccattgcaagctttgcaaagtgaagagaggttcgtacttctcataattggtatttagcacaattgtaagatacagttttactgtttgtacatcgtttttttccattaaacttttctagagaagacaaaagcttacactggtgacatggataagtgagatggtgtctaacgagcagtgcaatattaggcggtgcaatagaggccctgttggcaagatgagttttgctggagagctggacagtgttggttagcttcctgcattgattgcccctgggcgttcttcccccttaactgtgaaagcagagtctataaatgaactctttgctcttacaaggtaatttacatattttctttctgttgaaataactgaaaatgttaaatctaccagtttatgtcttgtaaacagagtgtcatatgtatttaagttgtgtatttttataaagtaaagccaagtatccaacacccaaaaaaaaaaaaaaaaaa

SEQ ID NO: 237151 - DNA, 724 bp, Homo Sapiens
ttttaaaattgtctatttgagtaattatccagaatcatgactgacactaccattttcattaatactttagatcaaagtaattctcacttaattcttatagtaatttcacctgacacttggggactggtaattttagcattggtgtttctaaaaacatactgtgataagctgctccatcaccatgtatttggtttctttgtctataaaactaaagccagagaaatgaggtgcttgacaaagcattgaggtgtcaaggggcacatacagatttcaaattggaatcctggaacaaacatggtaggagaacagaagagggtcccatctgcatattcttactgcttagataaagcagctgtcgacttggctttcctttatcctgactttccagagttgttcaccaaacaggtaacaagattgagctttaagtctttatttcatattgattcttcataaattaaattatcttatgacttatggctccatgttgtaagtaaaaagtcatttgaccaactgtttggaattcttgtcaataacaattattgagcacccatgttagtgaatttctgtgtgtgtgcactgggtggcgagaaaaggttgagagcaaataccttgggtatactttgtaaggaaccatgatcagcttgtcatgcaaacatatgacaactgtgcaaacattttttacaagagacagtcttaacaaaaacaaaaaaaaaaaaaaaaaaaa

SEQ ID NO: 237152 - DNA, 478 bp, Homo Sapiens
agcagaatcaatatgtgcacagttctctttatcaggcaaaagcacgtttattgagacatgaaatgagaatcaggctgaaggaatcatgcagctgaaagatgattatattcatagaaatgaagagatgaaatattcaaagaagatggctactttattgtgagacttaccactttaacctcatatgttaacagcacctaccaaaaaatgatatgagatagagctaaaatactgaaattgcaaatggacaaaataaatcatgaaaatttgtttattatttcttcaataaatatttctaggtgctttgtgattctttcatttagtcattaaagccattgctttactatattgcgttgccactttaaaaacaagttacttgacattgtttttgacagatttcactatattcttatgtaattaattgattatttctaaaatgtttgaataaactttgtactccctctaaaaaaaaaaaaaaaaa

SEQ ID NO: 237153 - DNA, 602 bp, Homo Sapiens
  misc_feature (465)..(465): n is a, c, g, or t
tttgtgatctggcctgcagtattgccagcttctgctcttgtttctcatgtccttcccattttgtgccctagtcatactgaactgcctaggattgtgttgtcccacatcatagccattagtcacctagggctgttgagcactgaaatgggatttgttcaaattgagctgtgctgttgagtgtaaaatactgatgttgaagagttagtacagaaaaaggtaaaatctttttttttttaatggttacatactgaaatagtagtttgggtatattgggttgaatcaaatatattattaaaatgaattttacccatttctttttactttttaaatgtactgttggaaaatttaactttacatacggggctcacatttgaagctcacattgtatttgcgtggggcagcattgggctggagtatgctggagaagcatctgtttatcacccctctttgctttagtgtaagctnttcactgtgactggaaaggcccagaaccctgcccctcccgacacagcacatacacacattgacgttttgctactacagcatatagcctttgctgggaccctctccaaaaaaaaaaaaaaaaaaaacatgttggccgt

SEQ ID NO: 237154 - DNA, 706 bp, Homo Sapiens
  misc_feature (87)..(87): n is a, c, g, or t
  misc_feature (121)..(121): n is a, c, g, or t
tgaagttatgtccttgggcagtgtttgcagtagtatagtgccgctttggaaaacttagaagatgatcctcaactgtgtccactcaanatagattgtgcatctcaatgtcatagagtcaganatttctaccactatctgtttaaatcatcgtttatttatattccttaaatattcatacctttcacatgagtgagatacattatttttaaaaacgcagttttccttcttgattttttcatattgtcccattattctgagaagagtttattttatgagaattaagttattatcttacagaataaatctgattactgactagatacaagataaccacatatttttcctagaataatttaattccaattttacttatttgtaccttatatgacttattttcaggttagaaaaatgtggtcctacagttttgttttgaagtttgcctgggccatgtgaagccaccattatcatttacgtcaaaaatgaaggttatctgttgcccaagagaaaaatacagcattctcaatttaaaacactaaaatagtgagggtttcataagctgtttcagtgatttctgaccttgggttggaaagctctcatgtctcagttacctcagtgggtatagtgacattgtcccagtctgcattaccaaattgtttcaaatcactttaattaaaaaaaaaaaaaaaaacatgtcggccgtggccga

SEQ ID NO: 237155 - DNA, 584 bp, Homo Sapiens
  misc_feature (125)..(125): n is a, c, g, or t
gcttcctcacagccatcgcactcaaccgctacctgaaggtggtgcagccccaccacgtgctgagccgtgcttccgtgggggcagctgcccgggtggccgggggactctgggtgggcatcctggcnctcaacgggcacctgctcctgagcaccttctccggcccctccttgcctcagctacagggtgggcacgaagccctcggcctcgctccgctggcaccaggcactgtacctgctggagttcttcctgccactggcactcatcctctttgctattgtgagcattgggctcaccatccggaaccgtggtctgggcgggcaggcaggcccgcagagggccatgcgtgtgctggccatggtggtggccgtctacaccatctgcttcttgcccagcatcatctttggcatggcttccatggtggctttctggctgtccgcctgccgctccctggacctctgcacacagctcttccatggctccctggccttcacctacctcaacagtgtcctggaccccgtgctctactgcttctctagccccaacttcctccaccagagccgggccttgctgggcctcacgcgggg

SEQ ID NO: 237156 - DNA, 496 bp, Homo Sapiens
agacaatgatgactgggtgtggtggtgtgtgcctgtagttcaggctgctcaggagacagaggcaggagaaccacttgaggccagttcagtctagcctgggtaacatagcaagaccctgtccctaaaataataaaaaatttaaaaaccacaataatgtgagttacaaaaaagtgtaacttatgaaaagtcgtatttatattgacctttgtaagagctcaattatttcaggaagcaaggaatatcaccattctgagtaatacaatttcaactaatctttatttcttctacttgaagtcagtgcctatctaccacaaacattcctatatcagtgtgcaaattaatttggagacaataggctttttacgacaatgaattggttaacttttaaaagttgttttttatctcacattttataatacgataaataaatgtacagcagatctttaagaacattgtttaactataatgttgatggcacacccaaaaaaaaaaaaca

SEQ ID NO: 237157 - DNA, 631 bp, Homo Sapiens
aacccctcaaagtggcctgaagcaaaaccacaggcgccgttttctctttcgttcaaatgcagttcttttccaacattgcctgcaatgagctttggtgcagagatttggggacagggaggcacatggagaaaaaaaaaaaaaaaaaagaccaggcaattgcacaaagcctttccctggaaaacccaggctctggggatggtgggggtcaggacacatggctgccccccctccagccctggagctccggctttgatggtcgaggcacagatggggattcatcccattccccacatacgagagcagtctgggagcgggagatcggctgggtgtgtgtatatatgtatgtatgtgcatatagatagatctatttatatataataggctatattagaaaatcctctctatgtataaatataaaacactggtatccaaacatgacaccaacagctaactaaagtgcttgacaggagccgggcccgggtaagctcgatggtaaaccgctcatcctgggcgctggggaagcaaaacaatgggggaccccttcagcagggggtgctgcaggaggaaagtgtgtgctggccaagctgggccaccaagagcacttgggccatggccgaattcccgggtactg

SEQ ID NO: 237158 - DNA, 754 bp, Homo Sapiens
ctcagcctatcaccttcaatcaatccagatcacttgagaaagccattgtattagaaaaaattacatatattcaaaaaccaatgagaggcagatccctggtatatggtggatttgggcttttcagaaaaatttgcttcagtcaccaaccaaagaaattgttgccacgaataaacaaatgaagctataattctagttggagatttatttgaaaatggtaccacattaaatcccaggtacgaatccaagttttgagttctagaaggatcatggcatgcttatcctttttgttttcaccaaccctgagaggtagtctacattccaagattagaacataatgaagttagaagggctgcattctatgaggcagggagaattagacatggaattacagagcttttcattgcaatttccatgactgttatttatgtgaacttacacaaatctaaggatcactctgagccacagtttctttatcctattctgaaatctctttaaaggacttgagtccaagctctctcccacactgcaagaccccactgcaatggctcctatagctgctgccatggcctcctccaatcaagtcagccttactatcttaaaaaaagtaaataagggcagctaaacgccatggcaaatgtatacctatgtaacaaacctgcacgttctgcacatgtatcccagaacttaaagtaaaatttaaaaaaaagaaaaaataaataaataataacatctctttaaaaaaaaaaaaaaaaaa

SEQ ID NO: 237159 - DNA, 499 bp, Homo Sapiens
  misc_feature (309)..(309): n is a, c, g, or t
  misc_feature (481)..(481): n is a, c, g, or t
ttttttgagacggagtctcgctctgtcgcgcaggctggagtgcagtggcgccatcttggctcactgcaagctccgcctcccgcgttcacgccatggacaattctttaattcctgcttctgcctcttcccagctataagctttacttcaaatggccccactccacccagcatgggggcacttgacagcttgctttgtaccttttctttcaacgaattcctacagattttccctcttgtgttaatgtttttctaacaaaatggttgagaatgagccatatttttatagatttatctattttagtctggctntcatattcactaatcttgtcttaagcaagttacttactcagtttcttcaactgaaaaatggggaaataacctcgtaatacagcagtgagaattctgtgggtaggagctatgctttacagggaacttacaatctgtgcaggtgctgggcgaagagctttataaggatttgctncttggcatcttcagaaca

SEQ ID NO: 237160 - DNA, 657 bp, Homo Sapiens
  misc_feature (17)..(17): n is a, c, g, or t
  misc_feature (36)..(36): n is a, c, g, or t
  misc_feature (42)..(42): n is a, c, g, or t
  misc_feature (361)..(361): n is a, c, g, or t
tgggtgtctgatactcncagagtgaaactgtgaccntttccnttccctgctgccttgcagtgacccctctggccaggccagctccccaggtaccccctcagcctgccacatcttcgagggccactggcagctgaggaatcacaggactttggaaagggcatggatgaactgggatggattgaggcttaaggaagatgtgggaggagggagtggacccacaagcacggtcagttctccggcggctgcagcagggcctgtgtgggaaggcttagagatggtgagtcaggagaggtaaggaggggtggaaactatgaccatatccttaaaaagataaacaacatgcatgtggatggctttgccnccaactagctgtgatcccaacctgttagatgggaaaaggaggtgccttcttggccaagtgaaagaaaggcttgctgtctgctctaagcccagggaaccaatggggaaagaataagctaaatgtgttaacggattccaaattacttaaagcctttatgggaacacggtagattgtaggtaactagatagggttgccagatcagtttgatttgactttcagtataatttttcagtatatgttccaaaaattgcatgggatatgcttatactaaaaaaaaaaaaaaaaaaacatgtcgg

SEQ ID NO: 237161 - DNA, 612 bp, Homo Sapiens
attttaaaaactatgtttatatataatacctaacaagctgtaaatattgtatattattgatttttaattttatataagcaattttttatttcccaattcatgtacaaatctcattatgtatatagcataatttcctggagaacacaaattttgcagtgaattttaagtaattttaattgcagtaagcatcagtttagcctagagatgttgatctttattttaaattatttttcaccattctcattttcttcaaagggcagcaataaacatatgcaagttatttttaattatagaaagtaggtctacaaagataagatctaggttccaattcattgctttaaggaaaagatgcacaattactatcattcagtgtctaatcacaggaccatttctgaggtccacatgtggctctcctctttgtaatatacagggtgaactctttactgatacacacaagacaactgttaaaaagtgaatccagcacttaaatgtcattacacagaatttattggattaaaaatttgtaatatacagtattttaataaagtttctgtattcaaaaaaaaaaaaaacaaaacatgtcggccgggccgaattcccgggtactgcagg

SEQ ID NO: 237162 - DNA, 689 bp, Homo Sapiens
  misc_feature (22)..(22): n is a, c, g, or t
  misc_feature (43)..(43): n is a, c, g, or t
  misc_feature (50)..(50): n is a, c, g, or t
  misc_feature (87)..(87): n is a, c, g, or t
  misc_feature (102)..(102): n is a, c, g, or t
cccaaatgaaatgagtatagcnaacccttcaagcattaattgncattggngtcaattcagcattgacttgagtttgggttgacttancatggagttcaagcnttttattgacattcaagtgtttatgttaagaggatggggccaggtgtggtggctccgacctgtaatcccagcacgtcgggaggccaaggcacataggtcacttgaggtcaggagtttgaaaccagcatggccaacagatgtgagccacttttctcagcctgttttttgtttcttattttctattatttttttgagccagtactttttaaagagatagtacttttttcagttagtactttttgaaagggatatatcatagtaatttttaaaagggatatgaggccaggcacggaggctcatgcctgtaatcccagcactttgggaggccgaggcaggcagatcacggggtcaggagatcgagactttcctggctaacagggtgaatccctgtctctactaaaaatacaaaaaattagctgggcatggtggctggcgcctgtagtcccagctactccagatgctgaggcaggagaatggcatgaacctgtgaggcggagcttgcagggagtcgagatcgcaccactgggctccagcctgggcgacagagtgagagtctatctcaaaaaaaaaaaaaaaaaacatgtcgg

SEQ ID NO: 237163 - DNA, 679 bp, Homo Sapiens
  misc_feature (85)..(85): n is a, c, g, or t
  misc_feature (122)..(122): n is a, c, g, or t
  misc_feature (126)..(126): n is a, c, g, or t
  misc_feature (140)..(140): n is a, c, g, or t
tagcagttactcagcacatatgagagggcagcgaatgaatgagattgttcatgtgctaataaaagctgaatttttgtaatctaanatgatgtattttctactattgctgttaattgcattgnttanaaattcttaaagtntaatatgttatgttcagtcattgaaagcgaccactcatttttttcttaaagttgatgccttttctgctgtgctagagtcagtattttgcttctggcaggagagctgcaaactgtgtatcctcaaacagatgcaaaaagtagtgctttgcaaaacgtttgttttctgtttatctcagattaacatcctttaatacaagtttcttaagtgtaacttgtatttctgaaaatgcttaaaattattttatatttccctttgggaatttttctctatttccagcacgctgatttgatttaaaaatgtaataagaccaagagttggagtaaagggatattcattccatgttaaaagtggcttcatagctactgacaaatgtctgaactattgtcgtgcccttcaaaactggagttttctaaaataatcttatttttatacttgtatgttccagcaatttaagatatataccattgaaagggaaataaaacatttttgtttatttgaataaataatactcccaacctgaaaaaaaaaaaaaaaaaaa

SEQ ID NO: 237164 - DNA, 570 bp, Homo Sapiens
gattaagaaataaaaaagacattagatttttgccctaaatgacaggtaataaatctaaacttaggaacatttcctcacagttcaaaaagttctgcccaccttgattaacttgttttctgaatacctttagttgctggcttagtggagaaggccattggtttgatatgcaaaaaaaaaaaaaaaaaaagatttttttctgattgtgctatttcattcatgtggcttggcttaaaagaagatgtttcactttagtaggaagaccaattcaaacatcatttacaactgacgtttattcagtatgagtcatgaactgaaacttggtgtgggatctggtggaattatgggctagcttaaagggtaatgtggcaaatcattggcctaattctgtgggaatcaccagtgtcctcccaaggcatatattcatgaatgaaagaagataagaacccagtcctttgctaaatctggcgtctctggccaaatctaaacggcttaaataatcctcatccaaatatcttattttggccaatcgtttctaccttccttataaactctaaatcagaacttgacaca

SEQ ID NO: 237165 - DNA, 324 bp, Homo Sapiens
ctcaaaaaaaaaaaaaattccataggatgttcaaccatgttttcagaggccgcactgcatgaatgcgggaaaatgttgatgatcactaatcaataatctgatatttaacaaaatatggacaggccacttatgctcagttttaccttagttattccttggtatccacaggcccaagtccctttaaataaaataccctcatatttccatataatctacatacattctcccatatactttaaatcatctgtagattacttataatgtctaatacaaaataaatgctatgtaaatgtaattattatactgtgtatttttgttgctgtt

SEQ ID NO: 237166 - DNA, 525 bp, Homo Sapiens
  misc_feature (318)..(318): n is a, c, g, or t
aaaggaaaaatccaaactaggatagtgccaaagaactgcagaggagtgtggaatttgatagagaattttggaaagagaatttttttaaaagtgatgaaactgaagatctctttttaaatatggaacatgaatccttaacattagaaaaaaaatcaaaattggaaaaaaacatcaaagatgataaatcaaccaaggaaaagcatgtgtcaaaagagaggaactttaaagaggaacgagacaagattaaaaaggaaagcgagaaatcttttagggaggaaaaaataaaagatctaaaagaagagagagaaaacatacccncagataaagactcagaatttacttctttgggtatgagtgccattgaggaatctatagggcttcatttagtggaaaaggaaatagacattgaaaaacaagaaaagcatataaaggaaagtaaagaaaaacctgagaagcgatctcaaattaaggaaagggacattgagaagatggaaagaaaaacctttgaaaaaaaaaaaaaaaaaa

SEQ ID NO: 237167 - DNA, 442 bp, Homo Sapiens
tctggaggtgcccatgggaggaccaaggcacccccagggacagcacaccccagcccgagttcgtagggctctgtaggagaggccactggcagagacttttgtggctctctcactctgccctttcaaaagtcaaaggcacgccgggcacagtggctcacgcctgtaatcccagcactttgggaaagctggggcaggtggatcacctgaggtcagaagtttgagaccagcctggccaacatggtgaaactccatctttactaaaaacacaaaaattagccggacatggtggcgcatgcctgtaattccagctacttgggatgctgagacaggagagtcacttgaacctgggaggcggaggttgcagtgagctgagattttgccattgcacttcagcctgggcaacaagaatgaaactctgtctgggaaaaaaaaaaaaaaaaaa

SEQ ID NO: 237168 - DNA, 425 bp, Homo Sapiens
gctcggctcactgcaacctccgcctcccgggatcaagcgattctcctgcctcagcctcctgagtagctgggattacaggcatgctccaccatgcccggctaatttttgtatttttagtggagacagggtttcaccatgttggccaggctggtctcaaactcctgaccttgtgatccacccgccttggcctcccagagtgctgtgattacagctgtgagcctccgtgcccaggccagtgttctctcttaaatgtgtttcaatatggtggacatttattgagcacttgtgttgggcgtttcaacaggaggcactggtacgaaaagtagcttgttctagttcatatatcatttgcactttgcttaacttgtataagtactttttactgtttaataaatattttattagaaaaaaaaaaaaaaaaacat

SEQ ID NO: 237169 - DNA, 354 bp, Homo Sapiens
  misc_feature (85)..(85): n is a, c, g, or t
  misc_feature (108)..(108): n is a, c, g, or t
  misc_feature (175)..(175): n is a, c, g, or t
  misc_feature (205)..(205): n is a, c, g, or t
  misc_feature (257)..(257): n is a, c, g, or t
  misc_feature (276)..(276): n is a, c, g, or t
  misc_feature (290)..(290): n is a, c, g, or t
  misc_feature (307)..(307): n is a, c, g, or t
attgaatctatatggtataaaaccagtagaaaactagtcatctgggaagataggacccaacttgattagtgaggctaaaggaggncaggatataatcacaagacaatnccaaattaacattggggagttcagtattgagtggttttctacatttcaatggtctcccgacttaatnttattaaggctactttcaggtttcctgttnacaaattcaggatattctgcaggtgatctcaacataattttcaaaaaggtcntattaacaaatattgagcncctgtgaagtatanggcaatggtaagattangtagatctcagtaggaacaaagtttctgtctttaggagttaacattc

SEQ ID NO: 237170 - DNA, 619 bp, Homo Sapiens
  misc_feature (609)..(609): n is a, c, g, or t
  misc_feature (618)..(618): n is a, c, g, or t
tatttgtatatatgctttgaagttcttatcacagtgttttttgatttgtaataataattagtaataatatagaaacaaaattaattgttcttaaccagtgctatgtaacctattaagtgcttactagagttgcatatatggacttttaaatttgttctcaattttgaagtttgataacttagagatgtacaaaactatactttttaaaaaacacgtttgggctaagcaacattactaatttcgtaatccatagaacactgacatattcatggtttaagggactactgtcttgttcacagtgcaagaggcatgccttttaaaaaggaatttcttattttttaattcttcagtcatttacattcagaatcaaccatcaaatttatatggaacagccatagagagcaaaattcttgtcttgaacttttcaatcaaatttgtttttaagcacttaattctgaaaacagttattaatttaaacaaagcaaaatcttgaagtcatacaattagaagtcccactctgttccatgtagatttcaatatagatcatcctaatgtgtatagtggtcccttgatatctgtagggggtgggttccaggaccctctgcaganaccaaaatnc

SEQ ID NO: 237171 - DNA, 501 bp, Homo Sapiens
aggtgcacgcgttccaggagaacccttacaccttcagccccgaccccaagctccagtcgtacctcaagcagaggattgcccgcttcagcggtgccgacatttccacactcgccgcagatagcagggccaacttccaccaggtctccagcgagaagcactcacggaagattcaggacaagctacggaggatgaaggctacattccagtagccgagctcgggcctggtgtggaattccagatccgaatccgactgtggggggcgggctgggaggtgggagccgcgtctcaggcccggccgttatcaaggcccctccgcccccgaaccctggggagctggaccaggaggtggaggctcaggggaccccatggggacaggcagagctggtctcctcccagcagacggagccaggacgggcacaagagtcttggaggtttgcgtgtttctgctagaattaaaaagttaaatttaaaaatgaaaacaaaaaaaaaaaaaaaaaaaca

SEQ ID NO: 237172 - DNA, 505 bp, Homo Sapiens
cagggatcacagagatctacttaaacttttaaaactaaaaagtgtaatatgaagaagtagagccgttctgggtatctgtaaaagtcttacaagatcaactcaccaactagtcatcagatcttttatttaaaattgacaatggcggatgtggccaatgttcccattgttcaggatgagtgtttctcaggacgctgaaatataaacccgctgttgccacagatgctgtaatattaaaataataactaacatttatggagaactcactgtgtatcagtcattgtattaagctcttcgtacacattttccagttacagataaaggaaagtgacatacggggtaaataaacaggccaggtttctaggaagttcaaagatttggagttaggtttccggaacaaatccttttaaccaatgagctaaactccctctaatatgcagatagtaagaataagaaaaatataaaacatatatatatgaacacatttataaaagaactctcagcaaac

SEQ ID NO: 237173 - DNA, 697 bp, Homo Sapiens
cggtgttttgtcatgttgctaggttggtgttgaactcctgagctcgagcgatccacctgccactgccttccaaagtgctggaattacaggcgtgagccacggcgcccggtggccgaggttaataataattaaaagtttctaatcccattgttcagttatttgatttggtgtaaaggcgcactttccaagtcagatgagtttgtggtaacatacattccccaaataattatttttcccttgtgggaaatattccagttttaggctaccagctgtttaaacagtttggttcaaatccttcaaaaaaatctcaaaacataactccacatatgtatttactacatattgaagggtgtattcacttggagaagtaggagaaagcaaacagatgccaatggcctttttgaaaacatgtatctatcagcaataattgaatagcaaaacgaagtggaacactaccatcctttgcaatattagatagttttaatactgggttgtgaggaatgaaaagatcatacaaatcgtcatttctgaagtcatttctgaagtcgtcatttctgaactgagtgctaatttttcatattaagctttatgttaatatccttaatgagaggaacttcctgtgcccgtaatttctccagagaaactattaacatacacagaatgttgtaatcaggagtatagttcagttaataaagtc

SEQ ID NO: 237174 - DNA, 536 bp, Homo Sapiens
atttggcttatttttcactgtagctagtcttttatacaataatcttgtaagaaaatttcttgaattctaaatattactctttctagatttttgaaatcaaaaagttttcagtaaaaagtttcttactttattttattatattaggtagtaaaaaatgtagggttatttaccataacctgttcattaatatcagaaatttacaatagcattttaagaccatagtaggattctagcataccgtgtagtacctatggagtattgtaagagctaattgttggagatgaattgcttctcatcttgttctccagtttccattgttggtttattgcagatttgtatcctgtgtcaaattcaaggtattattgataaaccttttcaaccagcagcaagaagttcaaatttttttctgtcactgtaacagaaaacacaatatgtatataacatttatgtagcaataaatgtgccatcttttttttaacacagtaaaaaaaaaaaaaaaaaaaaaaaaaaaaaaagaaaaaaaaaaaaaaaaaaaa

SEQ ID NO: 237175 - DNA, 495 bp, Homo Sapiens
tcactttttttttttttctttttttgagacatagtctcgctctgtagcccaggctggagtgcagtgtggcacaatctcagctcactgcaaccttcacctcccaggttcaagcgattctcctgcctcagcctctcgagtagctgcgactacaggtgcccaccaccacacctggctaatttttgtatttttagtagagatggggtttcaccttgttggccaggctggtctcgaactcctgacctcaagtgatccacctgcctcagcctcccaaggtgctgggattgcaggctggccttacctggtatggtttttaggttcatgttgatgcctggagtttcagtaattccctcccattcgttgctgagtagcactgcaacacatgcaggcagctatttggggatcttttcacctgttgatgggtgtctggactgtttccagtttttggctgttacaaatgaagcctctgtgagccacgcaaaaaaaaaaaaaaaaaaa

SEQ ID NO: 237176 - DNA, 470 bp, Homo Sapiens
  misc_feature (111)..(111): n is a, c, g, or t
gatgacaacccgaagctgtgagaggggaagagacctgatttgacaacaggatgaacagaactcaggcaaactaagttccagtttttaacaacgtaaaaaatatgatcgacncaaagacaaaatacaaggaaaatgaataaagaagaaaagaagacatggggcagggggcacacattcacttctaggcttaagtcatttggagatacacagcaatagtttaggacagaaagacaagaagcccacagacaattaaacttgtaaaagtaattcaaccagagctggaacaaagccaagaacaacactcaagctctttgggaaactggtaggaattttatgactttagtggtcagcagttgagcatcagcgcagtctgtcttgaactcaagaattttaatgcctccaactcccactcacctttcctccttttatcactgaagtaaggccaggctgagctcctgagaaaataggtc

SEQ ID NO: 237177 - DNA, 586 bp, Homo Sapiens
tgtgtggcacacagtaggtacacaataaataaatgctgaatgaatgcaaacaaaggtgtgccaaatcatacaaaaggcaaatatcaatacgtgcccctagtgctatgtgagatggctaggaacagactagggttgagtgaattaaaggaccctgtcttctaggcatttttttttttttaaaggtgagtagggaaatgtctggaacacagataccaaaagctccctagctgccctgcagcttaatgagagctctgttctaggcatcaggggcagcagcttctagttccagaactatcaaccagttggataaatgtgggcacatgtgtctcaactctttgggatctccttttcttcactagtaaacaaggggaactagattagaagttacaataactaatatttattgaaaactttccacatgcctaatgaaagagtaaaacaggaattttttaatttaatctttgcaacaatgccatgtgatcactgctgcttttatgttatgtaggaaaagatacagactcggagaggtttagtgacttgtctagtcaccattattaagtggcaaagcagggatttggacctagga

SEQ ID NO: 237178 - DNA, 561 bp, Homo Sapiens
tttttttttttttttaaagaaacaggggtcatattatgttgcctagctggtctagaaatcctggcatgaaatgatcctcatacctcaagacttctgagtagccagtgattacaggcacgagccactactttaattaactttaaatgcttaatccaatacctccttttcacttcactacaaggaagcaatgacatcttgtatgtttacgttttaaataagctctcaatcagctttgtaaggtaaactcccatttacctagaggttaaggaataggtattttccttaacctgaaggttaaggttctggttaactgagattactacatattcacaattctataaaactgtgtactggaaatcaatttaggtatcaatgctgaagtcagaaaatgatttgtaccttgatgaattttccaacgttttaaaatcatgttacttttcaaaagtgtaaggaaaaatctgtaggagattcattccatgacattgtctgttggttgctttttgagtatattttctcatggcttcatctatcttgctcataagactaaatggggagacagac

SEQ ID NO: 237179 - DNA, 570 bp, Homo Sapiens
ccccaaagaaaaaattttccagaatgaatttttttttttttttttttaagagacaagatctcactctgtcaccaaggctggaatgtagtggcatgatcatagctcaactgcaacctcgaactcctaagctcaagcaatcctctcacctcagtctcctgagtagctaggactacacagtatgtgctcaacatgactggctagttaaaaacatttttttttttgtagagacgaagtctccagtgttgcccaggctggtctcaaactcccagcctcaagggatcctcctgcattagcttcccaaagtgttgggattacaggcatgagccaccacacctggcctctccataatgatgttgagaccatcctcctcaacaaagaatcagtcagttcagcacctaattttcccacactgaagtctacgcaattttcatgcagactgtgcacacagtacagtgcacaaatccagagggcaacacattgtaattcatatcatccgtttccaaagtatgacatatggacacctggagaatccaagccactttcaggaggcatctgaagtcacaactcttg

SEQ ID NO: 237180 - DNA, 588 bp, Homo Sapiens
gaaggcagctagacttattgtatttacagcctggccactctagacatatgaatccaggctgactgcttaagtgcccatctcgtttgatataaactgtagaaaaggcaagcactttgttctgagtcttttatctccaaatacatagttgtctcaaaccaagcaagctttatcaaaatggcttatttgcagaatagttccaatgatataaatgccaactggcaagtcattccaaactgcttgaaggagtagatgaaccagaatctgagaatttggaaataggtcacagaaaaagcctccatttggctaaatatgacaattatctgagtatggttaaatacatacaattaaatgtctgaagccaatgagttgtttattctaacttgaaatatatttttgtgagaataaatgttagaaaagttagtttattttggaaacctgccgtgaaaggaaattctaaaggcttaacatgaaactgtctgcatttctacctgttagacaatggttgctcttgggctcttgttatacagtcatatggctacacgtttatgtaaagtttgcaaaagtttggtgttttgatttataataaaa

SEQ ID NO: 237181 - DNA, 628 bp, Homo Sapiens
  misc_feature (98)..(98): n is a, c, g, or t
  misc_feature (104)..(104): n is a, c, g, or t
agttatagagtctttgcatggacacagtttcgaagctaaaaaatgagaacctaatattacatgcaagttatgtgactcatcagtaattcttcctaganaaacanactataccacttgtcagattcttccagcataagcctgagtccccttgcacctataattagattcttattttactatcttttgcgtatcttgtattaattttacttggttgataagatgttgaagaaaccatggaattatacacagcactatacattattactatagaatgtctggtccctcccatcataaatatggtttaatgaagttattgaaaaacttcacaatatcgagctgcaattcttttttctttttatacaaatacaagttaattagctctattaagttgcaattttatctttataaagctttgtaaagttatgaacatggaaaccctaagaatcacctaagctttttacataggtaaatttcaagttgacagtctgtccattttgaactatttataattaacaggacacttaacacagtaatatcttagacaaggaagagggcattaattctgcaggcaggtagcaatgaaaatgtcaaacctgaacaatcagtcactatttccttatacagtttg

SEQ ID NO: 237182 - DNA, 514 bp, Homo Sapiens
aaggtaaccttctgacatctgttgttaatccccctttgtactcttttcctgtatctgcactgttattttgagatgtcatactgtacactgtattgtaaaaataaaaagtaaaattatatttcaaattttaaaagccactaagcaatttctcttgctatttgctcggtcactcaaggtttccacacatgtaaagaccaccctcctcttcaagtttttgccaaaagcaagaccattggatcctccagctacaacacaaaatactttttgatttgttctttacagagggatagtgccccctgttggcacaggtataggtaggtcctgtttccttaattattaaaaccaacaactaagtgtattaaagatggacaacgcaaggctgtgaacttgaaagttttctggagaaggaggtatgtaataatactcaggcaaatggaccttatgtgcagcctgggatctgaggacactgaggcagcatgtgaattattggcaaatatataacatactttgtttc

SEQ ID NO: 237183 - DNA, 540 bp, Homo Sapiens
cctttttgataagtaaggcatgaaatgaaacaaaagttttgagctgtaaggtgcctataaaggatgtcactacagcattcacaatgctaggtgtgtaagatgacatggctgttaccatgtactaaagaaccccatcatgtgagagatcgctcaaagtcattaacacaaagcagtgaaaatcatccagcaaagcagtgcttatgagagactagaattcagagaaatgcaaggtacgaacttctctctaatccaagggtattctgctgtgatcttctaatcagtgatgattgtgcttatgcacacgacatcttcatgggagagaccaggctgattgcaaaataatgacaaccaaccagtttacctcaacatagctcactctgcaatgtcagacatgcagtgtagagcagtcacaaagtcaagccatgaatacagggatggaaaaacattccagtgagctggtctctacaatttttaagacacttcatcctcccaattatattctttgtcataaagaggaaaaacagcaagattattaaatcc

SEQ ID NO: 237184 - DNA, 630 bp, Homo Sapiens
tttctttgttggcatccatgatttcccttaagagaagtttatagatgtagaactacaaagtcaaagaatgtgcaaaattgtaggaggtttgatatttatggccatattagttccccaaaaagttgactaagtaaacggtttatagtttgatattctaatttttttcagtgaatgcattccaaaagttaccagcttgaaacaataagcatttattatatcactgttttagtaggggggattctgggagtagatcagctgggccccccagctcagggactgcagtcaaggtgtcagccagcactatagtcacctcaaggttcaagagcaggaggtccacttccaggctcactcacaagggtgttggcaggtctcaggttcccagatgctgttggctaaagacattggatcctgccatgcaggcctctctggaggcttacttatcacatggcaccttgcttccaccacaccaagggcactgcgcaggtaacccgggcccccgcgcgcaaggccgaggcgcaggcggagccggctggagcatgtccggccctttgttctgcgctcgtgcgtgtgtccgggtacttgagctccctagcggtccgcctgtccgtctgtctggctgcccgctccctc

SEQ ID NO: 237185 - DNA, 613 bp, Homo Sapiens
agaattgcttgaactcgggaggcggaggtcgcagtgagccgagatcgtgccactgcactccagcctgggtgacagagtgagactttgtctcaaagaaaaaaaaacaataataggtaaagtatttaaggaattctcagatgccttatggacctcttcaagaatgtggttagccaattgattcaacttttataggtttatatgctctcatgtaaacctatttgtttccgagatcagacgagatcgggcgcgttcagggtggtatggccgtagacaacctatttgttaaaaacccttggaaacacatcttttagtagaggttcttatttacttataaagattaataatcaaattactacaattaatatccatttagccttttcagtagtctaaatatttggtaactccctagccatctataacactagttcaaaacaaggctaattcataacctgtcttaaaaatgtttgaagtggtatcaagagcattgtttatgcatgttgtgatactatttgtggaactgtttaatgagctatttcaaactgctagaagaaaatgaaataaaaatggaaaaatactgtcaaaaaaaaaaaaaagaaaaaaaaaaaaaaaaaaa

SEQ ID NO: 237186 - DNA, 532 bp, Homo Sapiens
agtttttaaaaaggtacaaaataacatatatagtatgattccttttgcatatgtgtatttgcttttaattgcctaaagaaactctcagaaggattcaaaagatccataccaaacaagatgggagaacagaggagtagtgacaggagtagaagcactgtagaccttttcatatcattttggtttttaaattacatgagtaggttacctaattattaaaataaatttaatttaaaaggtaatgggggataggaagaaatttgttaaaagatacaaaattacagctagataggaagattaagttgtagtgttctatagctctgtaggatgactacagttaacaataatatatattctaaatagctagaaggaggatattgaatgttctcaacagaaagaaatgataaatgcttaagatgatggatatactaattaccctaatctgatcactgtatattttgtgtattgcaatgtcactatgtaccccataaatatgtataattatcgtgtgtcaattaaaaaaaaaaaaaaaaca

SEQ ID NO: 237187 - DNA, 627 bp, Homo Sapiens
  misc_feature (74)..(74): n is a, c, g, or t
  misc_feature (615)..(615): n is a, c, g, or t
ttgacacacacattcacatataaattgttaaaaactgaaggcagaatggaactaatatatgtaccagagaaaancaataaattttatgaacttgttttatatttgcatatcaagagtcaagtatgatgtttctttaagttgactttttttacttcattatttttaggaataaatgtaagattttacaaatcttttatttccccacaagatctgaagtttggtatttttgcattatgacagttgttgagactaggattttaagctaggatatgattatatttcctatataactaaagattttgtttcataaattttaaaataattatttttgactatgaacattagtccaaatttaatatttgacacagttcataccagcttgctacaataatgataatttattagtctttctgttatttaaagaataaaaacatgcttataaaagacttttaatgaaatgttgcctttttaaaataattatacttgcacatgaaaataaaatataaagtcaataatagtccttgtagcccaatgggaattgattctgtttattgtctgtaccattttgctaccagttacattgaactgctttaaaataaataataaaattatttntaatgatgtaaa

SEQ ID NO: 237188 - DNA, 626 bp, Homo Sapiens
caaaaaactcctccacaccaaggagtgtttagtaacttctgcacagaggactcatccatctcttgcttatgtttgggacagaaagacacttctctggctttttactggcttgaacccaatgggacagagactctctagaaagtttcagggctcacattcacttgtttgtccaaaaaatatttttgagtgtctcccaagtgccaaaccctggctactcccacctttgcctgagcccatgagcggtagtctgggggctggatgtgaggagttctgagttggctaggaagacacaaggcacaatggacatggggcaaagtccacttgctggacattggtcccttccacttccaagctgtccatcaggctgagagatctggaatgcataccccacactttgaagatgaggaagggcgagtttctcaaagtgtgtgtgtgtgtttctcttttaatctgtaatggtttctgcattttgaggtagaaacagaaatctcttttttgagtgggaccactcgggtgcggcttcttagtcttgttgatataataaagcacatgcccactcctcatggagtggagaggagaaaattctaagggaacgtactctgaatgcaaatgtttctgagattaaa

SEQ ID NO: 237189 - DNA, 607 bp, Homo Sapiens
gcgtttataaagattcttagctatcaagggctgcattgtattttatatactcagttttataaggtgatactttttaaataagcgctttaatgaaaatggttagactgaaaataattttggtccttaaaaggagtcaggagcttttatatataaggtacatattttaaaagaatacctcctttataacagggttttacagacactaccataatttataatcattattttttacttttgggttcacctagatcatatgagttgatgtgatacttctagaacaaaattattcatagtgcgttttttgtaatttatgattgttaagtaagcttgacttataaattgacattgtaattgtgtacataattggatatatgtgttaaaatttaacatttagatttacttaattgtagaaaatacaaatgtaaaacttacacatggaaagaactgtatgcagttgactttactatgtaaattggagggaaacaaagttttagatccattttctttcaaaactttctttattgtaaagtatgcaaaatatatattcataccatttattaaatcagaatgtttatacaaaaaaaaaaaaaaaaaaaaaaaaaaaaaa

SEQ ID NO: 237190 - DNA, 718 bp, Homo Sapiens
gagatgggctttcactgcgttggcgaggctgtctcgaactcctgacctcatgatccacccccctcggcctcctaaagtgctgggattgcaggcatctgccaccgcactcggcttatccctagaaatcctatgatagcatgatgtataggcacctaaaggcatggcacttgagaaatgtgaataagattgtaagttacaaatagcaaggtacagtcagatgttaacagtctcagcccctaaatgtcaccttgtattacagcatgttatataagcacatacaggcacatacatgaaatagtgatacttcattctcagtaatattttcatccttctcactggaaagatctttgatgatttttaatcaacataggagtttcaatgatatctagaagtttaaaagggctcgttcaaacaaattatgaccacacacactgaagagtatgtttgtctcttgtggtgtaaatttttttttattacaccaaattatgttcacacaaaacctttgtaatcagggggaattaaagagccttcctggaaaatggaggttgcagtcagccgagatggtgccatcgcactctagcctggggaatagagtgagatcctgcctcaaaaaaaaacaaaaaaattctttattttctccataaactacagtttatataagcaaaagtttcagtactaagcaattttagttctctgcagtctcttgtcttgaattaat

SEQ ID NO: 237191 - DNA, 470 bp, Homo Sapiens
agcagcctgtgtttgccccagctccaggccaggtccaagacattcaaccagccctgcccacaaagggagaagtattgcttcctgtagagcaccagcagcagaagcaggaggtgcagtggccacccaaacataaataaccacccgcagtgtccagaggccctcagatcgtctcatacaagggaagagagagccactggctccacttatttcgggtccgctaggtggcccgtctcatctgtgaacttgactctgtccctctacatgtctctttaatggggtgagggtgggggagagagggaattattgtccagtgccaaccccaatgaccccaatcccaacctcaggtgagcagagcctctacttgagggactattgttactataggaatccttacttccccagtattgaagctgaatcagtgagtgtgtacaatgatacataataaatcctggaagtcttgggatcctaaa

SEQ ID NO: 237192 - DNA, 601 bp, Homo Sapiens
  misc_feature (89)..(89): n is a, c, g, or t
cctagagagatagatatatgtactgttgtcaaaaaaaatgaaacacacaaatactggaatattaaaagacaggctcctcatttcttctnttcctcatcctggtacacagtgcccaaaagctttagaaatgccattatgaacaatagcttttgctagttgttaggaaagcaatttatgagttgggaattattgtggaagacttgatggatgattatagctctgggtcactaacttctttttatgaaaacatgaataatactagttataactcaaagtcaaaatagtgtaaaagctgtggagtgcttttgtagggggtatattaaattgccagaatattgcagaggctcatcttggaacaagaagtagaatgctgtttcagttaagaggactgggctgtttcaggcaacagactgatcatttcgcatcacagtggtggctgggttttccatcagtcattactaatggcaatgagaaaaagtcaggcggcttgtgtgactcccatgttaacagcaccataaaaaagttttgccctaggaatttgggggaaagggaagaatgcggactgcctttgttattacagaaatttcacaacttacttacc

SEQ ID NO: 237193 - DNA, 611 bp, Homo Sapiens
aaaagtacctgtgtgtgttaatatgtttttcttgtagcatagattgactatttgcagtagtattagtatttaccatttttccaaattagcaactaccagacctcacgtgttgcagtgataacacaatgcattggattcagttttgtgaaaatggattctgtggccatccaagggatgtatcagggatgatcagctgatgagaggctccagaaggatttctagatcgcttcaagcctatactgatggccttagctttgttcagtcattgtaactgggattgttgtcattgctaccgtggtagtcaccttcatgtcatctataatagtactcctggagagccctggctgcctacaccagtggaaaagagtctccagttctgctctggcctactaactgttaccactgagagaacaacatgttcatttgacatgattgaagctggcatccgtatatgaagatccttgtcaagctttcttctgtggtctgattagtgttgataccggggcacctcctctggtacttttaagtgttttgttaattatgtttactttttggaatggtgtaagcctaaccacaaataaaagatctttgcctgaaaaaaaaaaaaaaaa

SEQ ID NO: 237194 - DNA, 735 bp, Homo Sapiens
tgaaatttattaaaaaaaaaaaaagaaaaccaataatttatgcccttggcaaaataaaagattcttatcaatataaatgtttcttagaaaatgtatgaaaagataatatatattaataaatcaatattaacattacagcaaaagtaataatgattatataacaatgacaagtgaagatatttctggcccttacacagtagtatttctggaaggtctctgattcctgcttgctctagtacaggcgtgctctcactttaagaaagcctgatgccgctgggcgaggtggctcacgcctgtaatcccagtactttaggagacccaggcgggcagattgcctgaggtcaggagtttgagaccagcctggctaacatggtgaaaccctgtctctactaaaaatacaaaaattagccgggcatggtggctcacgcctgtagtcccaactgcttgggaggttgaggcaagagaatcgcttgaacccaggaggtggaggttgcagtgagccgagatcgcgccactgcactccagcatgggcgacagagcaagactccatctcaaaataaagaaagaaagaaacaaagaaaagaaaagcttatattgaacttctctaaaaaaagaaaaaaaagaaagcctgatgcacacaaatctaaatttggcaagtcgatcaattaaaggatatttatttgcatcacaaaataattctttactccccccaaaaatcaataaaaagttcaaata

SEQ ID NO: 237195 - DNA, 577 bp, Homo Sapiens
tttgagacagtcccactttgtcgcccaggctgtagtgcagtggcattctcggctcactgcaacctccacctcccaggttcaagcgagtctcctgcctcagcctcccgagtagctgggattacaggcacgtgccatcacgcccggccaatttttgtattttgagtagagacggggtttcgccatgttggccaggctggtctcaaactcccgacctcatgcgatgcgcccatctcagcctcacagtgctgggattacaggcgtgagccactgcgcccggccacggtcacggattttttaaaactctaaggtcattagcttgacatctataaaatctcctccatgacatgaagccttaaacctagggacagaaacacactgagacacagaaacaccttctgtgcttcaatacacagagcattctctggaaatccctacgacacaggcttaaaggccagtgctgtgcctgaaagacattttgaacaggcaaggagtgtaagctaatacactactgttacaacatggacaaatacttgtaagatgttaaatgaacaaaggaccagaatacaaaactgaatac

SEQ ID NO: 237196 - DNA, 565 bp, Homo Sapiens
  misc_feature (557)..(557): n is a, c, g, or t
tcagcaggaaaacttttttaattcttaagaaattaagatactggaattatcagaaacaatataattatgtaaataaaacagagtggaaataaatgagcaaagaacaacagaaaatcaaaaataaccaggaaaattcaagaaagaatcaaacagaactccaaaaacaaaaaattactgaaattaaaaattcagtggatgggttaaataagagactgggcttatgtgaaaaagagtgggtgacctggaatatagacctgaaacaattattcagaataaactatctggataatatgagttaagatacaaagaacaagaggagaaagccttacataaaactgactaagattacaaaaggaaataatagatagaatgtggagagagactatttgaagaaaaaatggcagagaagtttccagaataataaaaaacattaagccatcagacacaggatataacaagaaagataaaggaaatccctatctagacacattatagtggaatattctagaataccgaagacaaaggtaaaccttaaaagcagccagagacctttttcnacaaatag

SEQ ID NO: 237197 - DNA, 724 bp, Homo Sapiens
tcaaagttgcaactgtaatttgtcattttttttctttattattttttgagacagtttcactcttgtttcccaggctggagtgcagtggtgcgatctcggctcaccgcaacctccgcctcctggattcaagctattctcctgcctcagcctctccagtagctgggactacaggcatgcgccaccaagcccagctaattttgtatttttaatagagacggggtttctccatgttgatctagctggtctcgaactcctgaactcaggtgatctgcccgcctcagcctcccaaagtgctgggattagagacgtgagccaccgcgcccggcctaatatgtcacattttcaaatgtacttaaattatgtttttaaacaacacatacttgagaaatactactaatggggatcactggggaaccaggtgtgaccttcattggtcggcacctcgctggggccagagcggaggaggcggacgcgctgcgagtcctggcctgtgtccccgctctctctgaccagctttgtatggggaaatgttagggtcgtgaacttaagaagttttatcagtgaggttctaggtgcatctttccagatgttgggtctggatgggactggtttgaacaaagggttttgctgctgcggggctcagatgctccctctggtctggtccctctggttctggaggcctccacctggagggaggttgctggatctgctgaggtctgtcaga

SEQ ID NO: 237198 - DNA, 598 bp, Homo Sapiens
  misc_feature (6)..(6): n is a, c, g, or t
  misc_feature (21)..(21): n is a, c, g, or t
  misc_feature (257)..(257): n is a, c, g, or t
gggcgncttccagcctccccntcctcagccccgggagcgccgcgccgcaagccccagtcccgggggaggccgagtcctctgccaggtcctgggatcctgcagaccccatcctggtcctaaggcgccgtcgcgccgccccgcaccttcctcctcatgccggggcctgctgctccccaggtctcccctccgcagtcaccgctttcattgaacctgcactggggaggtcccaggggcctgtcctgcggcacggggtcttnttgcctgcggagctccagggcgtggaaaatgcgctcctccgggatgcaggcgtcttactccaaaccgtgttgcgattgtgtgggccaaaggaatcaggagacagagagcagtagaaaacctgaggcagagaaaagaagaataagaaaggcccataacagatggcaaaatagaggattggtgagggatatgccaagagatggcagaagtgaaaaaaaaaaaaagataagaaagcaggaggagaaaagcaaccggagaaatgtagagaaaggctagatgtacagagggatgaaggatcacaaggtagggggagtggcagcaaagagggaggcttatcagagtc

SEQ ID NO: 237199 - DNA, 666 bp, Homo Sapiens
accccaattgtctctttaaaaatactgatttaattgaaagtctgaaatttaaagaatgcaatgtcatgatttacttatctcttgctataaacagcatatgctgtgaattgagatgtctagtttttcagaaaaatgttttaaaatgtcaagactatttgaaattattctaatttagcaatattttaaaatatacatgattaaaataaaaggggaaaataaaggctagttaatttcaatgttcaatctaataaaaactagttttactgaagaaaacttggggagaaactaattcaaagttcactgttcaagcaggtgaagatgtctgagtgttaaaaaaaaaaggggggggcagactttttggatgtttcccattcagcacccattttcacaacttcaaaagaattcattgcagacaatgatgcactggactaaggaactatgctctatgcaggttagtaacattcaggtgtccaccagtgcaatatttcacatttattttcaagtaccagataaagggtttctaagaaaaaaaaaatgcttaagatgaaagaaaagatatgggtgcatgattttttcataagaatatgttacaaataaaaaaatagttttattattaaaatcaataaactcattatctggtctgcagaatatgaggaaatgtgggca

SEQ ID NO: 237200 - DNA, 601 bp, Homo Sapiens
tggtacttgactctgatactttttggtttacatgtagttggagaagaaaaacagtgaaatttcttcctctgacggcagttgaaaggtgatttaaaacatttttgttatttctttctatatacttacataaatagtttacctttcatgtcccatctgtgctatctttacctattccaaagtcacaaagatattcccctacatttactcttagaagtttaaatatgttgtttttgatggtagtataaatatgtatttcattttttaactgtttgctgctaggttacagaaatacaagtgctttttaaaaatactgaccttattttctgaagttcctaaactgtgtgttactagtatctagttgtttaactattcttccatgtacatactcacatcttctgtgaataaaaaatttttttttctgtttcaacgtttatgccttttattcctttttaataccttaacaggttagctagttattctaggataatgctaaataagagtgataagaatcaacattaatgcttgttcctgatcttagtgtgaacacacttcaccattaaatatgatgattgcagccaggctgtcacacataacctttgtt

SEQ ID NO: 237201 - DNA, 662 bp, Homo Sapiens
ctggtggaacagtggttggaggtcagttagtcagcatctgatgaagctgaaaatgtttttaatattgcttatctcaaagccagtgcttggaccgggtgcggtggctcacgcctgtaatcccaacactttgggaggctgaggcgggcagatcacctgaggtcaggagttcaagaccagcctggccaatatggtgaaaccccatctctactaaaaatacaaaaattagccgggtgtggtggcggacacctgtaatcccagttactcaggaggctgaggcaggagaatcacttgaacccaggaggcagaggttgaagtgagccaagatcacgccactgcactccagcctgggcgacagagtaagactccgtctcaaaacaaacaaaataaaaagtggtttttgttttgttttgtttttaagctttttagctgctacagggaaaaaaaaaccaaaaacaaaaaaccttgtgcagttagaacatagtttattcataagttgggggcaggggaggcggggcatgaaggcgggctctacatgacttaacccttgcttggcatggccttaggtcctgtttacaatttggtatcttattgccacagtgtctgttctgtccatctcatgatccctattttgttcattcatgctcggcagctgtgtctaaacc

SEQ ID NO: 237202 - DNA, 733 bp, Homo Sapiens
tttcacatcatctcacgtccctttccccctttgtattagtagataattatactatctacagccagaacgatcttcctagacgtgatcatgctatgtgctatgaaaaaaacccttcaatggggacctccactaccgaaatgatgtggtagtactggcagtcgctcccaggtgcagtaactaggaaaaaatggatcaaatgcaaaatacattacagatacgaaagagctgtggaagcgcttaagactagatgtactaaaagtctttgtcttttctacatagctgagactaccaactgttttctttcctggcatcatttgccaattctaggcatggattaaagatcaggctttgtgtggactaaagcactttactggggaaaatcagcaggacttttactgactgcatgatctatcatgatgtactagaatctagaggagccctaaacccaatactgagtgagactagaacttaggggctaggcaaacaagttttcttaacaagccaataccacctctcaatgccaggcttcttcatatcctattctttctcccatttcctctcttgtatttggccacttctatccttttttcccccctcaggacgctgctatttatccttcacgaaatccatccataaaatctaccaaatacgcaccacagaagctttctacaggcttatctttggcataatttttatttaacaacctcttattttccttgttgtatcctttctt

SEQ ID NO: 237203 - DNA, 601 bp, Homo Sapiens
  misc_feature (414)..(414): n is a, c, g, or t
aaggtggagaggggaggagagttttaggtagagggaatatgccactgagtaaagcccagatgacagaagccccatggtatacaggaaaacccaagcagctagatactgtagaacgtaaaatgtgagggaggaaatagcaaactattgtaatttaaccaactgaaattatcaagaactctaggatgtactcagcaatggcttatcacaaatctatctccaggcttccatcttttaagttcagataatttacgagaatatattttctcttctttagttttgtttttaaataactgtacaaataatatatgtattccttgtttaaaagaattctgtgactaaggataaaatccctttgaaccctttaatgtccccactcccaaaacaactagtctggcatgtaagttctttcagaanttttactatactttatattcatactatactttatattcataaatatgtacccacaaaaatatatagtattactttatgtactagggtttccagatacatggcatactttggctttcttctcttactagacaatgttttggaagtctatctacataagtccaaattaatctaacttattattttacat

SEQ ID NO: 237204 - DNA, 524 bp, Homo Sapiens
ctcacttatttctaggttatttaatattgttcagttagatgaaagtgtgattgtagatttgaaatacaaaataaaacttggatactgtgatttttttaacatggccagactgtcatgtattataatgacatatacttttgtccataaaatgaaattaagtttcactgaaaaatttacatactttcccctggggattctgttgcttcagattaaagtttataaagtatcattagtgtcttccacagggtcattttacacaaacacagttttagtgagatgtcaactggcttttgttggttgttggattgactgtgatttaaaatgttaaagatgatataatgcatcttgttctgcttctaggctgaaaggtcactgaggcagagctgtttgtaccttgtatcccctggaattttgcctaaacatttgtgtactcatagggtggtaggagatagtccgcagatggtctaaagaatgccatgtgatactgtgagatgccaataatataaataaaactttgttattat

SEQ ID NO: 237205 - DNA, 600 bp, Homo Sapiens
gggatatgacacatgcccatgatgagaagcagaacgtggtgacctttcacgaacatgggcatggctgcggacccctcgtcatcaggtgcatagcaagtgaaagcaagtgttcacaacagtgaaaagttgagcgtcatttttcttagtgtgccaagagttcgatgttggcgtttccgctgtattttcttgcagtgtgccattctgttagacattagcgttttcgttgatgagcaagacatgcttaatgcatatttcggcttgtgtatccatgcacctacctcagaaaacaagtattgtcaggtattctctccatagaacagcactaccctcctctctccccagatgtgactactgaggggaggtctgagtgtttaatttccgattttttcctctgcatttacacacacaccacacacgcacacacacacaccaagtaccagtataagcatctcccatctgcttttctccattgccatgcgacctggtcaagcccccctcactctgtttcctgttcagcatgtactcccctcatccgattccgttgtatcagtcactgacagttaataaacctttgcaaacgttcaaaaaaaaaaaaaaaag

SEQ ID NO: 237206 - DNA, 606 bp, Homo Sapiens
gctcccaaaccatgtcaggaccaccttcctctagagctcgggagcccggagggtcttcacccactcctactccagtatcagctggcacgggctccttcctgagagcaaaggtcaaggaccccctctgtgaaggctcagcagaggtgggatcccacgccccctcccggcccctccctgccctccattcagggagaaacctctccttcccgtgtgagaagggccagagggtccaggcatcccaagtccagcgtgaagggccacagcccctcttggctgccaagcacgcagatcccatggacatttggggaaagggctccttgggctgctggtgaacttctgtggccaccacctcctgctcctgacctccctgggagggtgctatcagttctgtcctggccctttcagttttataagttggtttccagcccccagtgtcctgacttctgtctgccacatgaggagggaggccctgcctgtgtgggagggtggttactgtgggtggaatagtggaggccttcaactgattagacaaggcccgcccacatcttggagggcatctgccttactgattaaaatgtcaatgtaatctaaaaaaaaaaaaaaaag

SEQ ID NO: 237207 - DNA, 625 bp, Homo Sapiens
ggtcaccggaggggacaatggggtagtagaggtctggcaggcctgtgacttcaagcaactgtacatttaccctggatgtgatgctggcattagagcaatggacttgtcccatgaccagaggactctgatcactggcatggcttctggtagcattgtagcttttaatatagattttaatcggtggcattatgagcatcagaacagatactgaagataaaggaagaaccaaaagccaagttaaagctgagagcacaagtgctgcatggaaaggcaatatctctggtggaaaaaactcgtctacatcgacctccgtttgtacattccatcacacccagcaatagctgtacattgtagtcagcaaccattttactttgtgtgttttttcacgactgaacaccagctgctatcaagcaagcttatatcatgtaaattatatgaattaggagatgttttggtaattatttcatatattgttgtttattgagaaaaggttgtaggatgtgtcacaagagacttttgacaattctgaggaaccttgtgtccagttgttacaaagtttaagctttgaacctaacctgcatcccatttccagcctcttttcaagctgagaaaaaaaaaaaaaaag

SEQ ID NO: 237208 - DNA, 637 bp, Homo Sapiens
gacagccggagctcggcctgcggtgggggcgcttcctgtggacgctgcgcctcccatcgcccgggtgcctgtccttgcccagcgccaccaggctggaggcggagtgggaggagctggagccaggcccgtaagttcgcaggcaggggtgggtgtgggacggggctgcttctctacacagcctctacgctggccttcaccttcacccctgcatcgtcggtgaccctgggaccctccaggcagcgtggcctgtggcaccgtgagggttgggacccaccgaggcgcagaggcggcccgaatgcagccctggttcaggcccggaggagggtttgcgggtagttgcacggacaattcggcggggtgctgcctgttgctgccattagcccaggaggaggtcgtgggacggggagggtgggatggacggcggacaggcagtccccacgctgctgggtggcgccgggcttggtggggtcttccactgtgtgcccttctcgccgaggccggtcccccgggtgtggggtgccctgctgcggactcctccgcgagccccatcgtcgcgcctgtggacgcctaggcaagagcggccctctgcagccaagagaaataaaatactggcttccagataaaaaaaaaaaaaaag

SEQ ID NO: 237209 - DNA, 595 bp, Homo Sapiens
gatgtttgcaaagtgagttttatttttttgtaattcctttatctttacttaaaggtgaatgtgtattcctctgggaggaataggaagaaaacaggaatgttaataatgtcgaacagaaaacttcctcccttattaatatataatcctcatgtatttatgcctaatgtaagctgacttttaaaaagctttcttttgttgcatgccctgtgcaggcatctgtattgtacatgcatgcctttcgtcctgttttcctgtataaagttagtgaacaaagaaatatttttgcctagttcatgttgccaagcaatgcatattttttaaatttgtcatatatggaaagagcatgtttgttacatgtaaaagctttactgatatacagatatactaatgtttgaagatgctgttctttgcaagtgtacagttttcaaatgttgttaccagtgaaacacccttgtggtttaaacttgctacaatgtatttattattcatttcctcccatgtaactaagaatcatggctatatttcatatcaacgttatattgaaagtgaagggaaatgattaatacaaggttttgtaccaaaaaaaaaaaaaaag

SEQ ID NO: 237210 - DNA, 581 bp, Homo Sapiens
ttataatctaacaaagtccactaaatgtagtaacgaaatgtctccccaataaaaaattaagattccctttggagcttaggcatgtggccttataaagagcttaactggactgctacctgttggtatgttcagggcttcattaggttcatgcttaagtataatgcctgtgcctcacagaacaatttaaatttagcttaacaccccacccatacttaaagagcaaataaattatatttcgaaaagattttaaaataatctcaatataaaaaccaacagtgggaactgagtctggaataaatgtgtgcagaatcctaattcttttctgagctccactcagtgaggatatgcaccctctactgtccagcctgtggtttgcagtaagctcactcttctgttcagaatgaccacaggagggcctttacctaggaatagcaggaaaagctaagtaagtactcaaacttccctcccagtaagcatgaattgcttcagatgtaaagcttacatgtgatgagtaatactataatatcatacattaatatatcctaataaactttaattttcaaacaaaaaaaaaaaaaaag

SEQ ID NO: 237211 - DNA, 626 bp, Homo Sapiens
cagcttcaaacgctcacacttggctgggtttctacctaggttgccaggttatcatcggagccttcttgtgtcctcaaagggccacgaggcctgaaaggaggatcagaatgctttgggattaattgggcagccatcgcagaattgtttgtgggcaaagggctgctttagcacttttcttttagcaaattaatgactctcaggcacagggggttttaagtgaaggtattaataagaggtctggcaggtattcccatgattcacagagttacatttgcatttaattaatcttaaagttgcaagataaacagctgtaattcggacaaacatgacaaacacagtgaagccaactatcccataaaatgaacactgacatacttgttttaatttttttcccagcgtaaaaatagaaaaatcaaaatactcctaacaaaaccagtgattttgatagaaatatttctccaatatacttgcatccacctacaaatataaccttttcaagataaatcgcttatgatttcaatagtcaaactgctgtgtttgttgatgtaaagatgttttgaatggctagatggtaaaataaattcttaataaagtacccactgcaatttttaaaaaaaaaaaaaaag

SEQ ID NO: 237212 - DNA, 621 bp, Homo Sapiens
agatccaataattccctttagtgatggacccatcatctcaaaatggggtgcgatttccagatcttcccgtacaggttaccataccacagatcctgtccaggccactgcttcccaaggaagtgcgactaagcccatcagtgtatcagattatgtcccttatgtcaatgctgttgattcaaggtggagttcatatggcaacgaggccacatcatcagcacactatgttgaaagggacagattcattgttactgatttatctggtcatagaaagcattccagtactggggaccttttgagccttgaacttcagcaggccaagagcaactcattacttcttcagagagaggccaatgctttggccatgcaacagaagtggaattccctggatgaaggccgtcaccttaccttaaaccttttaagcaaggaaattgaactaagaaatggagaggtaaagaaactgaacctttcggcttcatgcttaatgtatttgttttctgctgctgcatcttggttataccattactgagtgcattttggtgtgcctatctctgatggatgattgattgcttttaaaacttataacagaaataaaattgtaatcccagaaaaaaaaaaaaaaag

SEQ ID NO: 237213 - DNA, 546 bp, Homo Sapiens
gagccaggagggcgaggcggctgcaccttcggggccagattggagttcgaagagtggcgggtaccccagaagctcggggccggggcgatggctgcagcctcgggagggtatcgccggatcgaactccgggaaagggaagcaaaggcatggaacctccgcacactggatgagaatccatcttccattcgagctgggaatagactttgtgaaagatattatgtaatggagtctcgggaaccctgagacctctccagcgaagctgaagtgaattaattaagtgctttaaacggtcttggtgctgtgttacgggagagagtgactggaaagtaacaaagctgaatctttctccctggagtaaggccgaagactggattactacacgcctagacgtgacactacacccatagatctcatgcatcattaatgccatatgacattgccattttctttctcagttcacggacaaaagtggtgggttttcattgtcttcactgattgtcaatgcattaataaagaagatgtgtggtaaaaaaaaaaaaaaaaaag

SEQ ID NO: 237214 - DNA, 630 bp, Homo Sapiens
ctgtttttaagtcaagtattggtcaaaaaaatgcaatcttctgttttttgttcagcagacaatcattttcttcgtaagcacctttttctctccactctgtcactgcctgtgtgggtactggttataaatgtggaaaaagaatagttatgactgtaacagatttttatttttatttcaaaattttatatgaattatgtatatcttaatgatcggtcattttcccagtttgtaatatatgtgtagaaattgcctgtatatgatattgctttttctcctctccctttctctttctctcctctccctctctctgtctttctccccgctcaactgtctcttttctttttggggttctcctcccactcggtgctcctggtgtcgacttggcagtcaaggagaggcatggtggcctgggttaggaagagggaccctgtcgctagcaaaagcggagagtgagattgtagtattcttatgcaaaagctatttccagtatttcttagcagcttcagaggtatctctcactccctgtagggcgcttttactgttatcttaaactgcgtgtttatctatatgtaaaaactttctaaagcaaatacagtattctccattttcttatcaaaaaaaaaaaaaaag

SEQ ID NO: 237215 - DNA, 528 bp, Homo Sapiens
tgtgcagcggtccagcacttaactctaatacatcagcatgcgttaattcagctggttgggaaatgacaccaggaagcccagtgcagagggtcccttactgactgtttcgtggccctattaatggtcagactgttccagcatgaggttcttagaatgacaggtgtttggatgggtgggggccttgtgatggggggtaggctggcccatgtgtgatcttgtggggtggagggaagagaatagcatgatcccacttccccatgctgtgggaaggggtgcagttcgtccccaagaacgacactgcctgtcaggtggtctgcaaagatgataaccttgactactaaaaacgtctccatggcgggggtaacaagatgataatctacttaattttagaacacctttttcacctaactaaaataatgtttaaagagttttgtataaaaatgtaaggaagcgttgttacctgttgaattttgtattatgtgaatcagtgagatgttagtagaataagccttaaaaaaaaaaaaaaag

SEQ ID NO: 237216 - DNA, 544 bp, Homo Sapiens
tcagcccccaggccaggcatgactttgacagactccaggctggcggcggggtcctggagcagcggccctacagacgggagtcagagatctgagccaaccttggccgacatgcagcatccacccccggctggggagaggccccgcggtcgctcaggggccccgggtttgagcagaacgggcccagtgccctgggttgcagactcagtagcgttttagtcgttttatgtttctttgcaacggcctcagaagtttggccggagagggggcagccagagcggcagcccccggcctcagaggctatcacaggctcagggcaaagaagtggcctcctggggggccaggccacgagggccagggcttctgcctgaagatggagctgcagcctgcggggaagcagctcagctcgatggtgggcccagcctctgctgtccaaggctggctagctgcggtgctccttgctggtttttaacttggggagaaacaccgggtttcagctttcttgaccttagcttgggtgagactgtttacaaaaaaaaaaaaaaag

SEQ ID NO: 237217 - DNA, 674 bp, Homo Sapiens
  misc_feature (105)..(105): n is a, c, g, or t
aaaagattaatgattatctgtattctcttcactaattactattatgggggaataatgattagcaaattatatgaattcgagttctctctatacttttattagtanagcttatcatttaatggactgaagtaagatgtgttacctttattcgagctatttgtagccacactaaatgaaggtgtgtttgaatatggcgcatatatttgcatatgtcccatcattttcttgtcataatggggaattcaggcttagccagtacttctatgggatgagacctataatcccacctatagcagcaagtaactacccttcatgatgatagtgtacatggagctgtgattatgaacatgctgcctttcctgctgccattggcattctctctgtaaattttattatgtgtggtatcacactctccaaaaatgcagggtatttggttacataaccaaactaattaaagaatcagtaatgaaattgcaaaaccatgatcttttttgagctaatgattagttgggctttcctttaaaataatataatcaggccgagtgcagcggctcacacctgtaatctcggcactttggaagtccgcggcgggtggttcacctgaggtcgggagttcaagaccagcctgaccaacatggagaaacccccatctctactaaaaaaaaaaaaaaaag

SEQ ID NO: 237218 - DNA, 554 bp, Homo Sapiens
gctgtgtttgaagtatgtttagtcagcatgctcaggaaataaatgtgaattgcccttgagacctgcttctacattggttgctttgttaactctacctgatcttcacttgtcagtaatttgagaccacttcaaagccctctgcaaacaccccaaaggcagaatctgctattttgagttttccattaacttccaaagaattctggttttcaaaacaggagccagagttggagatattacagtcaactttggcttctaagccagtaattccattcttaaatacctcactgtcttggccatggggaagcactatggcctcagctgggggaaagaccctggcctaggggtcttagccactccccaccctagggtatagttcaggggtatccaatcctttggcttccctgggccatgttggaagaattgtcttgggccacacataaaatacagtaaccatagctgatgagctaaaacaaaaaacaatggtttgtgcaaaaatctcataatgttttaataaagttgaagaatttgaaaaaaaaaaaaaaaaaagggcggcc

SEQ ID NO: 237219 - DNA, 684 bp, Homo Sapiens
caaggtcttgtagatgtagacatatgggaaagatagagcctgctctcctgatggatgctgttgttgagataggttgggttggcctaggtaagaggaggaccagaagagatttatgatttcttggaaggctatgagttgctgctggccccatcataatcttttttgtttagcagaagtcaggaaacgaatactggtacacttacatttcttggaagagcagcagaaaccttgggatatccttgtgggtcaaggaggcaactctcctcacggattccctgatttgataacaacatactcatggaaacaccaatccaagttttcacaagtttctcttaaagttaacttaagacttcctagaccaagaattcctaccacgcaaggcctgtgaaaatattgtaaacttaatatccgacagggagatattcaaagatgccaaagtacctgtttttataaatattaccacatggtttaagatttgacttctcacataaaatgagtaaaaataacaatgatttttctgcagtaccttaatgatgctgtaattatgaagcagggttttaaaattctgccatgtagtgccttatttttatagtaatgttttctatgaaccttctaatttaatgtgtattaagagatttaaagagtatgtaattaaaaaatatctttccaaaaaaaaaaaaaaag

SEQ ID NO: 237220 - DNA, 681 bp, Homo Sapiens
gtttgctttttagacaaggtaaagcaaagaaagccacattgtgccatcttcagctccagtggctttagcagtgactgtttgacataaaacatgtaagaattgcttgttgggaagagtgctttagggacccactgttttcatttcttcttggagtttaccttgtttcagatgcagccatgggtaggtcagagatggattgttggtgcaataaacccaagaatcaatgtagcctcttaatcccatcaagatgtagtttgtagcagcaaagtgtacagtctgaaaccgtatgttttatccttatattttagagctttcagcagcctttttaagagaggccacttaccaaagttatttctataagctcaagagtgtttcggttggtaagttcttccagctgaagccactttttccttatagttaatacaaatgactatttttactttaaaaggcacagctgtcctggtgggaaatgaaacctgcagcagttcaggatgactaatgaaagcaattagcttgaacatttagaaaaaattcatatatgatctaaatttttatattatcatttctgtgccttctaattcctgcatcctgttcaaaacatctttccagacattaacttacacattgtataaaaccgaccaaaatgatttcctaaagttcatgcaaaaaaaaaaaaaaaag

SEQ ID NO: 237221 - DNA, 648 bp, Homo Sapiens
cggcctgggcgcgggcgtgaaccagcgcatggacagttacgcgcacatgaacggctggagcaacggcagctacagcatgatgcaggaccagctgggctacccgcagcacccgggcctcaatgcgcacggcgcagcgcagatgcagcccatgcaccgctacgacgtgagcgccctgcagtacaactccatgaccagctcgcagacctacatgaacggctcgcccacctacagcatgtcctactcgcagcagggcacccctggcatggctcttggctccatgggttcggtggtcaagtccgaggccagctccagcccccctgtggttacctcttcctcccactccagggcgccctgccaggccggggacctccgggacatgatcagcatgtatctccccggcgccgaggtgccggaacccgccgcccccagcagacttcacatgtcccagcactaccagagcggcccggtgcccggcacggccattaacggcacactgcccctctcacacatgtgagggccggacagcgaactggaggggggagaaattttcaaagaaaaacgagggaaatgggaggggtgcaaaagaggagagtaagaaacagcatggagaaaacccggtacgctcaaaaaaaaaaaaaaagggcggcc

SEQ ID NO: 237222 - DNA, 579 bp, Homo Sapiens
cagcaggagaagaggacaggccttgggcagtcatggatttcacatttgtgattctgatcacttgtgtggctctaagaccagaagtgctatcttggctgaagctgaatcctggctgcagtttattactgcagctggtaactacctgcatctgcctctcagcaaggctgagctctctctatcatccagctcacaagagctcttctgtgataaaaacaggtgaaaaatcgacttaaaaaggaggcgaagtcctggtgttgatgagaatagtaaataagtctatgaatgtcctaacaaagtaatgcttcctagccacaaaaatgttccatggggtataagccctttctataggaataccagtagaggtgacaattcttgaagactgagaacacattctgcagtgtcagcagctactatttcagtgtgaaagcattgagcctgcacactgtctgattacgctatagccaccatcatctgtaatcaactggtaactcccttccagggggcttagtggccagatagctgctcctaatctgcagatcatggagccacagggatggtagtaaaggggccacaaatctt

SEQ ID NO: 237223 - DNA, 622 bp, Homo Sapiens
aactagtttctattgtattagtaactcaaaataaattatcacttcgaaaacttgctttcccacactaaggtaagttcagactagattgaacactccagaattttttactacagactgtttttaagttagaagtgatggcaattttataaatagagaatatacttccactgatgcccttactgtgccaaaacaaaaatcttaagaaaagcaagtagacaccttcataactatgaatgaagctgctgaagtagtgtttaggatcctccatggcagttagtgaatgtaagaagtacagtgttaaagtgttgtaaacagttactcagtgcaatgtatagcctgagtctatccatgatggctatatccaatttgacatcacgttatggatcagtacacaatgaaaaaccaaagaaccacagtatatcttattcttaacttttgtaaaccatgttttatgggtaactttttagttttcccaaaaggctgataaatttcaatattttgaatacatcattgttaattttgagttggcagaggtaaactaaccaactaccattatgttttagtactaagggatatacctttcaataaagttaatgaaattcaaaaaaaaaaaaaaaagggc

SEQ ID NO: 237224 - DNA, 632 bp, Homo Sapiens
aaagagctttaaattctgtggcttatgaaaggagtgcaatgcagaattatgaaagaagacgttaataaactacctaacattatttattcagcttcatttgtgtcaatgggcaatgacaggtaaattaagacatgcactatgaggaataattatttatttaataacaattgtttggggttgaaaattcaaaaagtgtttatttttcatattgtgccaatatgtattgtaaacatgtgttttaattccaatatgatgactcccttaaaatagaaataagtggttatttctcaacaaagcacagtgttaaatgaaattgtaaaacctgtcaatgatacagtccctaaagaaaaaaaatcattgctttgaagcagttgtgtcagctactgcggaaaaggaaggaaactcctgacagtcttgtgcttttcctatttgttttcatggtgaaaatgtactgagattttggtattacactgtatttgtatctctgaagcatgtttcatgttttgtgactatatagagatgtttttaaaagtttcaatgtgattctaatgtcttcatttcattgtatgatgtgttgtgatagctaacattttaaataaaagaaaaaatatcttgaaaaaaaaaaaaaaaag

SEQ ID NO: 237225 - DNA, 635 bp, Homo Sapiens
caactgtgtgtgttacctagagaaaatgctgtagatccacacatttgaacagaaatgtttatcgatgccataacgtgatacatttgctttccggtgttgttttttgtttatattatttagggaaattttaccttaccatcacagattttgttactttaataatgcagaactatatttatttaatctagattttgttttaaaattatcaagtgttagcttttacaaataagaggcttataatgtggccagatattcttagaattcttttaggtctaagtgttttcaaaactttaagaaatacattctatttttgcaccatttaaaattttgtttccttttaagttttattaagtacacgagaagtttattatttttcattgaatccaagtgaatttatggatatgtacttatcttttatatgaatgtaatagcttgctttcagttcctcacaggtcattgaaattatttaaccaatgaaaacattctctgttacttccaaagtcaactatgtttatcaaaatctcactagtgtgagaaaaataacaagtgtaatattaaagcattgtgcaatatcttgagttggaacataatattcagaaaattaaaatcatttaaaatgaaaaaaaaaaaaaaag

SEQ ID NO: 237226 - DNA, 527 bp, Homo Sapiens
gctttacaaagttacgaagttcacagctttataccaaaatgtaagaaggctatttgcttataaacatttttgcagtcaggtgtcatctgatttcattcttctaatccatattcaatattaaaaaaatcagaaaccaagggtgctggagcagctctagggcatatatttctcttaaataggagaaagattttcaacagcttttcctccttgaccccctcctttcccaatttatttgggtcactaccttgaatttagagtgaatctgggaaatgtagtcaccaggtaacccagcagggccatatacttgggcttggaggtgaggttagaggttactgtctaatacagtaggtctggtttctatgaggagctcatatccacttgcataaggaaacctagtctatcccaaatcacctccaccacaacttctattcctgtctattagaccacttctcttaaacccgaggaacctgatgatttgggggcagggataaaaccattattttataaatgtggcaggtatggccttc

SEQ ID NO: 237227 - DNA, 534 bp, Homo Sapiens
ttgaaagatttgaattttttttattatcccagcaaacattacactagagaaaatgattgggaaaatacaaataagttcattaaaaacacaggctgattattcatatctattacattcagaattatgcgaaacaattagttatattgcaaagctgtaattctttttctaacaaagcatgattttataaaactttaatgttgccactgattcaattttaatacaaaatacttatatacacaatacaatataaaagtaaactgtgtagtgccttccacaaagggatatattaaggcgctttacaaatataccaatattttgacccaaattactttttgctttagattaaaatgaacaggctaaatgttccactttaaataccaaagggatgtttattaaaaattttttatctaaaataccttgggtaacagcagcagcaatgtctaaaaatcctcccactgtattctctaatttctaacacattaagtcagaataaaacaattccactcacagttttgcactttgcaacagcagaag

SEQ ID NO: 237228 - DNA, 637 bp, Homo Sapiens
aaatttcattgataaaaatgatgtgcagcacataatttataaataaaatatacaatgccatttattgtaattctagaaaagttttttacagaatgcttttgttgatttttgctgactcttctatccaacctgtttgcaattcaaccatgatatgacacaaccagactacaaataaatgtttgttactatctgattcaacaaagcagtcactcatttcatggaatggatatgggctgttactcagtgaaaagacacatgagatggttcagtgctaactcacccttctgacagaaaatgccagaaagtttccaccccattgacaggcttggagtcttgagtaccatctgggtgggtggagctggcactggcacgaaacctctccactgctatcctgacagagatggggcatgtacttcccagggccacttgccaacccagggaggttttccatcttgctggtttggtgagggaggctgctttcagatttcaagtggacactgctggcctggatagggctgaggggctctgcctccaagaggtgttcttcgctttgtggcattacctctctgaagtactttagagtactttacaggcctgctttactcctcagaatcctgctgcagagctgagggctgga

SEQ ID NO: 237229 - DNA, 591 bp, Homo Sapiens
ttttttttttttttttttttttttttcagttttaattttattagtgacaaggtaaataggtacatgaaaatcttcacagatatctacgcacgtatttaaataaaacaagagtcgagttctaagaatgcagtttcaggggtgactagtacatattatttttttatttactgtataaaaatctccaagtttataaaacttaatttgccccattattgtgtcttaaaacccagctgcaagaatttaaaaagggaattctttgaagagaaatacagatagaccctcagaggagcacagcacattatgaattatgaaggcaatcggcaatgctctaactagaagcagataacgctcagtgtgttctctgtcgtcagtatgttctctgggcagaacggattgctggaaggtttgcctgacctcagtttcctccctttctccatttgcttccatattctttttttattttttattttatttatttttttgttgagacagagtttccctctgtcgcccaggctggagtgcagtcgcgcgatctcagctcactgcaacctccgcctcctgggttcaagcgattctctctctgcctcagcc

SEQ ID NO: 237230 - DNA, 577 bp, Homo Sapiens
gttaaaacatatgtcccctctgaattctaaacagctaattctagacactaacatctggatcttataatttaccggtctggtatggacatgaacagttccagtgcctttcaacttatccctgaatttttctcttctcaaagttctaggcagtaattttaatgccctcaaattagataaagctgattacttagagcttataaattagctacactttatgacactaagaatagagctatgacttatgcatatcatacctgtcaagctacctagcaccacgaatagaactaatattaatggatggactaatacaaggatctaatatatgacagtgatagtcttaaaaacaccgatttgttattttccttatatataatccaaattcctttctatccttctggcaatgtttctactgcctgactaccttaaataactatatagtgtcaatttcttgcttgggccaggtggtggctcatgcctgtaatcccagcatattgggaggattgcttgagcctaggagttcgagatcagcctgggcaacatagtgaaacctcatctctatttaaaaaaaaaaaaaaag

SEQ ID NO: 237231 - DNA, 656 bp, Homo Sapiens
catgaattcccatttacaagtggaatggacaggaatgattttaatatttttatattaattaatgatattttgatgcaatatatatggcagcaaacctccatatgtgttacccattagtactgtgtttttttaaatggggatgaagcactaataatcactacctgtaaaataaagaacatttattattttggtgagtctagcaatcttttctgagttgtaagttcttaaaaaataaattctaacaattacagaatactgatttgacttccacctttttcgtacttttattttaccccaaagcaagcattaaacacataatcttgctaggagagaccatcttgttagtattatgaaacactggtgggagtaagaaccagtatcattgatatgcaaaattgtgcagttatctctgcaaatcattaggaaaatgttgaaaggttaaaaatcaaaacaaaatatagtggtgatccccaaaactattttgacattattttgacgatgagtaatttagtctcaaccaaaatctttttttcccattcataataatcctcctcccctcaaatgtctttaaaaaatacatgaaacagttcaataacaaaaaccgaagagcacgaactattttcaaaaacagaaaaatctctagtgccggacgcggg

SEQ ID NO: 237232 - DNA, 383 bp, Homo Sapiens
gtgctgggattacaggcatgagccactgtacccggccaaaaattttaaaaaataccaggggacatatcagcatatctgagccactctgacttttcatcagtttccggaagacacccatctccttcttacctctaggcctgtgtatttccattcccttcagcctggaaagctcttatccaagctatttacatggctggcttcttattctttagttgttagcttaatgtcaactccttacagagaccctacctgattatcttagctcaattaggccgttccttgctctagtcacttttatagcatcctatatatttccttcagagaggttgtcacaacctgaattacccggccataatggccgatacgaattcgatatcagctta

SEQ ID NO: 237233 - DNA, 458 bp, Homo Sapiens
cttttttttttttttttttgaatctattgaatgatttttaatttaatggatcaactgtcctgttaacaaaagaggcggtggccgtgtttggcgccaggcgggaggcagcagtcaggtggtccaggggctggaggtgagggctttgccgcaggcgcatgctgctctgtgagaactccgaggaataactcactggagggctataaatgctgaaggtaaccaggccaaggactccagtgcccccagaagtcgcaggggagagacagtctgtcccctctggtccagcccagggagggcctgcagcctccccatgggagccatggccaagggggagaaaggtctccagggctggagggcaggtgggcggtggggctcatctcaggggcagggcgtgggggtttgtgggccaggacccacccaagggctgggtctgggaggtgcttggggagcccagggcgacc

SEQ ID NO: 237234 - DNA, 638 bp, Homo Sapiens
gcgccatcgccatcctcacggccgcagagaggccgggccacttcgccggcatggtactcatttcgcctctggttcttgccaatcctgaatctgcaacaactttcaaggtccttgctgcgaaagtgctcaaccttgtgctgccaaacttgtccctcgggcccatcgactccagcgtgctctctcggaataagacagaggtcgacatttataactcagaccccctgatctgccgggcagggctgaaggtgtgcttcggcatccaactgctgaatgccgtctcacgggtggagcgcgccctccccaagctgactgtgcccttcctgctgctccagggctctgccgatcgcctatgtgacagcaaaggggcctacctgctcatggagttagccaagagccaggacaagactctcaagatttatgaaggtgcctaccatgttctccacaaggagcttcctgaagtcaccaactccgtcttccatgaaataaacatgtgggtctctcaaaggacagccacggcaggaactgcgtccccaccctgaatgcattggccggtgcccggctcatggtctgggggatgcaggcaggggaagggcagagatggcttctcagatatggcttgcaaaaaaaaaaaaaaaaaa

SEQ ID NO: 237235 - DNA, 623 bp, Homo Sapiens
ctcccggtggccccgcagcgcctcccggtggccctggagtgcaggtcttaccgtccgagatcgtccgcaactgggcgagctgtgcatggggcgtggctaaggccgtggtttggttacgattggccagcgggacttaagtgttgtctctgaagagcatggacattagtctggagggtcctggaagagtgatccccgccccaccatcaaatggcgcttaggtctaggaagcgggtgtgggtggggccttagggcgaggcgcagacacaccccgaagtggttggattgtataccgcaaggggctggatcgaaccccccaaagacactggaaggctgtgtggctgaggagggcccggcagatccagtgtgtcgtgggctttacaggaaagagctccaccttctctggagtgtgcagatgcgatctaggtgtgtccacccgatgggagctgcgggccgggcagatgctgccccagtacaaagctgatttggacctggggcctctggacttccctgattctctgcttgcatctccagcaaagtcctgtcccgttggctgccttcatccactctctcacttctctgccttcagagtaaaattgcaagatctgaaaaaaaaaaaaaaaaaa

SEQ ID NO: 237236 - DNA, 653 bp, Homo Sapiens
aaggacgagcccaggacaacagagagggagaaaccccagtgacagctgcatctcccaggcgggatgccgagctcctcagggacagctgagccccaaccgggcctggccccctcttaaccagcagttcttgtctggggagctcagaacatcccccaatctcttacagctccctccccaaaactggggtcccagcaaccctggcccccaaccccagcaaatctctaacacctcctagaggccaaggcttaaacaggcatctctaccagccccactgtctctaaccactcctgggctaaggagtaacctccctcatctctaactgcccccacggggccagggctaccccagaacttttaactcttccaggacagggagcttcgggcccccactctgtctcctgcccccgggggcctgtggctaagtaaaccatacctaacctaccccagtgtgggtgtgggcctctgaatataacccacacccagcgtagggggagtctgagccgggagggctcccgagtctctgccttcagctcccaaagtgggtggtgggcccccttcacgtgggacccacttcccatgctggatgggcagaagacattgcttattggagacaaattaaaaacaaaaacaactaacaaaaaaaaaaaaaaaaaa

SEQ ID NO: 237237 - DNA, 726 bp, Homo Sapiens
tccagacccatgacaacagagagcatctagccatgatggaaaggatcttgggtcctatcccttcccggatgatccgaaagacaagaaagcagaaatatttttaccggggtcgcctggattgggatgagaacacatcagctgggcgctatgttcgtgagaactgcaaaccgctgcggcggtatctgacctcagaggcagaggaacaccaccagctcttcgatctgattgaaagcatgctagagtatgaaccagctaagcggctgaccttgggtgaagcccttcagcatcctttcttcgcccgccttcgggctgagccgcccaacaagttgtgggactccagtcgggatatcagtcggtgacgatcaggccctgggcccccctgcatcttttatagcagtgggtgtccagtccaggacactggtgcttttttatacaagagaacgagccagagttcactccttcctcctggctctctatatacctgtgaatatgtgaaatagtgtaaatatgaaagaacttgtacctatcacttcaacccctgccttgtacataatactattccatccacacagtttccaccctcacctgccccctcatacggagttggatgggggccgagtgaggtaaccaggtggcatctaccccatgttttataaggaattttgtacagtctttgtgaaataaaataacgtgcttcatttgacccccaaaaaaaaaaaaaaaaaa

SEQ ID NO: 237238 - DNA, 741 bp, Homo Sapiens
  misc_feature (33)..(33): n is a, c, g, or t
agttcaaggtgaactcagtcattttcagagttntcatagtcccttcaagattgaaactcagttcctgcaatgtttgccccttttctcctcttttgtctatgctgggagaggcattgtggggagggttgtctggcttatggctcccattgtcctctgcttgataaaccacctgagctttggtcattagcagtctcctgtgcctttcacactcaggtagtgtctgcacaggccactctatgtcttttccatgctgaagaaattcctttccaggccatgtctgtgttcctcctgccacacaggaaatttttgagcatgttcatcctccaagctgaatgcagggtcttgggtagtggtcctcacctgctccagagacttctccagccattgccactctccactcaggtgatgaagctggatgagggactgcacccaccagagtcaggccagggtcctgtctgctctgtgagtccctccaattgttcttattccgagatttccattgttctgccccctcttgactcccagggctctcaagggagtgggggtagtgaagggagccctttcccaagctcccccaagagctctagtcacatcacttctgatacttcttttcccaccagctggaagaaagaactttcatttgtcttgaaatgagaaaaatgttcttagaatattttgtattactctctgctctgtcatttatggtaaacaaaataaaataataaaaaaaaaaaaaaaaaa

SEQ ID NO: 237239 - DNA, 658 bp, Homo Sapiens
gagacacctgcccaccctccgtcagctttgtccagcttgcaggaggcaccaggtctggctccttcagggctgtcacagtcctgaaaccaccacttgcctaggccacggatgcctcaagagacccggtcagcccagactggaggagtgccccaaaccagtccagtgtccacttgccagaatttcagctccttttttctgtggtgaggcaaaggctagaaataaaatggaatccgcgcccaagtgggacccaagcaggcatctttcggtggagaaacgccccccagtgtccttgacacagctgactgctggcatgagcccaccctctgcctgaagatgcaggaccatttttgccttaaaagttggggaggagggacatgtagattgtgtgcattgtgcatagtcaaggaaatcctagggccacctccagttcatttgtgtgggaacaaggatattttatagatacaaattatttttatgctgtgttgaattaatcaattaggagaggaaggggaaatcacttccttcaaactttttatctgattgtctaaaattctaaccatgcttttaacttattatttttacccagctctgaaggtcattgttcttgcctgtgtttgaataaaatcatattggtgtttgtaaaaaaaaaaaaaaaaaa

SEQ ID NO: 237240 - DNA, 639 bp, Homo Sapiens
acaccactgcagccgcctcagaatcctggagccccactctgcactggccaacccacagagtgccacagagacagcctccagtgagcagtatctgcactctaggaagaaaagtgccaggatccgccggaactggaggaagtcaggccccacaagctacctccaccagatcagacactgatccagggaaagagccaggaatggcagtgtcttccctcttgccaaaaggcctggggaggtgaaggaagagagactttaggcaagcagcccaaaggggtaaatgaaagcaagaggctgctgccactgacctgctccattcagaacaagactggatgcttctgttgagctctccattatgtgggacccattcctcaccaaaatgaggagagacagtgactgttcctgccacagtccttcccagtctaacactattcctgggctgcatgatattcccctgggagcaaagtgacaggcacttagatgcagcatttcaccactcatgctactaatcatctacctgctactactgtaaaccatggttccagcagcctgttccacacccccacaccatcaggatagcacagggaaactgtagtttaagtggcaaataaaaacatttgcatcaaaaaaaaaaaaaaaaaa

SEQ ID NO: 237241 - DNA, 628 bp, Homo Sapiens
  misc_feature (63)..(63): n is a, c, g, or t
  misc_feature (94)..(94): n is a, c, g, or t
gcccgtctcgtcctccccaaagtgctgggattacaggtgtgagccaccacgcccagccaccantacgcactttaaaacccaaaaaaagctcaanagggatggatcattgtccatggctcaggagccccactgtggggtaagtgtgatgtcgatggattaatttagacagtggtgtattcatcagggcaaaggaaattcttccagaggtgatgatgcggcagatattcccagtgctctcccaaagcaagctggccctcttgtcatcctctcagtgggcggcaccagctgcccctccttccacaagtactcaagcctgtttgtaaatactgaaggaattgatggggttgaggaaaggaggtgcatgtgaccagggtcccaaggccacagcttttcagatcctaggaagcaagtggcatttgcttgagttgtggcctcggaaggagaatgtttatctgttttctaactttgctgacaccaggattctccctgtcattgagaagaaagcattatctaattaccttcaggtggtttacttattctgtaaagaatatgtgtaaatattttgtacagagccctgtatcaaataaacagccatatgtggttactaatcaaaaaaaaaaaaaaaaaa

SEQ ID NO: 237242 - DNA, 693 bp, Homo Sapiens
ccacaccagtttccagtgcggagtctgagaccctttccacctcccctacaagtgccctcgggtctgtcctccccgtctggaccctcccagccactatcccttgctggaaggctcagctctttgggggtctggggtgacctccccacctcctggaaaactttagggtatttttgcgcaaactccttcagggttgggggactctgaaggaaacgggacaaaaccttaagctgttttcttagcccctcagccagctgccattagcttggctcttaaagggccaggcctccttttctgccctctagcagggaggttttccaactgttggaggcgcctttggggctgcccctttgtctggagtcactgggggcttccgagggtctccctcgaccctctgtcgtcctgggatggctgtcgggagctgtatcacctgggttctgtcccctggctctgtatcaggcactttattaaagctgggcctcagtggggtgtgtttgtctcctgctcttctggagcctggaaggaaagggcttcaggaggaggctgtgaggctggagggaccagatggaggaggccagcagctagccattgcacactggggtgatgggtgggggcggtgactgccccagacttggttttgtaatgatttgtacaggaataaacacacctacgctccggaaaaaaaaaaaaaaaaaa

SEQ ID NO: 237243 - DNA, 695 bp, Homo Sapiens
agagtacctccagaacagatttgagagtagtgaggaacaagccagagctgtgcagatgagtacaaaagtcctgatccagttcctgcagaaaaaggcaaagaatctagatgcaataaccacccctgacccaaccacaaatgccagcctgctgacgaagctgcaggcacagaaccagtggctgcaggacatgacaactcatctcattctgcgcagctttaaggagttcctgcagtccagcctgagggctcttcggcaaatgtagcatgggcacctcagattgttgttgttaatgggcattccttcttctggtcagaaacctgtccactgggcacagaacttatgttgttctctatggagaactaaaagtatgagcgttaggacactattttaattatttttaatttattaatatttaaatatgtgaagctgagttaatttatgtaagtcatatttatatttttaagaagtaccacttgaaacattttatgtattagttttgaaataataatggaaagtggctatgcagtttgaatatcctttgtttcagagccagatcatttcttggaaagtgtaggcttacctcaaataaatggctaacttatacatatttttaaagaaatatttatattgtatttatataatgtataaatggtttttataccaataaatggcattttaaaaaaaaaaaaaaaaaa

SEQ ID NO: 237244 - DNA, 741 bp, Homo Sapiens
acggtgcaaaagtgagcagacagttcacagtgagtgagccctcaaagaaaccaagtttccctcactgtaaacagagtgacttcaaatgacagtgcaatttacatctgtggaatagcattccccagtgtgccggaagcgagagctaaacagacaggaggagggaccacactggtggtaagagaaattaagctgctcagcaaggaactgcggagcttcctgacagctcttgtatcactgctctctgtctatgtgaccggtgtgtgcgtggccttcatactcctctccaaatcaaaatccaaccctctaagaaacaaagaaataaaagaagactcacaaaagaagaagagtgctcggcgtatttttcaggaaattgctcaagaactataccataagagacatgtggaaacaaatcagcaatctgagaaagataacaacacttatgaaaacagaagagtactttccaactatgaaaggccatagaaacgttttaattttcaatgaagtcactgaaaatccaactccaggagctatggcagtgttaatgaacatatatcatcaggtcttaaaaaaaaataaaggtaaactgaaaagacaactggctacaaagaaggatgccagaatgtaaggaaactataactaatagtcattaccaaaatactaaaacccaacaaaatgcaactgaaaaataccttccaaatttgccaagaaaaaaaattctattttaaaaaaaaaaaaaaaaaa

SEQ ID NO: 237245 - DNA, 564 bp, Homo Sapiens
  misc_feature (13)..(13): n is a, c, g, or t
tcccacgcagttntagccccccacacccttgatccgccccgcaggcagtacttcccggagcgagcggggaacgcgacgtaccccagtgcgcctcggcacaccattgctccccgaaactggggtgtccaggcggaacagcagagcccaggtcccgcggcctttacggtgccctcgctcttgggtccgcgcgtaatcggcaaagtctccgccccaacttgctccatttacggccgcagagcggctggcagtttcttcgaggacctcagcaagaccccgggcccctgcgcctatcaggtcgtgagtccaggggtctacaagtcccgggccccccagttcacgattctggcgcggacttcgctcccccaagacaacactcggaagccagggcccgcggcctacaacgtggatcagcaccggaagccccgcggctggagtttcgggatccggcactcggactacctggccccgctggtgaccgacgcggacaactgacccgccaggcgggagcggccccaccacgtgtttgcttaaagtttgcgagtccgcaaaaaaaaaaaaaaaaaa

SEQ ID NO: 237246 - DNA, 714 bp, Homo Sapiens
  misc_feature (17)..(17): n is a, c, g, or t
aaagtaactcctaacantgaatggtttgctactgaaaaagtaatgatcttctggtgcaaacagttgcttgtggacttaaaccttggcactggtggggaatttggtcagattttacaatctctgtcaaagagtagacagctgaactcacaccacacccagcttatagaatgtccatggaagatgaaggcgcaccagaagggaaggaccctgcgcagaatggacgtggtgaatggtgtttaaaatgccagatgccaaagagtaacacgattccctgctgaccccttaactctaatccatccagcaccatggagcagcctgcatgtgaggaatggaaggagcattcagggcctccaagtgacagtctctaaaatggggtggtgccaggcagattagcatgttcaaagctgacaccactgaggtcgtgttttttgggtgacaaagccaaaggagagaaaggccaaatattccagccctggccgaaagatgatcactcaccagacggaagcaagcgtgctgcgtggagcatccatgcgaagatgtcaattccatagatcaataggtttccagttttcttcgtgatatgttaatatagcaaacttaccatgatccggttttctcttttttctttttttttttacaaagtgctgaattgtttggaatatcaagagtattatgtaataaaaacttgttgatcataaaaaaaaaaaaaaaaaa

SEQ ID NO: 237247 - DNA, 718 bp, Homo Sapiens
tctgctggactccataccacatttttggagtcctgtcattgcttactgacccagaaactcccttggggaaaactctgatgtcctgggatcatgtatgcattgctctagcatctgccaatagttgctttaatcccttcctttatgccctcttggggaaagattttaggaagaaagcaaggcagtccattcagggaattctggaggcagccttcagtgaggagctcacacgttccacccactgtccctcaaacaatgtcatttcagaaagaaatagtacaactgtgtgaaaatgtggagcagccaacaagcaggggctcttaggcaatcacatagtgaaagtttataagaggatgaagtgatatggtgagcagcggacttcaaaaactgtcaaagaatcaatccagcggttctcaaacggtacacagactattgacatcagcatcacctagaaacttgttagaaatgcaaattctcaagccgcatcccagacttgctgaatcggaatctctgggggttgggacccagcaagggcacttaacaaaccctcgtttctgattaatgctaaatgtaagaatcattgtaaacattagttctatttctatcccaaactaagctatgtgaaataagagaagctactttgtttttaaatgatgttgaatatttgtcgatatttccatcattaaatttttccttagcattgaaaaaaaaaaaaaaaaaa

SEQ ID NO: 237248 - DNA, 679 bp, Homo Sapiens
acgtgccctcagcagcttccagaaccacgtcaatcttgtgcatcggaaaggaaagaccaaagttgccctcatcctggctgtggcaagaagttctatttatccaaccacctgcggcggcacatgatcatccattcaggtgtccgtgaattcacctgcgagacctgcggcaagtccttcaagaggaagaaccacctggaggtacatcggcgcacccacaccggcgagacccccctgcagtgcgagatctgtggctaccagtgccggcagcgcgcgtcgctcaactggcacatgaagaagcacactgcggaggtgcagtacaacttcacgtgcgatcgctgcgggaagcgcttcgagaagctggacagcgtcaagttccacacgctcaaaagccacccggatcacaagcccacctgacccacctgaccactgaccgcccctatttattcgtccgctcggacaccacgcccgggcttgccggggcctggacagctgcgagggccgcccggaccgcgggccggaaggaggcgcccccgccccgccccagagctgggccccctgggcaggttccccaccccgccccaccgcatccttctcggagctggtgcctggggctgcattgctggaactgtgtcaagagagcagagtgagattaaagagcgagaaaggaaaaaaaaaaaaa

SEQ ID NO: 237249 - DNA, 676 bp, Homo Sapiens
aggcaacaaaacaagactctgtctctacaaaaagtttaagaaatgagccagacatggtggtgtatgcctgtagtcccagccactcagaaggctgaggcaggaggatcgcttgagaccaagagtttgagcctgcggtgagctgtgaatgcaccacggcactcaagcctgggcaatgtagcaagatcctgtctctacaagaaattttttaaaaatgagccaagtgtggtggtgcatgcctgtagttccagctactcaggacactgacgtaggagggttgcttgagactgagagttggaggctgcgatgagccatgaatgccccactgcactccagcctgggcgacagaacgagaccccatctcaaaaaaaataagttctggttgtcattgaattgggataaacagagagcttgatgctttctgccttctgtctcaggtgatgcattgcacatttgggatatttggaaaggaaatgaggaaagaaattagggcctcctctgatctctcgctatctgcgggtcctgtccttttctcaagaccttcaccattactggtgttttcctgtcttctctttagtatgatccctcaaaacctcactaactggaaggatgattttgtctcagtttgtactcctaaataaaaagtaaacatgacacctctaaaaaaaaaaaaaaaaaa

SEQ ID NO: 237250 - DNA, 728 bp, Homo Sapiens
ctgtccagtatcccccatgtgaagtcacttcccttctcatggagtcagctgagcatcagctcagccctgccatgtccccactcaccctcctcgcctcctgtccggccctgggtttctagcggtgcctgaggcatcactctggcccattgacagatgagaggtctgaagccttcctggccacaggcatcactttctcctcctcctcatgccctgccttgtccttgtcgtgttgccatggggttctgagaggctgggagttcacagacctcagacacagctgagtccgacaaccattggggtggggctgcatcagtctccggagtggcccgccacctcctgaagcagggcctggcccacccaaggtgcctggggcaggcgggcaccgtcattcgctgccattggcttctcagatgtatttcaaggactaaagtgggctctaagatctaagatggcccggcgcggtggctcccgcctgtaatcccagcactttgggaggccgaggcgggcggatgagttgaggtcgggagtttgagtccccgtctctactaaaaatacaaaattagccggacaaggtggcgcatgcctataatcccaggtactcaggaggctgaggcaggagaatcacttgaacctgggaggcagaggttgcagtgagccaagattgtgccactgcactccagcctgagcaacaaaagcaaaactctatctttaaaaaaaaaaaaaaaaaa

SEQ ID NO: 237251 - DNA, 331 bp, Homo Sapiens
gaaatgctcttcttcctaccctccctcacctccagtataacttctgtccaggctgagaaaattcaagttcagatgtcagttcttccaggatgttttccttgatttacatcccatcaaatatgtcatgttttgtgattaacttccatcatagtactgatcataattactctgtaatataataacttaattagctttttataggttgtttgctacaggaaggcagaggctgtttcataatatccttagtacctaacagggatcatacctcagaggctcttaaatgtgtgttaaatgaacgagttccttccaaatactaaactgagttatcaaa

SEQ ID NO: 237252 - DNA, 540 bp, Homo Sapiens
gaacccacagcggagagaaactgtacgaatgtaatcaatgtgggaaagccttcagccacgctcagtactttcaaaagcatgtgagatcacacagtggggtcaaaccctacgaatgtactgaatgtgggaaagcctacagttgttcctcgtcccttcgtgtgcacgtgagaacgcacactggagagagaccgtatgaatgcaagcagtgtgggaaaaccttcaggtatctcgcatcgcttcaagcacatgtgagaacacatgctggagcgtgaatctacaaatacagtggacctgggagagtgttcaaccgtaaaaccttgttgtaaatgtgagaaacgttatttatgtagagcatgtaggaaaacctggtatagcacttattttgtacctaaaaattcagagtaggagagaaatctcttaattatgattaatatggtattgcctttacatgcctcagccttaatagtgattccttttgtattaatttctagtgtatgtttgtgatataaacatttaataaatatcctgttttgtacgctt

SEQ ID NO: 237253 - DNA, 387 bp, Homo Sapiens
aagtgctggaattacaggcgtgagccactgggcccggccagtgctttgtgttttaaggctcttttgttaacgcagtggaaacaacacaggaaatggacaagcaggcacattatcattctcaggccactgcatttagcctgggcgacagagcgagaccttgtctcaaaaaacaaaaacaaatgaaaacaaaaacaaaccattttgtgtgtctaatggaagtgacctcgtcaacaacagtcttttgttgagaaagtctgtttaattggcagtgtatttgtaatggtacataaaatgacgtctgctttataagcattctcattcctatattagatgaaatgtattaactatatcaagctttgatattataccataaaattacttgaaaaa

SEQ ID NO: 237254 - DNA, 477 bp, Homo Sapiens
tcttctgagtgggacttgatctcatttctgcattcacagcaaggtggaactgtctggcaagagcttaaattaggacctgtggtggggactttaataggcaggtggaggtttgagatccagtgagatgccagagattagtcaataggtgaggaaagatttggcccaaatcaaaagagctaaaaaaaaaataataaaataaaaataaaaataaaatagttgaacaaataaggttcatgaaaaaaaaagaaaagaaagaaaaggtaaagaaaagaaatccatgataaaatatcaaactttttaataaaaacaagtctggccctgtacttggatgaccccacctggcttgtctaaccctaatcccagccccagttttaataaaactgtatttacaaaataggcagctgggacgtggaccagagataccaatttgattttttttaaatattacattaaaatattacatcatgtgtcttcaaa

SEQ ID NO: 237255 - DNA, 464 bp, Homo Sapiens
caacttagttttattctagggtatttttaattgactcttggatggttcaccatttctcgagtaggattccttctgcaggtctcatgattcattctgttttggtgagtttagcaacaaatttcaaatttaaatcctatatgcctccccaagcctctgcacatacatatacttggtgttgagtattagtactatttctagcttcaggtttgtcctaaaaatcatcagtctggaaaaacaatgcatttaaatattcattcctagccatgagaaaagtgctttttaactttggaggaaaatatactgtagcctttatataaaaatggctttaaaaaaagtttttgaggccaggtgcggtggttcatgtctgtattcccagcactttgggtggacaaggtcagggaccgcttgagcccaggagttcaagaccagctcaagcaacttggcaaaaccccatctctaccaaa

SEQ ID NO: 237256 - DNA, 549 bp, Homo Sapiens
caacgaccaccgagactacagcctcacatgtcgcaaccacgcgctgcacatgcctcgcggggagtgcgaagagagctggatccacttcatctgagccgcgcggggaccggccacctggagcctccacacttaagctgcgcctcctgtcatttccctgctgggctctcacatctatctggttgttcttcaccaccctccaagtcctctgacctaattttctgctgcaaggtcccctggcagtggcccatcctgtcttctacttgaaacgtctgagtcacttggtctaaaaagtagcctcaggtggccagaaggccgagttgtgtaatgagttggggcagggtggtggggtaggtgcatgggagggtgggccctctggggaggcccaagcagcttgttttgcaaaggcccaagtcctcctgctaggaaaagcttttgcatgtgtcctgaatgtgtctctgtaaacatagctgttatttattattgtgatgttgggacctttagcccatagcggatgcctcctcccgaatattctcgatttaataagctaaa

SEQ ID NO: 237257 - DNA, 495 bp, Homo Sapiens
gttcaaagcagattcgttaagagtgtggggagtttttgttttgttttattttaagctgcattaaactccaatgtatatgaaaggggcatttttataattgtaagttataatgtaaaacttttcctaatgtaaagttagtcaagggtacaatgaggtgttttaaccagaaaatcgtaatcagaatattctagattgccattgtagtcgttcagtgtttcaacatctgaataaattctgtgtcattgtttagctgtcacagtgtgaaaaacgttttgattcacaaagacaagtacttaaaaagaggtaacagtttttgacagcttaccttgcacactctgaataatgttcatttaaattgatacagcctgtagttccagctacctgggaggctgaggcaggagaattgcctgaacccaagaggcagaggttgcggtgacccaagattgagccactgcactccatcctgggcaacagagtgagaccctgtctccaaaa

SEQ ID NO: 237258 - DNA, 511 bp, Homo Sapiens
atattctcaacattaagttgcatagatatgtgttcttaagttgttgaattcttaatgcatcctgtgttcagcaagttttttttaatatatactgtaccatgggtgtgttaagaatagttatactttataataatggaacttcatattattgcaatgcatatttaaagagtacttgttgaaagcataccattcacctaaagttaaaaattctggtttatttaaagctataagaagaatcatttctgggcttgtgatgttaatattgcccccctactggggttatttgtccttgggttgaagggttggaaatcgtgccaaatgggataacattgccggtggacttccaggggaggagtacgggggaggccttcgtgcagtttgcttcacaggaaatagctgaaaaggctctaaagaaacacaaggaaagaatagggcacaggtggggatggatggttggttggatatgtcacttttcttatggtaaacaattaaatccatattctctctgctt

SEQ ID NO: 237259 - DNA, 407 bp, Homo Sapiens
gccctccagagcctgtgggaagtctccatggtgaagtataggctgaggctacctgtgaacagtacgcagtgaatgttatctgatgcacaaaggaaaataataatacaaaacccataacctattcattgtattgttgcggtagatcgagctacatgctgcacagcaaaagaccttctttgcacttctttcaagcagaattattgctgtatattcactctgaactgagagatcattgcaaaaaaaaaaaagaagaagaagaagagaagaaaagaaaaaagaaataggttaagcaaattttgtggtggtgcttatgtgtgcacagacatgcatgaggcctccgcatcttccaaacttggaaagcatattttaacagcacaaatatatctacatgtttgatctaaaaaaaa

SEQ ID NO: 237260 - DNA, 445 bp, Homo Sapiens
ttgtcttgaaagtttagctattaaattcgattttgaagaaaatgaatattttgggagtgatataaatgaaaatattaaatttaagagtaatgtttcatccatggtcttgcatgtgatattcttaccattgacgctagtaaagtaaaatttgctatttcacgtgtttgtgattgtcctttgttatattcttttctgtcaaaaacaagctttctgttgctcctttgctttctcttcttccctctgaattaactccaaatcagtgagtaattgatgtctggagaaggaggtgtattactgttgcccaaaatggagagcatcctttctgggatctgttcaaagccctgcgaatacatgaaatcctggaaaccagttgaacatgaatggtcagaggttttgaatttgagtggttcggtttcttaattgttttattttaagcagttgtttt

SEQ ID NO: 237261 - DNA, 548 bp, Homo Sapiens
ggccacaacgtctccatcgggaagggggtgaccgtgggtgaggttgtgcggctccgggagagcatcgtcctccatggagccactttgcaggagcacacgtgtgttctgcatagcatcgtgggctgggggagcaccgtgggacgctgggcccgcgtggaggtacccccagtgaccctaaccccaacgatccccgagcccgcatggacagtgagagcctcttcaaggacgggaagctgctgcctgctatcaccatcctgggctgccgagtccggatccctgccgaggtgctcatcctgaactcgattgttctgccacacaaggagctgagccgaagcttcaccaaccagatcatcctctgagtagggctgccagaaggcccccagctcctacccactccccttgaggctgctgcctgcttggccagcctctgtccagaaaggaccagagaaagccaggctggatcgtcacatgccggggagcaatgtggatggcctggggactcctgggttttctccctcccgactccctaataaaccccgtgaaccttg

SEQ ID NO: 237262 - DNA, 581 bp, Homo Sapiens
gacctttctgagtacgatgctgagtattccaacgtcgaacagagattatcagctgtctgaagaggacgcgcgaatagaggccctgtgtgatgaagagacgtatttagccttgcatacggacttgcttgacgaggaggcaaggcaagaggaagaatacaagcgattgagtgaagcactagcagaggatgcgagctacaatgccgtggggttcacttacggtagcgactattacgacccgtcagagccgacggaggaggaggagccttccaaacagagagaaaaaaatgaggccgaaaatttagaggaaaatgaagagcccttcgttgcccccttaggattgagcgtcccgtctgacgtggagttgccaccaaccgctaaaatgcacgccatcatcgagcgcacggccagcttcgtgtgcaggcagggagcacagtttgagatcatgctgaacgccaagcaggcccggaactcccagtttgactttctgcgcttcgaccactacctcaacccctactataagttcatccagaaagccatgaaagagggacgctacactgtcctggcagaaaacaaaagtgacg

SEQ ID NO: 237263 - DNA, 338 bp, Homo Sapiens
gaaaaagcttacaacatttctgaagatatttgtaaattttttaaaaaactggccgggcacagttggctcatgcctgtaatcccaacactttgggaggctgagacaggtggatcacctgaggccaggaatttgagaccagcccagacaacatggcgaaacctcatctctattaaaaatacaaaaattagccggatgtggtgacacacacctgtagtcccagctacttgagaggctgaggcaagaattactcaaacagggagacagacagaggttgcagtgagccgagattgcaccactgcactccagcctgggcgacagagtgagactctgtcttaaaa

SEQ ID NO: 237264 - DNA, 526 bp, Homo Sapiens
  misc_feature (38)..(38): n is a, c, g, or t
ccttttcaacacctgtttggtcatgctagatgaagaanagcatagtatgcagaggatagatgtctgatctctctccttgaattataaattctttgagggcagatagtagtattttttgtttttcatctttatatctttcacagttcctagtatatagtatgacttaatgagtgtttgtttaacttagtttgaagctgtcaccttagggtagactgcaagacaatgtactgattagatttggcacaatttgttagtataaacggcctacttgttgtcttcatttaacttgattttccccatcttctgtcttatgaaattccagtgtcttaagtgactaaaattttgaatttcttataaagaaatatctgtgaggcagggtgtggtggctcatccctgtaatccttgctacttgggaggctgaggcaggaggcttgcttgagcccaggtgtttgaggttacagtgagctatgatcatgccactgcactctccagcctgggcagcagaaagacaccctgtctcttaaca

SEQ ID NO: 237265 - DNA, 410 bp, Homo Sapiens
ttggggtctctttttaaatagtgttaacatatttttcatatgtgtagttttgtatgttttacaaccatatataaatcgagtcactcacaatgtatgtacaatatgttcttcagcaatttgcctctctcactcagtatcatgtatctggtctcatctatattgctctatgtatctttagttctttcatttttatttgacattccattgatgaatataccacaatttatatatctgttctgatgatgaacatttggggttttgttttgttttcctaaaaacagtgctgttactgaacattagtaggcagaagaaaaaacaaaacaccttgatctgtgtctcacactttatgcaaaaattgcccaaaatgaaaggactagtccctagaataagtacttgcaaaactcagcagt

SEQ ID NO: 237266 - DNA, 571 bp, Homo Sapiens
gtgttaagggaagacactgtgggtggcatgctcttgtgatgtagtcgtaggtcggtaaaagaccacttatgaatcaagtatattctgacaagtggaaaaggatatgaatgctctcctgggtaaaattaacctcctttgcatttcattctcacattctcgcacaaaatgaattatcaagatggattttataatagctgattctctgaagaatccctgagactttgtatgattctttagtatagcagtggctttcgatgtgccaagtctacctcctcccatactgggacactcaagcaacacagatgtacacgggaattttgggtattctatactgagaatactgcacacatatcgttagtcatcttaatgttgtaacttaccaaactcttaaggtttgcaaatgtgattttgttggcatctagaaccagtgtattttttatttatgtctgaaaaataatcattgtggggttttaaaatgaaaaatcatgtagctaatgcctatccatagatgaaattgttatgttgggaaaatgtgtacttaatctttgctttagtacaatgattattataa

SEQ ID NO: 237267 - DNA, 448 bp, Homo Sapiens
agcaaaatagcaggatttgtgatcagcacacacacacagaatcaacgcatttctgtataagaacagcaaaaatttagaaatcaaaatttaaaacacataccatttataattgtttcaaagaaaattagattcttctgcataaatctaacaaaacatgtacagaatctgtatactgaaaacatatgggatttgtatatgtaaacatgcagatgaaagaaagaaaagatgatataaccaaatggaaagacataccatgttcgtggatcggaaaactcaatatggtaaagatgtcatttctccccgagttgatctttaggcttaatgcagttcctatcagaatccaagcaaggagttttgtctttgattttgtctctctagacatacataagcttattacaagatgtatccagaaaggcaaacgacctacaatagcttaaaacaatttaaa

SEQ ID NO: 237268 - DNA, 530 bp, Homo Sapiens
  misc_feature (18)..(18): n is a, c, g, or t
gtctgggagtactcctcnagcattcagaactctgacaatgacctgcccgtcgtccaaggcagctcctccttctccctgaaaggctatccctccctcatgcggagccaaagccccaaggcccagccccagacttggaaatctggcaagcagactatgctggtggtttaagcaaggtctgagcatccctcaagtcctgctgtggaccacacaaaggcaaggagctgaccaggaggtgtcagttccctgagagacagggccaaaggcagtgtacccttgagtctcactaccggccattctacgtcaacaaaggcaacgggattgggtccaacgaagccccatgagctcctggcggaagggtgctcaaggattggagaggagacaaaaccaggagcagcacagtggggacatctcccgtctcaacagccccaggcctatgggggctctggaaggatgggccagcttgcaggggttggggagggagacatccagcttgggctttcccctttggaataaaccattggtctgtcaaa

SEQ ID NO: 237269 - DNA, 481 bp, Homo Sapiens
tcagctgtattttttttttcttttccgatgtggctactagaaaatttaaaatgacacatggctcacattttacttcttttagccagtgctgctctagactgagtttgcatgaggtgtaactgtctagagctatagtgacatgtaagtaatatacatgctttgtacaaaatctccctataaactgctgattttgaaattgaagtcatgaaagacagattgaaccgatagagtcctttgagagtcaccagttactggtccactctctgtatccttttgatatttgcatttggcaagtataaacccgaccaggataggggatggggggaggaatccactggttatttgatgcaaaaaaagagagagaaaaagtgggggggtgcacttatagtcccagctacttgggaggctgaggtgggaggatcacttgagcccaggagtatgcgtttagcctgggcaacatatgaaaccccatctctttttt

SEQ ID NO: 237270 - DNA, 436 bp, Homo Sapiens
tggttttctctggctctaaagccagcactcttgttctctggacagggtcttttaatcacctagtgtatgttcagttttaatgtagatacaagaaatgagacatacatttcctgcccacaaggaatttacagtccagctaggccaaaaggaattggccttagaaagtaatcagtgatgctaggtgcggtggctcttgcctgtaatcccagcactttgtggggctgaggcagaagagtcacttgagctcagcctggacaacatggcaagaccctgtctcttaaaaaaaaaaaaaattggtgtgcacctgtagtcctagcaactcaagaggcagaggtgggaggatcactcgagcccaggaatttgaggctgtggtaagctgattgcaccattgcactccagcctggcagataagggaagactctacctcaaaagaaag

SEQ ID NO: 237271 - DNA, 422 bp, Homo Sapiens
cagagatctatttacaagataggtttttcatggtgttaaggttttgtggtgttcaaagataggaaaaggaagttgaggcagtgcagtatatgctgtttgtctcattaggttattaactatttgaggttagggataatgcttttccttaattgacaatgtcatgctctatataatgtcattatttaatatgactgatggaaatataaaatataaaggtacactatgactcactgaatctaagtttcacagttttaatattttagcatttctaaaattggatagaggtcttacaatatatcgtctttggccaggcatggtgggtcatgcctgtaatctcagcactttgggaggctaagacaggaggatggcttgaggccaggagctcgagactagcctggtcaatacagtgaccccttgtctct

SEQ ID NO: 237272 - DNA, 523 bp, Homo Sapiens
  misc_feature (87)..(87): n is a, c, g, or t
actcctgcttctgtacaagaggctcatgaacacagctaaaattgagaccatgagcaaagtgcaccaaaccacacacgaggtttgtanacacacgaggagtgccacatcatgctagatttcagtgagcgcaatggcaggcacacgagaagatgttggggtgggaagaaaatatcccaccttgctgtttagaaccactgtgctgtgagcgctgagacggcagaagagaagccatcccacgcagcacttgcaaggcgatccgagcaccctgtcactcttgtaaactagaaagggcttcttttacttgtgtgaccttaccattcttgaaaataaaaagggagaagagaagggaactaaagtgcaagctaaaagagaaaagctccaagaagacaagcctaccttcaaaaaagaagaggtaaatatgattgaaaagtaatgatcgtaaagcaacagaaaaagcagtcagtgttccaagatatctcaggtctgatgatctcaaaattgtaacctcatatccagtgtattt

SEQ ID NO: 237273 - DNA, 452 bp, Homo Sapiens
  misc_feature (12)..(12): n is a, c, g, or t
ttgatttttctntgattccatacaacagattgcttgcctgggttagtgcttattttaagttcttggtgcttcttgtctgacttctgtatttgcaattaaaaacaacatgaccctccccacctgcagccagatatcgttagaaattcaacttcgaaatatattcctatcactcctgttttcactttaatagaaggctgttgcagtactgcatgatgggctcttataaaacttctactatctgctaattcttatctttgtgacaggattgtttgacactgagcaaggaaacacaataaggaagtaatttggatgctaggctggcagaagcctgcagctgtcaaccacagcctgccccagtgtgttcaacacggtggcattgttctccctgacttcataatgagcaaatgtttcacatttgaacttaaggaataaatttttactaataaaaaaaa

SEQ ID NO: 237274 - DNA, 459 bp, Homo Sapiens
atatcagtaatcactgattatgatcagtgtggaattctgggaagcaggagcaagttaaagggaaacgtgtgctgtaaattatagactgaaagtttggtatcagtcccaaagtattattcagatggtttgtgagcatttagagtacctaaagagcaaatcatggatttcataaacatgggagagactagaagcattctgcagcaataagtggaaaacatccttggccaggggcaaatggttgatgaatctaacagggtgataagtaataggaataaatctaaatccttcctgtatggttcaaaaaagccaagagtactggcttggaattagagtaatacaatttagcagcaatatgtatgaagaagagattgaggatttggcttcaatgcaaatgaatctacaatatcatccatcttgtataaattatccctgtgatgttagtgcctcaccatcccctgc

SEQ ID NO: 237275 - DNA, 555 bp, Homo Sapiens
ttccacactttctgccctagacaattagggtctgccatgagtcccccactctgctgagggtgtgttctaaaaatgaactaatattattagtcattattgatattcaaatccaatttgtccaaatagatcattagcactctgagacctgggttccctcctagctcctgtgacatctatcagagtgattaaatagcagatgctcagtaaatatttgttggtggcaaatacatacttggcaacctccagtgactttacctggacagtaaaataattgcttgaatgcataacccaactttgaggtgagcctgcaggagctgctgaggcacacctgtgtgttgggctctcaaggcagccagaggtgagtcggcagctgagatcacgctccagggattcctgcgtcctttaataagattctggggtgggcacagttctggggtggacatggtggctcacgcccataatcccagaactttggaaggctgaggtgggaggatcgcttgagcttaggagttcaagaccagtctgtcaacccagtgagagcttgtctctaccaaa

SEQ ID NO: 237276 - DNA, 466 bp, Homo Sapiens
gtcatggtgtgctcctgtagtcctagctacttgggagactgaggtgggaggatcaattgaaaccagaaggtccaggctgcagggaactgtgactgcaccactgggctccagcttgggtgaaagagcgaaaccctgcctcaaaaagaaaaataagatggatgtttctgcattaaaattagggagttgtcgtataatgtagttgcataaactagtattctgtgcttgtgtggttaaagagccttcgtagaaaaaatcccacatttttcttaaaaggaaatcttttggccaggtgtggtggctcacatctgtaagcccaacactctgggaagccgaggtgggcagatcacttgaggtcaggagtacaaaaccatcctggccaacatggtgaaaacccgtctctactaaaaatacaaagatcagctgggcatggtggtgcgtgcctgggtgacagagcgagactccgtcc

SEQ ID NO: 237277 - DNA, 562 bp, Homo Sapiens
aaagatctcacataaagataaaaggggatgtgttggcttgtaatttttgttaaaagcaatggtatatgttgtataggatagtgtattgggatcaacaggtttttgggtttttttttcagcccactgacattgaaagggataaacagttttttggttattagtgagcagttttctctcaggccatagtgtaggggtttgtggtcatgtagatgagagataggctgggattaaaatttgttatggcagtaataagagcaacagagctagactctgtcaaaaaaaaaaaaaaacatagttagtagaagaaaaaaatcataggattataggattagagcagaaaaaaataaaataaaacaaaaactacaaaagattaatgaaaatatttggccttttagaaaagttaaaaattggcaaaccttcagcagactaaacattttttttaaattcaaataaaaaaacgagttaaaaaaggagatattacaacagataacacacaaattcaaagattggtttgtggctactataagcaactgtatgccaatacattggaaaatctaaaaaa

SEQ ID NO: 237278 - DNA, 420 bp, Homo Sapiens
catttgtgagaagggtagagagtcaggtcaaggttcttagtgagatcaactctttctctgccagtttgttaactgaattctactgaaagctagagctctgttgagtaatcttttaaagctgcagctacccttttgagattaagtaatagctccctgtttgtgccttgttagggctagggatgtttaaggatccttgcccttgctagtcctagcatgttttgttgtcccataatagttctttttttaaactttcctcaattacacaatttgatcttgttcctaccagtacctttgctggtacaacctaaaactcaacagtttcactcttaggcatttacccaagagaaaccaaagtaggtacattttccagaagacatgttaagaatgtaaacagtccgctttggatgctttggtaatagc

SEQ ID NO: 237279 - DNA, 423 bp, Homo Sapiens
ccagaagaggttgttcacaaggagaaacgacgaacaaagagcttgttagaagagaaacttgtgttgaagtctaaatcaaaaactcaaggcaaacaggtaaaagttgtagaaacagaattacaagaaggtgccacaaaacaggcaaccactccaaaaccagacaaggagaagaacacagaagaaaatgactcagaaaaacagcgtaagtctaaagttgaagacaaaccttttgaagaaactggtgttgaacctgtattagagactgcttcttcttcagcacatagtacacagaaggattctagtcatagagccaagttaccattagcaaaggagaaatataagagtgataaagactccacttccaccaggcttgagagaaagttgtcagatggccacaaaagcagaagcttaaagcatagtagt

SEQ ID NO: 237280 - DNA, 470 bp, Homo Sapiens
gaggcaaaaaaattaaagctctccaactgtggggtattcattctgttcactgtggccagtgtggtgatcagtactggccacaccagtggccaaagagaactgcattcatcatgtggctgttctatagctgtgagctgtggtgactgttatttttcctagtgatagttttcagtgacagcatagattctggtatcatatccaaggaataaacaaacactgtttttggctttttgtttttttgtttttgacataaaaataataagctatttttggcatatgcagacttttcacaaagtgattgttttcttgagctctggactacttggtaacattcataagttccttcactttgtagctccctctttccttccctccactccctgcaaaagagagcagaactgatttttcagaggtgatgtttacaacagttcaacacactcgaatgagcacttagaataatgtcaaaaaaa

SEQ ID NO: 237281 - DNA, 535 bp, Homo Sapiens
  misc_feature (44)..(44): n is a, c, g, or t
ctttcctgtctgtttggtgcagctgaacacatgggtctatatanagttcttttgctctcaaatataaatagcagctcaaaagatagctggaaggttgcaggaagttcttagcaaggtcaaaaacaattctcatgtgaagccatggtgatttcttaccgtttgctgtcatgataattattggggcatataatcggatgtgctcttcaatcatttcgtgagattttcagccaacaataaaagggttttgttttgttttgtgttttggtagcagtggtggtggtggtggtggtggtggtaagtatccagtctcttgaccaggggtgttagactcttgggtattcataaggttttcccggggcctggcagggcctcctcctgactcccaatcgttcctggccatcctggaagctacctctgcatgttccacctccgcatgctcccagagctgtgctgtcattcttgatgcttttatttacaccgatactgactagcatatagatcccgaccgggaaaataaaaagttatctatgataaa

SEQ ID NO: 237282 - DNA, 507 bp, Homo Sapiens
ctgctgctggaagcgtctcctttcccatctataaactgagaatcagaaaaactggcgtagaagataacacacagccgtgagccatcgcgcccggcctggagtttctactgtgcaccaggcactacctttacatgtattgttttatttaatcctcagtcagccgtgtttggtaggtgcagttagtatatttccattttcatctgcgcaaacagattcaggaactttgtaatttacataaggtcacattcatcctaattcacaaaatcaagatttcacacctattcctttttctttccagtgcctgtgctttttctctcataccaaggagaagtaataagcctaacgttttaaacctcacaaaagtacatacagaaaagtaaatagcctaattttgcaactaatacaaatggcgctgtacttctttggtgatggtagatttataatttttgaagtatggtagattcaaatgaaccactgaaaaggcatttagtttcttgtcccaaataa

SEQ ID NO: 237283 - DNA, 631 bp, Homo Sapiens
tggtaaagtcaacataaaattgccaaacctgtcaccaaaaatgatggcaaatctgtatttttctcttaaaccgtgttataaaagctgtaataaggtataggctgagcatcatggctcatgcctgtattcccagcactttgggaggccagattccttgagaccagtgtggggaacatggcaaaaccttgtctctaggaaaaatagccaggtatggtggcatgtaccttggtcttagtgatgtgggaggattgcttgagcctgggaggcggaggttgcagtgagctaagattgcagcgctgcagtccagcctgggtgatagagtgagaccccatcttaaaaataaaataaagatataaatgacatccaataaagtacacatatttgagctgtaggataagtcttgaattttattataatcccgtgaaaccatcatcagagtcaccataatgaatttatctaatctatcacctttgtatttacttggagcctttataaagtttttctctctgctcttcaaacaaccattgatttactttgctgtatgatggagtactttccattttctggaattttctgactgatgtaataaagtgtttcctcttataaaaaaaaaaaaaaaaaaaaaaaaaaa

SEQ ID NO: 237284 - DNA, 516 bp, Homo Sapiens
atggcaagtggtaggaaaactgttgtccttggacataattgttttttaggagttgcttttgatacccatatcaatttataattctttgtttgaaatgaagtctttacatggttcattgaagagatagattggttatttcatactgataagcattctactcttatttgttatgcattttccttagtgatatattttacttgtactgaacttgaaaatataaaggagaatacatttctaaattattttaaatggctaacactatgatttgtcttatttaaatagatgtctctgcaccggtaagattaatacaatatgtgaatgtctattttttatatcttaactcacaatgagtatatgaaagataatacccgaatatattacattattcatttttagtcatgagtttatttcaataagtttttctaattgtagatactgttttttattctttccttgtatctaaatataaatcaaccattaaaatcattctaactctaaaaaaaaaaaaaaaaaaaa

SEQ ID NO: 237285 - DNA, 473 bp, Homo Sapiens
cagtggttttctaatttggtttctgacttctgccagcccccaacccattcctttctaagattcgatactctggctgggctctggctgacttccagccttctcagatggagccaggattacatctgtgtctttgcattttgtatccaggtttcggctgagtccagctcctccatgaactccaacaccccgctggtgaggataacaacacgcctctcttcaacggcagacacccccatgctggcaggggtctccgagtatgaacttccagaggacccaaaatgggagtttccaagagataagtgagtacttctcttggccatgtcccaggatggagactcagctataaatggggatattggattaacattttctttttatgacccttagccacaaaggtcttggtgtgatgatgtcagcaggagtaagattgtatttctaaataaccaactcctggaaaagaaaaaaatggattt

SEQ ID NO: 237286 - DNA, 643 bp, Homo Sapiens
ctgtccttagctttctttcagcccttgggtcagggtataactgaagcatttgaacataatcaagcatatgtttgaccactttgctgactgtattgaaaaaaccctcaccttactctgaaagaagcatggcaacagtacaatattgccgatgctttggtagtgataaaagaggtgatgggtgatataaaatcagccactcttaagcttgctggaaactgtgggaggatgtgtgaatgatgcatatttccctagagctaatgaagaagttaaaaaaaatcttagtgtctgcaaaacaggtgggtttaagatttattgatattagggaaagtgaaattaatgagctactcaagtttctgtctttggtcatcactgagagtctatttccataggaagaagtctttgcagaggaaattgaatgctgtctgatgctacaattcatatggatcctttcctggattgaagcctgacttttaaaaaaggtttcaataaattgcttatacctatgaagagatgcaaaagaaccttcaaaataaagcaaaggacttgaagaaagagaaggaagacatgaagaagaggatgtcatttaggtgaaggtgatggatacagaatctgagtctgaggggagcctggttgacacctcgtg

SEQ ID NO: 237287 - DNA, 638 bp, Homo Sapiens
cagggtggtcaggccgtgtgcactgtggaacagagctgagaccccggccccccttggactggcacagggtcctacagagtcagaggaggcctgagatttcgaatgggcagtgaatggcctcttctgccagccacaggcaggatgctccttgatcacggcatcccccggcggtagtacagggtgagcttgcaggagggtctgcaagtgcagacagcagctggggccaaagaggtgttaggttcaaaggctgcgaagagaataggctactggaaaaccaaacccaacagaattcacgtccaaaaatccacattctccatcgcttctcagccttttggctaagattaagtattaaaaaaaaaccaggctctgccaggcgcagtggctcatgcctataatcccggcactttgggagtctgtggcaggaggattgcttgaggccaggagtttgagaccagcctgggcaacatagcgagaccccatctctacaaaagattaaaaattagctgcgtgtagtagcatatgcctttcaacgtagctactcaggaggctgaggtgggaggatcccttgagccgaggagtttgagtctgcagtgagctatgatcgcaccactgcattccagaccccatctcgcctcgtg

SEQ ID NO: 237288 - DNA, 657 bp, Homo Sapiens
actatcagtatgatctcagcctcagttctcttgtctgtaaaatggaagaactggattaggcagtttgtaagattcctcctaactttcacagtcgatgacaagattgtctttttatctgatattttgaagggtatattgctttgaagtaagtctcaataaggcaatatattttagggcatctttcttcttatctctgacagtgttcttaaaattatttgaatatcataagagccttggtgtctgtcctaattcctttctcactcaccgatgctgaatacccagttgaatcaaactgtcaacctaccaaaaacgatattgtggcttatgggtattgctgtctcattcttggtatattcttgtgttaactgcccattggcctgaaaatactcattgtaagcctgaaaaaaaaaatctttcccactgttttttctgcttgttgtaagaatcaaatgaaataatgtatgtgaaagcaccttgtaaactgtaacctatcaatgtaaaatgttaaggtgtgttgttatttcattaattacttctttgtttagaatggaatttcctatgcactactgtagctaggaaatgctgaaaacaactgtgttttttaattaatcaataactgcaaaattaaagtaccttcaatggaaaaaaaacctcgtg

SEQ ID NO: 237289 - DNA, 481 bp, Homo Sapiens
gccattttttttttttttttttttcactatgaaaagccaatttatggtcaaggtgggttacatctcacacctgaaatggggaagtagaaacagttgcgtttgagcatccctaattgaaatgctctgagatcagaaaatttctgagcactgacgtgatgccagaagtggaaaattccacacgtgacctcgtgtgacaagtcgcaaagcaccaggcatacaacagtttatgcagcgaccctaagagaaaaaaaaacccagccctcttcagctgcagtgtatcttcttatacaaaaactctgtttcatgcacaaaattatgtgtatgagacatatacacgaaacacaggtgaattccacgttcagacttgggtcccatccccaaggtctcattatgtgtatacaaatattcaaaaaatgcaaaacaattctggtttcaagcatttcagataagcaatatatatatattctattttgttaataag

SEQ ID NO: 237290 - DNA, 505 bp, Homo Sapiens
  misc_feature (23)..(23): n is a, c, g, or t
gccattttttttttttttttttntgttgttgttcttttttattttaaggggaaaatgttgaagcaatttaaaagtgtactgcaggagaataaatatagcgatattgttaccaaaaaaatccaaaaaccaaaaacccaaaacccaagaacaaaaccttcccaaggtgctgacaaagccccgaatctccaggctgcaaacattctcctggctgctcatttgtgaggatccagtgacctgtgtccactgctgggaagcgaaggcatctgctggtgtggtgcagccatgctgggggcatggcgaggcctgtggatgcagttctctgcgctctgccctgtgctctctctgacgtcttccacatccccacctcttcaccctctccggggctttcttctctacccatctagggactacagcccagaaaaatgctaccacaccacacattgcatttagttgtcacgactctctagtccccattattccagagcatcacctcaatcatttcttg

SEQ ID NO: 237291 - DNA, 704 bp, Homo Sapiens
  misc_feature (39)..(39): n is a, c, g, or t
ttcttcctcacctggatgagcttcgaccgctacatcgcnctggccagggccatgcgctgcagcctgttccgcaccaagcaccacgcccggctgagctgtggcctcatctggatggcatccgtgtcagccacgctggtgcccttcaccgccgtgcacctgcagcacaccgacgaggcctgcttctgtttcgcggatgtccgggaggtgcagtggctcgaggtcacgctgggcttcatcgtgcccttcgccatcatcggcctgtgctactccctcattgtccgggtgctggtcagggcgcaccggcaccgtgggctgcggccccggcggcagaaggcgctccgcatgatcctcgcggtggtgctggtcttcttcgtctgctggctgccggagaacgtcttcatcagcgtgcacctcctgcagcggacgcagcctggggccgctccctgcaagcagtctttccgccatgcccaccccctcacgggccacattgtcaacctcgccgccttctccaacagctgcctaaaccccctcatctacagctttctcggggagaccttcagggacaagctgaggctgtacattgagcagaaaacaaatttgccggccctgaaccgcttctgtcacgctgccctgaaggccgtcattccagacagcaccgagcagtcggatgtgaggttcagcagtgccgtgtagacagccaagcc

SEQ ID NO: 237292 - DNA, 583 bp, Homo Sapiens
  misc_feature (191)..(191): n is a, c, g, or t
ccttaatctgtcacccaggctggagtgcaatggcacgatctcagttcactgcaacctccactccccaggttcaagcaattctcctgtcacggcctcccgagtagctgggaccactggcgcccgccaacacgcccggctaatttttatatttttagtagagacggggtttcgctatattggtcaggctggtnctgaactcctgacctcaggtgatccacccacctcggcctcccaaagtgcttggattacaggcatgagccactgcgcctggcccaaataatcttttaacctgttagataatttcacttgtgttcattgcttgcctgtttctccctgctagaatgtaagcccttgagagctgggatcttgttttgttcactgctataccccaagtgcccagaacagtgcatggcacaaggtacacactcggtcaaatctgttgaaggggccaggcatagtgtaatcccagcactttgggaagcgcaaggtgggatgatcgcttgagcccaggagtttgagaccaacctgggcaacagagtgagaccccatgtctacattaaaaaaaaaaaaaagtcacctcgtg

SEQ ID NO: 237293 - DNA, 672 bp, Homo Sapiens
  misc_feature (654)..(654): n is a, c, g, or t
  misc_feature (658)..(658): n is a, c, g, or t
  misc_feature (660)..(660): n is a, c, g, or t
ctattctgaaacgcagtctcctgacgtgaaaaatgaagaaaagaacaaatactggccgggcgcggtggctcatgcctgtaataccagcactttgggaggccgaggcgggtggatcacttgaggttaagagttcgataccagcctggccaacatggtgggtgaaaccccgtctctactaaaaatacaaaaattagccgggcgcggtggtgggctcctgtaatcgcagctactcgggagtctgaggcaggagactcgcttgaacctgggagacggaggttgcagtgagcagagatccagccactgcactccagcctgggagacagagtgagaccctgtctcagaaaaaaaaaaaaaggccgggcgcggtggttcatgcctgtaatcccagcactttggaggccgaagtgggcagatcacgaggtcaggagttcgagaccagcctggccaacatggagaaaccctgtctctactaaaaatacaaaaattagctgggcgtggtggtgcaggcctgtaatctgagctacgcgggaggctgaggcaggaaaatgcttgaacctgggaggcagaggtgcaatgatcatgccattgcactccagcctgggcaacagagcaaaactgaatctcaaaaaaacaaaaaaaaaaaaaaaaaaaaangtcntntgcggcctcgtg

SEQ ID NO: 237294 - DNA, 755 bp, Homo Sapiens
  misc_feature (20)..(20): n is a, c, g, or t
  misc_feature (74)..(74): n is a, c, g, or t
tgattttgaagagtatttangaacagagggctccagaccaggtgtggtggctcacatctgtaatcccagcactntgggaggcagaggtgggcggatcgcctgagatcaggagttcgagaccagcctggcccacatggtgaaaccctgtctctactaaaaatacaaaaattagccgggcgtagtgacacacgcctgtaatcccagctgctcgggaggcagaggcaggagaatggcgtgaacccgggaggcggaggttgcagtgagccgagatcacgccactgcactccagcctgggtaacagagcaagactctgtctcaaaaaaaaaaaaaaaaaagaacaggggcctctgcctcagtttgcccgggagccagccagggcccatcctaatttggagcacagtcttcccggtgcctagacatgccaaggcccctcccacgtggtacaccctctccgtttagtacctgaccacctgtttcaaaacgcaggtgtttctggtttagaaacttggaaggcggaatgtgttttcgtgtcttctaggaagggtctgctgaggaccagaccacgtaagcctgagtggatcctgactcagctgcagcccttacctgcctcgtgctgatgatctatgcatggcgttatgtagatcacgtgcggcagagacagccactgtcctgtgtgcgggtttttaaaacagctgccctggatgaaacggaataaaccagtgatgctattaaaaaaaaaaaaaaaaaacctcgtg

SEQ ID NO: 237295 - DNA, 454 bp, Homo Sapiens
aggaccacaaccgggcccgtaggggctgcgacccggcccgggagagggagcggcaccgccccagcagcccccgcgcaggcgcgccccacgccctcgccccgcaccccgaccgcttctcccacgacagaactgcacttgtagccggagacaactgtaacctctctgatcggtttcacgaacacgaaaatggaaagtcccggaaacggagacacgacagtgtggagaacagtgacagtcatgttgaaaagaaagcccggaggagcgaacagaaggatcctctagaagagcctaaagcaaagaagcacaaaaaatcaaagaagaaaaagaaatccaaagacaaacaccgagaccgcgactccaggcatcagcaggactcagacctctcagcagcgtgctctgacgctgacctccacagacacaaaaaaaaaaaaaaaaaaaaaaagtcatcctcgtg

SEQ ID NO: 237296 - DNA, 770 bp, Homo Sapiens
caagtgttaatcctgggatcgtattttatatcatattcacatattgttttttttaattggtgttagatgacatgattaataaaaaaggcaagatattttcagaatttgaatttcagttttttttttcttttgaaatgtccctttaagatttttttattctaaacaaaataaagaaaatcctgctgctctggtccttgtgataagcctctcttcggcatctgaggagcagctgcagcaaaatctaggggtgtaagtgtatcaggacttatgtgacttatattttggggagatgagggttgggtttttttttaatgctacgtgacagtttgaaaccttcacagttatcctctgggggtaaatcaattcttcaacccttgggtgtgtgagtttgaggcagggtcatttgtgtgatgtgtttggccttaccaaagcaaaagagggtgcaagaatgtgggagtatgtctgccggtttcaacacacacagacaaacacagccacacgcgcacacaagtataagactttttgtattactgctccctacttaacatacttgaattctcaaatttcctttggggtaaaaaaaaaaaaggatttgaaaccataaagtgttctgaagaaattaagtctataaaaagcatactttcttttttcttttccttttttccctccacagacaatgtcctctgttcaattcctaacgcaaactacaataaatggtgacacacgttcagaaaaaaaaaaaaaaaaaaaaaaagtggggcggcctcgtg

SEQ ID NO: 237297 - DNA, 396 bp, Homo Sapiens
tggaaaaacattttattacacatattcaacttgcttccaatgaaatgattaatttttctatataattttcatgtataatggcgtccaatgtttgtcttccgttttttttcctttcaaaaccagccccaaaaagtaaaacaaaaattccatgggtacagtatgtaatgcaagttaacgaatggaaaatagatacatttgactctgaaacgaaaaaaggacaatcgtattgccatagaggctcttttcctgcattctgatcctatccagcaacggtcagctgagagggtttaattttgcaccaataaaaatagcaccgtagggtcgtgagactctggtaacacgtgcgttagtgacacgtgtgaagcacaaaggtacagtactcgaggaatccacgac

SEQ ID NO: 237298 - DNA, 321 bp, Homo Sapiens
tttttttttttatgttttccagtttttattaggatatttggcatggtacagataacaacttgtcccttaccaccaaacacataatagctggtcaaaatgattattttcaaaggaaactatttaaaataaagccactagtacatataaattaggaaagaaaagtcaagctggagccatcttgatattctaatgagcaggcctatctagttctacatcttttttttttgagatggagtttcattctgtcgcctaggctggagggcagtggcacgatcttggctcaccagaacctccacctcccgagttcaagaggaattcacg

SEQ ID NO: 237299 - DNA, 418 bp, Homo Sapiens
tggggtctctagccccggtccaccatcacagcacccttggagtgagtgtcagggagtgtgggatatttgcccaaatccagccaccacccctgtccgagtagagcccacacagtattggaaagagaaatatagccactgctttcactcctgggagtaggggtgccctggttgctttcaccagcctgcaagagtatagtcagggtgaggtgctggagaacatcaacaacgatctgggttcaaatcccagctttgccacttattagccatgttgctgtgtcaacttctctgagcttcagtttattccactgttgtgtaaagataatgcctcttagggctgttgtgagcattagcacagtgcctggcatatagtaaatactcaatatatggtagccatattataattgtaattgttactacc

SEQ ID NO: 237300 - DNA, 535 bp, Homo Sapiens
tcagtttcatagtaaagataggtaagtagtgtctggataatgtccagaggatagactgaaactctgtgataaacgtgagcaggcagcaggatgctacctgataactgagtataacagcatgcaggggaggactgtgtggctggaggcagctgcagtagaagttggcagtgccactgtggacttttaaagggacaactctgggtacaagcctgaagtgtaaggaggacataaaattaaatacaattgagcttgtctccttgaaaactggttctctctttttactacattaaaaagatcaagtggacagttaagtcattaattcaggtaattccaatcacaaaactacttttttcctgaagtgtcctaatcattgatttttaaaaatgatatttctttcatcataaattatcagcataattgctttggttccatatttcatattaagcttgggctgagtgatgtttaaagcctcctgcttaccttccccccttttcttcctattttattttacttaatacctaaaaaaaaaaaaaaa

SEQ ID NO: 237301 - DNA, 436 bp, Homo Sapiens
caaagatctgaaaaccccagtcagttttctatgttttgtcctctttcacacccttccgagagttctatctaatgtaactatgaatggtcactgtgtctttatttttggcccagactcttctcaatgcttcagcctcacgtatccaactacctactgattattctgcttggacatacatcagccattttaaatttggcctgagttgaactcattctctttctctcccacattcattgtgttttcatttgttttcttgaaatctcctggttaagtcagttcaggttgctatagaaaaaaattttaggtctggcgtggtgtcttgtgcctgtaatcccagaatgttgggaagcctaggtgggcggattgcttgagcctcaggagttcgagaccagccagggtgattatgaggaaactctgtctctgcaaaaaaaaaaaa

SEQ ID NO: 237302 - DNA, 451 bp, Homo Sapiens
tgagcctgaaggtaaaccccagtcccttggcagccttccttggacactggctttctaatctttgcacagaaatagcagttaaacccctctctggctttagagatctaaaaatattatttaagaacgaggttccttctcatgatgtcttgttttaactctgaaattctgtggtcacatgtcttggaatcgaatgaacccatccagttccagcgtgtacaacagagtaagagaaagacttggttttatactgagacattctagaaatccaggagttcttctaggcattctgttgctacagaagcactttttctggacactttaagtcgagcagtggtttctgtctgttccgcttacttaagtgaacataagcatgatttgtcttttaaaaggtaactgttttagtactcaggtagaatttgtgctttttccttccctacatactttcctactt

SEQ ID NO: 237303 - DNA, 417 bp, Homo Sapiens
acagaagggggctctcaaatccgcccatgcattgagatcttcgctcttcacagaggtgggattagtagcttagtctcagtttcaagtggatgaggttgtgtaatttcaagggaaaattacatccggcaatacctcttttgctaatggaactcaggaaggaaaggccctcagaaaggctggagtctggaatctaggcaggtagctggcctgacagtaaccttgatccaggtaaaccaaagtggaattctcgagcctggaattgatgactcataattgttttcatttaacagctcaggatgtgtgaaaaaaaaatgctgtttaatttgtaagacctaagtttacgactgattttggagaatacatttgtgataatgtatctatgttttcctggggtggcggaggaaatgatttctacct

SEQ ID NO: 237304 - DNA, 426 bp, Homo Sapiens
ggtggttgtgggtgcaggtgtgtgcaggggtgtggggggcgcaggggtgtggcttagctggccccgcacccaggccggggaggctcaagttcgccactttactcagaccgatgcacagtcttcccattttacacttttttaataaacataattgcaatattttaggtgggctgcgagctgcagtcagccttcacgtctggcctcagtccccgtgtcagtgccgctctgcgtgtgcgtgtgcgcgtgtgtgagcctctacacatatatatatgtacagagccttaaaccacatcgtggcggtgccgtctgagctgtagcgggtggctttgtttccagtttttgtacccgtgtccttgtctcccctcctcccccatctggggatgtgtctgtgttccacaccttgaaataaacagacacatacgtgtt

SEQ ID NO: 237305 - DNA, 703 bp, Homo Sapiens
cctcattcctccctcacagccatcaccagagcatgtttcttgcaccaggtcaacagccagtaagagccagtaagagaggcatgaaaagcccactgtccacacatgttgcagcttctttttggagaatgttttccaggccttttatgttctgtctctgattctcagaactctgcaaggtcagtgtgaccaccctgctccaaatctaagaaaacagaggtttccagaggaaggagaaattgtgcccagggtcacacagcttgcaagaggcagagtggaagttgattccagctctgcctgcaggaccctctcatttcccctctgtttcccttcttgacaaaggatcttcttcactctggaggtgccacccatgagaacaaagagctctggagagatgtggattcctgaagagctgcaggggaactgggagagggttttctgacagaacaatctcacctcaagaagtcacttaggcatggctgtaatatttcttttcactcccaggtaataccaaattgtaagtgcactaggacataaagaatacttttgtccatggaaaaatgaggtgggaattctaaacaaagcaagttttaaaactgtgtttcacttcaagtgtacaagtcccatcacgtgtaatcataggactcggcagcttttgaaggtacagaggccacacaagaaccagcttagctgagcatcatttacc

SEQ ID NO: 237306 - DNA, 906 bp, Homo Sapiens
  misc_feature (58)..(58): n is a, c, g, or t
  misc_feature (93)..(93): n is a, c, g, or t
agaacagttttaaaacatttccccaagaatggtaacatctgcccggcaacctgctgcncccgggtcccagtgccccgcccttgattgtgcacnggtgagaaaggatcctctggtccccacggtttcatgccgacttcattcataagcacgtgaaaggctcacggctgcatttgatgccagaaggcaaacacaacctgcatttgcgttttgcagatgaattcaacaagttagcagaagacttcctacaatgagaatgcacactccagtcttggtggttccttcgtgtggggcttgatcgtgttgctgcctgttaacatgatgcctttgaaactctccgcctttgaaactttctacccctcccttcaatcttatcctaaccaaatgagaataatgacatattgaaaacagcctctagcttcaggctgggcacggtggctcacagctataatctcagcactttgggaggctgaggtgggagaattgcctgagcccaggagttcaagaccagcttgtgcaatatagggagactccggctctacaaaaaagagtttttcaaaattagccaggcgaagtggcacacatctgtggtcccaggtgctcaggaagctgaggtgggaggatcacttgagcccaattcaaagctgcagtgagctgtaattgcatcactgcactccaacctgggcaacagagtaagaccttgtcttaaaaaaaaataaaaacataaaaaaaaataaaaaaggaataaagcctctaacttcaatagctatgaaaattaaatccgattttctaagatgaagttgtgacaagttataccattgtcttaacaggtgaattcctgccataatttattttcaaataaattttaggtggggaaaaaaaaaaaaaaaaaaaaaaaaaaaaaagggc

SEQ ID NO: 237307 - DNA, 992 bp, Homo Sapiens
  misc_feature (1)..(1): n is a, c, g, or t
  misc_feature (32)..(32): n is a, c, g, or t
  misc_feature (53)..(53): n is a, c, g, or t
  misc_feature (67)..(67): n is a, c, g, or t
  misc_feature (73)..(73): n is a, c, g, or t
  misc_feature (134)..(134): n is a, c, g, or t
  misc_feature (144)..(144): n is a, c, g, or t
ntccttgggggccccaacccagggcttggggnctgagggctggtgtgttgtgnaagttccctggganggatgnccctgggggcagaagcttgccccagaaaggcccccagcccaggggcctggagagccagctncacagtcttnccagttctggagtttttgtggaaacctttggacagcccccaccattgagggcctacgtgactgagaccgctgaggaggtgctactggtgcggaatctgaactcggatgatcaggctgttgtgctgaaggccctgagattggcgcccgaggggcgtctgcgaagggacgggctgcgggccctcagctccctgctcgtccatggcaacaacaaggtcatggctgctgtcagcacccagctccggagcctgtcactgggccctaccttccgggagagggccctcctgtgcttcctggaccagctggaggatgaggacgtgcagactcgagtggctggctgcctggccctaggctgcatcaaggctcccgagggcattgagcccctggtgtacctctgccaaactgacacagaagctgtgagggaagctgcccggcaaagcctacagcagtgtggagaagagggacagtctgcccatcgacggctggaggagtccctggacgccctgccccgcatctttgggcctggcagcatggccagcacagcattctaaactattcacccatgggttcctggtgcccctttccccccactttcagggctcaccaggcactggcagggagggtaagggctggctccagatacccctcccccacagattcctagcaatgaaaatctaatatattcttctgttgcccctggggttggagagtcagtgcctgcagtcaagtgcctcccagcctcggctcagcacatcccttgccacaaatcagtgtctggggcttggccaccctgccgctgcccagccacatcccttggttttgtattttatttacagagttttacagaaaat

SEQ ID NO: 237308 - DNA, 891 bp, Homo Sapiens
  misc_feature (150)..(150): n is a, c, g, or t
atcaaaaaattttattaaacaattattatttaaaaattattgaacctatattgtatgtaaagaataaactccatagaaagaaaaaaaacctttcatttagaaaagggcatcatgctacatttactcttctgggattaaacttttttcacntaattattttattgctcagattcatccatatggttaggtatcattatagttcatttgacaattgtataatgttctattatgtgaatattccagtttacttgtccactctcttgctcatgggcatctgggttatttctaggcttttgcttttgtgaatagggttgctatgaatattcttgtacacatctcctggtgtacatgtatgagtttctctaggatttatccccagtattggattaactgggttatagggtagctgaatgttcaattacagcagataaactgttttccaaagtagttctctgcttttcttatctaggtctgcctgtccccaattagatgatgactctagaggcaggggaccctctcattttgaattaccactgcttagcattcaattagcactaggctggatatccaggagtccaagggcagaagcccaggcacctgaggcctcttagcctcagcgaatactaagtactatacagagtgaacagcatgcagggaccatatgccacgcacggaggcggttacggtcctactcagagcactagccatgctccttaaagctccatcttcctagcttcacctgattttgagtctcagagatcttccagggccctcaattacaatgcaaatcccaaaagaaggcttaacctcagctaaagtccctcctcaactgacacctctaatacccaaataaggatgagcaggaaagacagaagggacaaaaaaagggcg

SEQ ID NO: 237309 - DNA, 653 bp, Homo Sapiens
gggatacgaaaagaccgaagaggagggagaatgttgaaacacaagcgccagagagatgatggggagggcaggggtgaagtggggtctgctggagacatgagagctgccaacctttggccaagcccgctcatgatcaaacgctctaagaagaacagcctggccttgtccctgacggccgaccagatggtcagtgccttgttggatgctgagcccccgatactctattccgagtatgatcctaccagacccttcagtgaagcttcgatgatgggcttactgaccaacctggcagacagggagctggttcacatgatcaactgggcgaagagggtgccagaaaggatggatatatgtgtgatcctgggtgtgccaaatgctgtggcttcctgaagcttagatttccagcttgtcaccttcaaggttaccttgtgaataggacttttttgagctatttctatccagttgactatggattttgcctgttgctttgtttccaccaactctccctgaagatgaggcgcacagacagacaactcacaggcaagaacagcctggtccatcttgaaagattctcaagactattctccacaagataattgtctacttttaaaaatattcagtaaagggaatttttgctgttaaaaaaaaaaaaa

SEQ ID NO: 237310 - DNA, 445 bp, Homo Sapiens
tgtctgaaattttgcaggaagatgagcgcaacatgtgataccttctatgtgtatttttcattccactttaaacaaaatcagtacacgcacatggagttcatctggatggctgtatagtactgtgttgtatgaatgacccactctgcagctgttcccctcttggggatgatttgtttctgcttcctctctctctcatgcagggctgcagtggaatgagccgcattgctctacttggtgttgccacattgctccccagaggcgccatagcttcaccttccctcgggactgtgtgagagttctcagttccctccatccttaccaaaacctcacacctggaatcccagcacttagggaggcagaggcaggaggatcgcttgagcccaggagttcaagacctgcctggcaacatggcaacacctcattctccacaaaatggaaaaaaaaa

SEQ ID NO: 237311 - DNA, 593 bp, Homo Sapiens
  misc_feature (243)..(243): n is a, c, g, or t
tatttttggaagctgaaatggaagctgtcttatgaagacatatgctcaactctatacttactcaaatcttaggaattctaatcttgttttaaagggaagatgttaatgttatggtgccaccagatgctgttgctactaccactggcaaagtttaagggtaaaatagcataaagtttctgtgtggttctggcttatgtaatggtatgtgccaggcagaaaggcttgcttttctaacactcacanactcatttatatttgtccttggttgctgccaaggcagtttcttaatggggaatactagcagggtacaggggaattttttttccactttctctcttctatctgccactactatcctgccaaaggtctgccatggaaggcaggtatgtgccccaccaggtattgcaaggcagcccagggaacaggaaggaaaagagagatgtagctcgcatgcttcttagtccttctggaagaggaaggctaaggaaggtcatcttcagcactcattttctcatcttcccagggatgttgattagtttcttctacagtaagtctggcaagacctgcctgtgaatacgaggatattctgagtt

SEQ ID NO: 237312 - DNA, 706 bp, Homo Sapiens
actctggacaaagatgtgccccagtcagcagaggttggctttgatgctgtcatctcccttggaaacagtttcgctcacttgccagactgcaaaggggaccagagtgagcaccggctggcgctgaaaaacattgcgagcatggtgcgggcagggggcctactggtcattgatcatcgcaactacgaccacatcctcagtacaggctgtgcacccccagggaagaacatctactataagagtgacttgaccaaggacgtcacaacatcagtgctgatagtgaacaacaaggcccacatggtgaccctggactatacggtgcaggtgccgggggctggccaggatggctctcctggctgagtaaagttccggctctcctactacccacactgtctggcatccttcacggagctgctccaagcagccttcggaggtaagtgccagcacagcgtcctgggcgacttcaagccttacaagccaggccaaacctacattccctgctacttcatccacgtgctcaagaggacagactgagtgtggcctcagctcccacaagcctctgcccaggcactgctaggctctgtctggaagatggggaccagcagccccacaccagggccagcctctagagcagactacagctggggtgcagggatgtgggttccacagacggaagggtaaacaatatagtctttttcagttcctgcaa

SEQ ID NO: 237313 - DNA, 436 bp, Homo Sapiens
caataaataatttattagaaaaatagttgcttatgtcataggtgaagtatttataacctgccttatttcattaaattcctctcactttgatagtttatgatctctgttggaaaacacaatgtatctcttgcagcacaggtaccatgcaggggatgtaggatggatgcctaagtaaaccataggtatggtaaagaagcactccaaagaataatgcttaccactcactcctcttcatacagataaaaaaactcccaacctgtttgctaagcccattagtaagtcttttgggttctacctccaaagacagttgaaatccgtatactacttttcattttctatcctggtccatttttttcttagccagagctactacaataaccatctaatctaaatggactccttgcactccattctccacaaatatgatacagattta

SEQ ID NO: 237314 - DNA, 444 bp, Homo Sapiens
ttctcagtatgacatccccagggagccaccacgactcattagaactggaagatgccatgatccttggtttatctaacccatcacaagatctgagtcaaaggccgtacacacatggaagagagttatatctatgtctgtggtgggcatggtggctcacgcctataatcccagcactttgggaggccgaggcgggcagatgacttgagacccaggagttcgaaaccagcctggccaacatggtaaaaccatgcctctactaaaaaatacaacaattagctggggctggtggcacacacctgtgatcctgactactcagatgtctgaggcacgagaatcacgggatgaatcacgggatggctgaatatgggaagtggagggttgcagtgagccgagatcacgccaccgcactccggtctgggctacagagcgagactctgtctcaaa

SEQ ID NO: 237315 - DNA, 371 bp, Homo Sapiens
tactccctgcaaatttgttatttcccttgacattcagcaaaaatttggggttttgttttgttttgttttgttttgttttgttttgttttgagacaaagcctgggggacagagcaagactccgtttcaaaaaaaaaaaaaaaaaaaaaaaaaaaaaaaaaaaagatacttctccaaagtgttctcatgtggcctcacccaggtcttgtgtattatttggtaattaatttatggatcttaaaaactgcagtattcccccattttgtgatgagagtgtggggctggcaggggttggttggagggaggagagaagacagaggagcacttaaggtgcaaagcagcctattttttcttcaataaaaattgttaagag

SEQ ID NO: 237316 - DNA, 575 bp, Homo Sapiens
acagatgaggacgagaagtctcagagaggtagaaatttacctgctgtggcacagctgctcagcaagtggtcagggccaagggctgcaagtgaattctttttaactatctttctgtctgttccttagcttactttcaggtttagattgactttgctttgttgaaaatactaatggctcacacacataaaggtcagacatgatggagccctttcctcgttttagaatttggtccttgttacagccctgtgaagatagtgacataattatcctatggtattagtgaaactgattttctttaagtgtgcccctgtcattacttgtcacttgccttttgaattaaaataatgctacaagaactgctttttaatctatatattccatcattcaaattcaagtgtcttaagccttttacataccaaaataggtatatttgaatacaggagaagtcaaagaaaggcaatctggaccagaattctgatttttctgggtagtaaagtttccttcagaatgctggtggccagcataggattgccagttctttattttgccaagtaagaacattaaaaaaaaaaaaa

SEQ ID NO: 237317 - DNA, 467 bp, Homo Sapiens
cagttgttctttttatattctaggatcccatttgtcataccacattacacttagttgtcataagacaataaaatttctatttagcaaatgtttattgggtacctcctttgtattgggcactgttttaatagtgtaagggatctgtccagtaaacagacccaaaaaatccctgccttcatatgaagcttgcattttgtttcctttaatatgctcaagaaatttctaatgaaaagtgaaacaaataggagatcatatataccaagggtgtgattattggcctgtaattttgcctccttctttgaattttctttttttaaaatctaggctgggcacagtggcctgtgcctgtaatttcagcactttggaaggctgaggtgggaggattgcttgaggccaggagttcaataccagcctgggcaacatagggagaacctgcttgtatttaaaattaaataaatgaaaaaaaa

SEQ ID NO: 237318 - DNA, 509 bp, Homo Sapiens
cgcacctggctgttagctcttaaggggagcatgttttctgtgatatctgtgtgatcgtcccattaaatagaatgaattctactattctttggttttatcaagaatcgactttctggtctgttggccagtgaggcaggcattactggttacctaactgatagtcttccctggtgcctgcttctttcatgctcaagaaccgtaattttgttcagatattgagtaagcaacaatgcacttaggggaggtattaacattggcttaaacctttcatgataattctttagtaatcccagtgactggcatagactggtctcatctcattggttctggccaatcaaagaaagtctcctgggggagggttcttggaaagattttcttttttgatcagaatgggagacagttctgtgaagaaagcctctttttgctgccactcacatttcctgcgtttgaatgtggtagtgtgagtgtgattctgaaagctatagcagccgactcgtaaccccgaggca

SEQ ID NO: 237319 - DNA, 448 bp, Homo Sapiens
ccggcaagcagcccctgccagcccatctatgagtgtgagcttgccagtcaggccccagaaaaacagccagatgtcaggcatcaccaccttcccaaaacaaagccattgccctccatcgactccctgggtcctcctcccccaaagccttcaagacctcccatcgtgaacctccaggcctttcagaggcagccagctgctgttcccaagactcagggggaagtgactgtggaagagggctccctgtctccagagaggcttttcaatgcagaatttgaagaaccacataattacgaggcaacaatttcatatctgagacactctggcaactccattaacctgtgcactgcaaaagaaattgctgatccaacttatgaagttggaattgaagaactccaaaagcctgggaagaattttccctatccagaacctagtgctaaacatgaagata

SEQ ID NO: 237320 - DNA, 456 bp, Homo Sapiens
aaaaatggtctcattactttgggagtagttataaatctccctataatgcctgtatataatactcatatgtgatataaaatgatggtcccattactttaggggtacttggaaatctctgtataatgccgacatataattctcatgtgtgatgtagaaagatggtcccgttactttaggggtagttacagatctctgtagagctcctgtgtgtaatacccatatactatgcctctgttgattcagatagatcaattacttcatagaatgaatctgcgtgtctatttttaggtggatgagttgctatgttttaccattactattcttgctacattagttcagcttctacaggtaaccaaatgattttcatcatcgtatatttataatgtctcatccagttattttttggaatgagagtaccaataaaagtatttctcaagctgaaaaaaaaaaaaaaaa

SEQ ID NO: 237321 - DNA, 335 bp, Homo Sapiens
cagcatccttgagaatgtgcgacgtgactgggttcttgaaaccactgttccgatactgctttcctttgctaagtttaaattccagcctcctaattctaatgttttcgtgggaccttctacaatccttcttttctgtatgtcttgggcaggcaaaggggggtattctccactagcatgttgctaaagagggcctctaccctttaatgaaactgttttacctgaataagctttgaaaaagaaataccgtagttgaatattatgctgtcccatctcctcatcagctactctccacaactttaaaaaacccaattcttaattcttaactacacagccat

SEQ ID NO: 237322 - DNA, 482 bp, Homo Sapiens
ggctgtcttttgccatgcatattttgcctgagtcctaccttttgctgtagatttaccatggctggactcttactcaccttcctttagtctcgtcctgtggtgttgaagggaaatcagccagttgtaaattttgcccaggtggataaatgtgtacatgtgtaattataggctagctggaagaaaaccattagtttgctgttaatttatgcatttgaagccagtgtgatacagccatctgtacctactggagctgcagaagggaagtccactcagtcacatccagaaaaaggcagactaagaatcagaagccatgtgattgatgtctgacgtgagtctgtctcaggtagattccgggtgtcagtgtggtttataatccttgaatattgttttagaaactttggtctccctggttcctgccacttttcctgtccgtcctcctccccattttttttttaaaagaaagctgttttcccctcatcaaa

SEQ ID NO: 237323 - DNA, 468 bp, Homo Sapiens
taataatggtctattagggaaactgtgatgtctttcattttctgaaaagttattttatcctcattcttttaaaattattcttgttgagtctctttgatttgtggaaccattcatatctctttttttctatataatattgtattatgtaccaccaaaaccttagtgatgcaatagttcttaaatgacaatttcacttttttgtcctaaatttttcccgttaatccatcgtcatcagtttggcaagttttgatacaggtgcttttaatgtttgcatgtaagcaggcagtaactattatgtcacagcagcccctgggccaacaacaattcataattttgattgattgtaataaacaccttgatataagagatattaaaaagtgacaaatttgaatagaattgatggaaacagcattattctgtagtcttttagcttccatttttgctattaaaaaattatttgtcagccta

SEQ ID NO: 237324 - DNA, 568 bp, Homo Sapiens
  misc_feature (196)..(196): n is a, c, g, or t
cctttttctgtttcatgctccctttctccctcaagccagctctgaatgtgtgagcctttgtgccatttctgaatttacaaatccccccagaaggcactcatcatggactctctttctagatctttgttgccagttatggagaaaagaatggacttaactttccctagggctattataaaacaatgatcatctgtcncaggtggttaagcttctataaattctcacaagtagcagaagccaggttctcacccaccagggaaagctgagcattggccttaccactgccaagtgtatttggagccgttgtttttctcttgtgctaactattccttccagccaaaacttaagttgagagaaggggaacaattatcctcattctttgagaattacaaattgtattttaaactggcatattttcaccagttttacacacttttttctctttttcttttttttcagtttggataatagttcttggaattaaaccttggccttggggatatccgagctggggggttaattgttgaattgtcctgagctaacaaaattgttaccaaaaaaaaaaaaa

SEQ ID NO: 237325 - DNA, 721 bp, Homo Sapiens
  misc_feature (55)..(55): n is a, c, g, or t
tcagatggaggctggacagtattcaaaaggcgccacgatggttcagtgacttcanccggccctgggaagcctacaaggcggggtttggggatccccacggcgagttctggctgggtctggagaaggtgcatagcatcatgggggaccgcaacagccgcctggccgtgcagctgcgggactgggatggcaacgccgagttgctgcagttctccgtgcacctgggtggcgaggacacggcctatagcctgcagctcactgcacccgtggccggccagctgggcgccaccaccgtcccacccagcggcctctccgtacccttctccacttgggaccaggatcacgacctccgcagggacaagaactgcgccaagagcctctctggaggctggtggtttggcacctgcagccattccaacctcaacggccagtacttccgctccatcccacagcagcggcagaagcttaagaagggaatcttctggaagacctggcggggccgctactacccgctgcaggccaccaccatgttgatccagcccatggcagcagaggcagcctcctagcgtcctggctgggcctggtcccaggcccacgaaagacggtgactcttggctctgcccgaggatgtggccgttccctgcctggggacacaagcaggcgccaatggtatctgggcggagctcacagagttcttggaataaaagcaacctcagaaaaaaaa

SEQ ID NO: 237326 - DNA, 470 bp, Homo Sapiens
aaatgactttttcttttctcagtcttaggtaataatgtgtgggaatttctgactgagacaaacatctgatatttgtttgcatactgtaggtgtaaactgctggaaaaaaactggtattatttttaaaaagggttgcacagccaaatgttaaagctgaagaagtgacgttattttagaagtctttttttttttttttccttctctgcaatcagatttctcagcctggtacattatgaacagcttagtgctgttgagtaatttatatcaggatgattaggaaagcttttctctgcagattttaatttttcttaaattaaaccactggctcaaacagaattttccttgaacccaagttttcacattagagatttgcataacttttaataattcttatccattttccttttctatcccctcttacctataattctcagtctttattctttcaaaaaaggaatgaatctcatctt

SEQ ID NO: 237327 - DNA, 286 bp, Homo Sapiens
ggactgcctagaattgtttcctgtcatcggggtagtaaatgtgttctcaggagcacgtgtatcttaaatatgttttaacgaatgtttacttagtttcttagaaacaaaacgtggtaaacacccagtcttattttctgggacacatgaagtgtgtttaagctgtcagctccaaaaaccctttccaagtcaaataacttaaaaaaaaaggttgtcagctaccactgcatcccagatgttagagtttatttctaaagctgttcttgggtgctgtttaatgttccagtgg

SEQ ID NO: 237328 - DNA, 511 bp, Homo Sapiens
cttttgccatgttctttcattccacaaatgttattgagcacttccagtgtaccaagccttgtgtttactgctttgatgataaatgcaataaggtaatgctgcttttaaggatccttcaggataggctcttgtagcagtaaggacttagtatttttgctatagaagtgtatggagagctatctatggtgcaataactgtggaaatacagtttttattctatttggttcccatatacattgagtcctcctttggtgggaatttgatcaggttggtctcagttgaatcctggctgcatatgcctcagtaaggaagaaggcctaggggactgtggaaagcctggtggtggtcctggaaggcttgagaatacctggagctggaagctccttgctcattggtgacctttttcatatgcagcagagctcttggcattcctagcatactaccttgaaaggactgtgtcttgcctcctagaaattctggacttggtagaatcatttgtttatgttatttt

SEQ ID NO: 237329 - DNA, 459 bp, Homo Sapiens
tcaactacaaatcattgatcaaagtattggtctgtcacctgtccatgtgtaagccaggcctaagtgctctgacagggcatgactcaatcctcaaataggaagggggaaattgctttccgtctcctaaccctaagatcctggatggcaggtaatctgcttcctcaagattctgttgatacacattcaggactctggtttctgttttgcttgatgacaatgacccagtttctttgactaaataaatgtatagacacacattacttcttttcattctaagaatcataagtttttcaaactttagaatcacaaggtccattaaaggacatctcccctgaccttcccattttgtagatgggaagactaaggtccaagcttgaatgacctgccatcatggggataaccggaattgatacaatgtcttgattcaagattcagagctcattttttctgtgtcagatt

SEQ ID NO: 237330 - DNA, 452 bp, Homo Sapiens
gagagttcacactggagaaaggccttatgagtgcaatgaatgtgggaagttttttagccagagctccagcctcattagacataggagaagtcacaccggagaaaggccttatgagtgcagtgagtgttggaaatcctttagtaaccactctagcctcgttaaacaccgaagagttcataccggagaaaggccttatgaatgcagtgaatgtggaaaatcctttagccagagctctaacctcactaatcaccagcgaattcacagtggggaaaggccttatgagtgtagtgactgtggaaaattttttaccttcaactccaacctcctaaaacatcagaacgttcacaagggataaaggttaggtaacacacatagggctgttacggactgagaagtgtccctgcaaaattcacagacataaataaataaatacgtattttcaataaaaaaaa

SEQ ID NO: 237331 - DNA, 456 bp, Homo Sapiens
gataatgaagtaggtaatgaaatcagtccttgaatgaaagcagtgcccttgagaagggatttttttttaaatatacagtaaaatatttcgtgggaacctaacactcacatagcatatggtttattaataatgcatatcctttctaatcacttcttcaattctttttgctgcagttctgtgctaaaatggggttgtggttaagtgaacgagaactctgcctacctaagaagttcattgtgttctaagtggaaggagagttactgaagggaatgtgaatttttaccgtttgtacttaagatacatttgttgtctaaaatggctctggataacatttttgggttaaaaaatgtaatttaaagccaccatagaaagtattttctgatttactgtccaaatgaattttgttgttaattgagaagtcaataaaatggattaaactgacagaaaaaaaacata

SEQ ID NO: 237332 - DNA, 466 bp, Homo Sapiens
ttggaacgtgaactgcggagctgcaagcggcaggtgcgggagatcgagaagctgctgcatcacacagaacggctgtaccagaacgcagaaagcaacaaccaggagctccgcacgcaggtgcgcggtcctcctcagccccgcgccccatccagcccaggcgaggccttcgaagcccgtgatagcctcggaaggggtccctggcaggggctcagaactactgtagagtacttaaagtaaataagtagaagctcagcgcagttacaattccaagtaccttaggagcaaacctgagttcaggttacttgatttaaatcaatgtctcgcggctggcgtgaattgaacttaagtactgtggctacattgtcttcattctcacttgacctaacatcccattggcagtaggcgcatttactgtagatcacatttgagtttattaaaatgctggacttgagtcagaaaaaaaaaa

SEQ ID NO: 237333 - DNA, 531 bp, Homo Sapiens
  misc_feature (108)..(108): n is a, c, g, or t
catcttccagccctcatactcctccactcccttttcatttcctgaacattccaacttctatgcctttgctcttgtgggctccctcatgtaattaggatatttccagcnaggtattccctcacccttgttttacaactgaatcccactttctctgggactccactgcttggtcactctgccctgtgctttgagaggaggttgggtggagcatgggacatgggccatttactgccttcacatttccctggtcacggtgatttttttaggggtgggcacatgacctaggtagagccaatgaagtgcaatatcactagaacatgtgagaagagaggcatgaaaccgaagctgagagggtttgagatctggagctactccttcctccacccaaacttcagaaggtgaaggagatagtgcatgtgagtgagcagatcccgagggcactgtttgagcctcagaatcaaagcacttctgaagctagtcccaatcttggattcgacagttacaagaaccaataaattcctttccttgtgg

SEQ ID NO: 237334 - DNA, 493 bp, Homo Sapiens
ttcctagaagtagaattgctctgtcaaagggtttgttactcatctgaaccttaaaaagactggtttcttgaaaactcagtctcttaaagcgaaaattaacaaaacaactttagttttaaactaaaaatgggattaggccaggaatggtggcttatccctgtaattccagcactttgggaggccaaggtgggatgattgcttgagcccaaaagtttgagaccaacctggacatagcgagacctcatctctacaaaaaaaaaaaaacaaaaaaaacaaaaaacaatcctgcagcctgagtgacagagcaacaccctgtctcaaaacaattacttaattaaaaaaaagtttttaagggcctgggccaggtgcagtggctcacgcctataattccagctttttggaaggctgtggcaagcggactgtttgagatcaggagatcgagaccagcctgagcaacaatggcgagacctcatctctacaaaaaaaaaaaaac

SEQ ID NO: 237335 - DNA, 460 bp, Homo Sapiens
aaggaaatgttctcttgtgtgaggatatgacttgtgttttgcacaaggatataacttgtgttttgcaagagcctatcaattgtttttattgctaggtcagaggttgagtatctcagagttgagcaggaaaaactttcatacctgcttagacagcagttcacctgttccgtttttttgctaaggcttttcctcctcttggtttgccctttgtactcttctgtttttgttcagtttgcagtggtgaatgttttacttcctgtgttgactgtgtttctctctgaaaccctttggtaaaaatctacgtttacctggttatatttgatgataactaaaaagggaaagaaatggtagatcttaaaagatgatttgaggtagttgtctgccttccagcaaatacctgttcatactgtcctatcagtgacagtgagacccgtctcaaaaaaaaaaaaaaaaaaaaaaa

SEQ ID NO: 237336 - DNA, 474 bp, Homo Sapiens
tggcttttgataatgttaatgagaactcaagtccagaaaaaacagatgccacttcatccaccacctctccaccttcatatgatagtgtaacaaagccagacaaagagaaatatgaacaagacagaacagaaaaggaagacaaagggaaagacagcaaggaaagcaaaaaatagagcttcatttttgatatattgtttacagcctgtgaaagtgatttatttgtgttaataaaactcttttgaggaagtctatgccaaaatcctttttatcaaaatattctcgaaggcagtgcagtcactaactctgatttcctaagaaaggtgggcagcattagcagatggttatttttgcactgatgattctttaagaatcgtaagagaactctgtaggaattattgattatagcaaacaaaagtgattgattcagttttttggtttttaataaatcagaagcccatgtagaaaaaaaaaaaa

SEQ ID NO: 237337 - DNA, 465 bp, Homo Sapiens
  misc_feature (4)..(4): n is a, c, g, or t
aatncttgtacataatgaactgtgcatgcttttcattctctaagggcttaacttcttaggcactgtaagactataagaacgcagtaatagccataactggatttccttggttctcctgttttaaaatctgagccttaatgtagttttaatatatcctttttgtattacttttctttattagtagcctaataaagaagactttgagtatcttttgctctcctctagatgcgttttaaaaactattccaaatttaattgatattgtattgagtttttcagggttattttaggcctgatttgataacaatgcgttgttttggtgcctccattaatgttgtattaaatcaatgggtcttttaaattgattaatatgtcattgaatcataccttctgattttctgtgatcatcaaacggttaagtctttgccgttattgtcaatatatcaaccaaattttaaataaaaaa

SEQ ID NO: 237338 - DNA, 700 bp, Homo Sapiens
  misc_feature (22)..(22): n is a, c, g, or t
  misc_feature (35)..(35): n is a, c, g, or t
  misc_feature (44)..(44): n is a, c, g, or t
  misc_feature (78)..(78): n is a, c, g, or t
  misc_feature (103)..(103): n is a, c, g, or t
  misc_feature (110)..(110): n is a, c, g, or t
  misc_feature (121)..(121): n is a, c, g, or t
  misc_feature (685)..(685): n is a, c, g, or t
  misc_feature (696)..(696): n is a, c, g, or t
  misc_feature (698)..(699): n is a, c, g, or t
attaccaaagtttggaataacncatgttctcttgnaagttgaangttagggttgagcacggttggctcactcctatantctcagcacttttaggagcccaagntgggcanatcaaatgagnccaggagtttgagtccagcttgggcaacattgattaaatcttggtcttctataaaaaatacaggaattagccaggcatggtggtgcatgcctgtaatccctgctactcttgatggctgaggcacaagaatcgcttgaacctgagaagaggaggttgcagtgagcagagatcgcacaactgctctctgtcctaggtgacagagcaagtcctgtctcaaaaaaattaaaaagtgggagctaaacattgggtacacatggacataaagttgggaagaggccagtcgcggtggctcacgcctgtcatcccagcactttgggaggccaaggcgggcggatcatgaggtccggagatcaagaccatcctggctaatatggtgaaaccccgtctccactaaaaatacaaaaaattagccgggcgtggtagcaggcgcctgtaatcccagctactcaggaggctgaagcaggggaatcacttgaacctggaaggcggaggttgcagtgagccgagattgcgccactgcactcccagcctgggtgacagagacttttgtctaaaaaaagggcnaaaaaaaaagncnnc

SEQ ID NO: 237339 - DNA, 700 bp, Homo Sapiens
  misc_feature (11)..(11): n is a, c, g, or t
  misc_feature (18)..(18): n is a, c, g, or t
  misc_feature (50)..(50): n is a, c, g, or t
  misc_feature (81)..(81): n is a, c, g, or t
  misc_feature (651)..(651): n is a, c, g, or t
  misc_feature (662)..(662): n is a, c, g, or t
  misc_feature (672)..(672): n is a, c, g, or t
aatttatgtgncccagantttgacacagttcagttggtacctctgccctntaggtcttttatgacattgggactgtggtcnttaactgaagctggactgggaaagcatgagcctttaagctgactcatgtgaaaattggcagggtttagtgtggctggagagcctgactttccttctctatacttggtctgagcaccccctcaggctctgttatgttggtctttgcatggagcatctcatagcattgaagcttgcttcctgtgtttgaggtatacaatagagagagagaattagacaaaaaggtgtacacaaaaagagacagagaaagattgagggcgcaaacaggaaaaacccagtaggagaaaaatgagagctttagaaaaatcttgacagggtgcggtggctcacacctgtaatcccagcactttgagatgctgagacgggtggattacctgaggtcaggggtttgaaagcagcctggacaatatggtgaaaccaccgtctcttctaaaagtacaaaatgagcaaggtgtggtggtgcatgcctgtaatcccggctacttgggagactgacgcaggggaatcatttgaacctgggaggcgaaggttccagcgggccgggaccacaccactgcactcctgtttgggatncaagagggccngggtctcatnaaaaaaaatcgcgctttaaaagccagcc

SEQ ID NO: 237340 - DNA, 700 bp, Homo Sapiens
  misc_feature (30)..(30): n is a, c, g, or t
  misc_feature (95)..(95): n is a, c, g, or t
  misc_feature (113)..(113): n is a, c, g, or t
  misc_feature (143)..(143): n is a, c, g, or t
  misc_feature (663)..(663): n is a, c, g, or t
  misc_feature (692)..(694): n is a, c, g, or t
  misc_feature (697)..(697): n is a, c, g, or t
tgacccctccatttacacaaccagggggantgagtccttggtatatgccttgcaccaggaggcccaccaccacctccacgattgcagggtccgcnttctcaaaccccacttcntggaccacatcatccagatcagacaggatntagaccgtattaccaatgataatagtattttgaatggaagatatgagggggaaaaaaacttatgtgtagtcaatcttttaagctttgactgttttgggaaggaagagtacctcttatcgaggtagtataaaacacatagggtcttgtttcttaaaatggttttaaatcttgaccttaagattgatttcaagtaccatactgtagtacagataagtggctcagttgagcacagctatattttaacatctctttgttcccctagtttagtaaattgacccagaggtgaccatttgtaaaaaatttgaaaaaatttttcattgttttacttcagaagtattgttttgttaaacccaacgtttagtttttcttgtgatacattttgttaacctgtgtaaaaggattaaatttcaatatggttgtaaaaatgctatttttatgtgaatttaagtgcagccacatactgttttttaaaccatatgttttaccactaatttcccaaagttataataaaatcctgaangaaaaatctaaggcccaaaaaaagcccannncanccc

SEQ ID NO: 237341 - DNA, 700 bp, Homo Sapiens
  misc_feature (10)..(10): n is a, c, g, or t
  misc_feature (51)..(51): n is a, c, g, or t
  misc_feature (76)..(76): n is a, c, g, or t
  misc_feature (155)..(155): n is a, c, g, or t
  misc_feature (685)..(685): n is a, c, g, or t
  misc_feature (692)..(692): n is a, c, g, or t
ttcacaactntgaggtttaattgtcatctgacagatcaggaaactaacttngaggagttgagtaactttcccaggncttatcccaaggacttgggattctttcacacccagttaccttaaaacttgcattttaccaccacgttttaaccgcctcntatataccaatgaaaagtggtccataaaaccagagttggagaaacacaagctcttgcacagaaaatcagtttcatcaaattatgtgctgtagtgtggaagacaaatgcccacaggaatataagcatcttatgagaaagagtaagtggcaagaaaacaccatttctgcatgtgatgtgtgtgtgctaataccagtaagttgtgaacatttattctctacaagtggaaccaaacccatatgccatcaaaattttaatactagtctaggaaaatagaaaaaggtaacaaatcattaagaaacttatatctcagcaatgagaacacaaatatatcagtgggaaaattaaactcatgatcctttctcataaagtaaaccaactgctgaaaaaaaatctctaatgatgaactaaccaaactcaagcccatggtattgagtccacattgcagataacagcccatctctaacagaatatatattcacatagtagggtgagaaaaacagaacaatcattattggtttccagtaggccgncgtgctngaggatcc

SEQ ID NO: 237342 - DNA, 700 bp, Homo Sapiens
  misc_feature (3)..(3): n is a, c, g, or t
  misc_feature (22)..(23): n is a, c, g, or t
  misc_feature (30)..(30): n is a, c, g, or t
  misc_feature (61)..(61): n is a, c, g, or t
  misc_feature (82)..(82): n is a, c, g, or t
  misc_feature (96)..(96): n is a, c, g, or t
  misc_feature (103)..(103): n is a, c, g, or t
  misc_feature (106)..(106): n is a, c, g, or t
  misc_feature (624)..(625): n is a, c, g, or t
  misc_feature (641)..(641): n is a, c, g, or t
  misc_feature (658)..(658): n is a, c, g, or t
tancagccagtgccacttgtgnncagtgtncactatggtgtaagtgtgtgcacaggcgaancttaagtgtgtgtacttcatncccccagataaccngaaaggncantgggctttgtgctggcaaaggttgtgatgctgctgtggctttctatgggccttgggaagtgtcagatggaagtgctttgatggcatgttgttcagtgtatttaatggggtctcccatggcccgaggacccactgtgagcactccacccactgtggcgcagaacacggctggagtcatcatagcccaggtctttattgaaagggagtgttgacccagaagcctcatatagaaaccatttggcaaggtctggaccatctctctgcaacttgacctgccttggccgcacagagggacccaaacccaaaaggcccagacccaagggagactgaatcacatttaccattacaccagctttcatttatttgtttccatatgatcatagggactgtattactaagtatgcttataaatgctatttacagactgttcccttttataaggtgaaagattaataaagaacaaaaaattgcctgtagaaaaccatgcctgaggccaggagcagtggctcatgcctgtanncccagcactttggganaccaagacaagcaaaanacccaaggtcaggagttcaagaccagcctggccaacttgaag

SEQ ID NO: 237343 - DNA, 700 bp, Homo Sapiens
  misc_feature (27)..(27): n is a, c, g, or t
  misc_feature (68)..(68): n is a, c, g, or t
  misc_feature (80)..(80): n is a, c, g, or t
  misc_feature (153)..(153): n is a, c, g, or t
  misc_feature (625)..(625): n is a, c, g, or t
  misc_feature (657)..(657): n is a, c, g, or t
  misc_feature (695)..(695): n is a, c, g, or t
  misc_feature (699)..(699): n is a, c, g, or t
atgctcaggtatttttctctcacttcncagcatcaagactcttcttgtttatgtggggcccatggtgnattagcttgagnaactgtcaaattaaaatgaaaggaaagcaagttggggcaagaaaattctcactctgaatgtgaaagaaaatancagtgttcttctctctggcaaagatttgtgactgttggggaagattcatgttatttctcaggtagactttactttttgagattctgtgtgtgtgtgtgtgtgtgtgtgtgtgtgtatgtgtgtgtgtgtgtgtattttgcctggtggggggttaaaggcagatagaatgtagttgtttatgagtttatactttctctttagcataatagatgccctgtttattttctcagaatgtgacaataaaattaggaaaggagaggaattcagaggcccatgttgcagttcatggcaaagttttacccaaatatttccttcagaaacatttagtcatagcaagccatataaattattgtctgcaactggtatcagaaaaagaaatcagtaggtggggactgtagaccccaatggtgcatctgtttacaatctttcttttccaaggttttaaggttcatgaataacatgagggaattcngggagagctaccaaatcagtactttggcaaanattaactgttccacaggaaaactagggttgcttcaggncaant

SEQ ID NO: 237344 - DNA, 700 bp, Homo Sapiens
  misc_feature (3)..(3): n is a, c, g, or t
  misc_feature (57)..(57): n is a, c, g, or t
  misc_feature (587)..(587): n is a, c, g, or t
  misc_feature (619)..(620): n is a, c, g, or t
  misc_feature (634)..(634): n is a, c, g, or t
ccncttcagagccttagccggtgaaagaccttagattgcaagtccagtgaattatcngcatcttcattttgttaggtgtagatttactttggtaattggtgcaattgcaatattttaaaatcatgattatgcgttaactccatctatttcttaaaccattggtatttgtgtcatttttagtgtagcttgatttttgttttcttctttctggacaaaaacgagtttctccctccaacccctgccatgtatatctgtatcatgtatatctgtatctacattcctgtctactatcaatgcctactatttacaaggtagttcagttcgtttcagatcaactagaatttattgagtactctgtatgctaatccctgtaccaggggcttgggatataacagtgaataagttcctggggcttacatcagtcaatatagggttactgtctattgaacaagattatttttgggtttctatctatttggggatatgataatgcatgtatttattcctaaccatcacacaataatattatgaaacaatgttagtaggaggaagatgagagccttcattttaactgggaggacttggtnctgtctaagatgttgcctttgttatgggtaanngcctattagataanaatctgtttctgtgactgattatttctttttgaccttctgagaattagtttgggcacttcaaaagg

SEQ ID NO: 237345 - DNA, 700 bp, Homo Sapiens
  misc_feature (4)..(4): n is a, c, g, or t
  misc_feature (14)..(14): n is a, c, g, or t
  misc_feature (48)..(48): n is a, c, g, or t
  misc_feature (51)..(51): n is a, c, g, or t
  misc_feature (62)..(62): n is a, c, g, or t
  misc_feature (120)..(120): n is a, c, g, or t
  misc_feature (344)..(344): n is a, c, g, or t
  misc_feature (358)..(358): n is a, c, g, or t
  misc_feature (360)..(360): n is a, c, g, or t
  misc_feature (417)..(417): n is a, c, g, or t
  misc_feature (472)..(472): n is a, c, g, or t
  misc_feature (691)..(691): n is a, c, g, or t
  misc_feature (693)..(693): n is a, c, g, or t
  misc_feature (695)..(695): n is a, c, g, or t
  misc_feature (697)..(697): n is a, c, g, or t
attnttcccaaggntttgtcccctaaaagggggttcccaggtcaagtncancaaggtgctcnctgttgccttttaaaagtggaaggtgcctgtatcggaagtgtgctcaccctacttttncccttgccccgaagggcagttcttttcctctctgttgccggatgctgtttagggcctgttagttgctatttccttgcctccgctccccttcccactagccttctaactaccttttattctcggctccaactctttcaatgatgaggtgaatgctttttctgttccacgtcactgcaaagtcaaggtgtccagcatgctctcacttataactgcctcacccgatntcacgcacagtgcnanagctgaaggtaagccccggatgttgccagattacggtggacaaataaaaaacaactntccaacagcaactcacaaatgcatgaaatgttttaacctctagacagactgccanaatttctctcttctaattcctacttgtagtgataacatttttctttttgtgattttttttttttttaaataatagtgtagtaccttgaaacaactgcagttctaactcattgtcaccatttctgtttgacacgttccacttcctttgcaattattgtatttagttgtgcactagtgtcaataaaatgtgacatttgtgaagcaaaaaaaaaaaaaaaangnananaaa

SEQ ID NO: 237346 - DNA, 475 bp, Homo Sapiens
gtttttctttttaatgccacattcttttaagaattaaaaacctccacttggctgtcagcattggaaatcagagtgatggtgcaagccctgatgaggacaatgtccttgtctatgaaaaggtgaaatcattgcttgaaatcgctaagcaggacatgcagtcccagatggaggggggaattcgggagctggttggaaaagagtatttggcactttgcagccttgagaggtgcagaagagacaccgaggggttcaccaccagagccaccattgtcagagaggcgtccagctgtgtccacctgggactctgccttcagggcttcttgcctggctgggagctgcacaggcagactcctgggacggtgtgccgacagctctgggcacccccttctaggatctgattcctgaggaatcacaatgtggatttcacaatcacttccagtgtcttttgccaacctctgtgaacagatgtgcaatt

SEQ ID NO: 237347 - DNA, 700 bp, Homo Sapiens
  misc_feature (31)..(31): n is a, c, g, or t
  misc_feature (86)..(86): n is a, c, g, or t
gtcacttttatggcgttaatttccctgccantacagatcttttgaagattgctgaaatactggtgtctgttagaatgcttcagctncagatgtaattaaaggcttttcttaatatgttttaacccaaagatgtggagcaatccaagccacatatcttctacatcaaatttttccattttggttattttcataatctggtattgcattttgccttccctgttcatacctcaaattgattcatacctcagtttaattcagagaggtcagttaagtgacggattctgttgtggtttgaatgcagtaccagtgttctcttcgagcaaagtagacctgggtcactgtaggcataggacttggattgcttcagatggtttgctgtatcatttttcttctttttcttttcctggggacttgtttccattaaatgagagtaattaaaatcgcttgtaaatgagggcatacaagcatttgcaacaaatattcaaatagaggctcacagcggcataagctggactttgtcgccactagatgacaagatgttataactaagttaaaccacatctgtgtatctcaagggacttaattcagctgtctgtagtgaataaaagtgggaaattttcaaaagcttctcctgctggaaataaggtataatttgtattttgcagacaattcagtaaagttactggctttcttagtaaaa

SEQ ID NO: 237348 - DNA, 700 bp, Homo Sapiens
  misc_feature (5)..(5): n is a, c, g, or t
  misc_feature (38)..(38): n is a, c, g, or t
  misc_feature (672)..(672): n is a, c, g, or t
  misc_feature (685)..(685): n is a, c, g, or t
  misc_feature (692)..(693): n is a, c, g, or t
  misc_feature (696)..(696): n is a, c, g, or t
  misc_feature (698)..(699): n is a, c, g, or t
ctcanatcctttctttttcattactttaaactattggnaattgaggcctgacttcataagtaattcaatagagtcctggatacgtgcaccaggagagttgagaattagctcataaactatctgtggtgtgtgtggggaatgaagttgggggatgtgggggaagagcttatgactttcccacctgtgtcatccattggaagcccttgctcttgcactttgcattaaaagtgggaaacattaatcaaagggagattttattcccaggttttccctgggactttgtgatatcataattgaacagttcttttgttttacatttcaatttagttgcctcatagaagtataactgcccaatctatgagtaaagtgtaagtgtcaaaactttacaattgcctccaagtcatattttttgcagaagcacatttaaagcacttttctgtaaaagctagttccttacctgcttggaaatctttttgtttgttcttctattcctttgttaatcagatgtaatccctttctttaatgtgtatttttcttggtccaccatgtttacaggtgggagacttgagagatacttagcataactggggcagaaagtgtgtaagtgaagtatttttcaaagaatgcagttattatctgattgcaaaaaaaaaaaaaaaaaaaaagggaaantccaaagggactnaaagcanncancnnc

SEQ ID NO: 237349 - DNA, 700 bp, Homo Sapiens
  misc_feature (3)..(3): n is a, c, g, or t
  misc_feature (7)..(7): n is a, c, g, or t
  misc_feature (13)..(13): n is a, c, g, or t
  misc_feature (20)..(20): n is a, c, g, or t
  misc_feature (22)..(24): n is a, c, g, or t
  misc_feature (31)..(32): n is a, c, g, or t
  misc_feature (37)..(42): n is a, c, g, or t
  misc_feature (45)..(45): n is a, c, g, or t
  misc_feature (47)..(47): n is a, c, g, or t
  misc_feature (53)..(53): n is a, c, g, or t
  misc_feature (72)..(72): n is a, c, g, or t
  misc_feature (679)..(689): n is a, c, g, or t
  misc_feature (692)..(699): n is a, c, g, or t
ttntggntgaagnatggggnannngtcatcnnaagtnnnnnnggntnaccccnaccacctttaccccctccnccgcccttcccatcccccactgcacttcactcatgtaagacgtctgcccggtgctggtccaggcgggcatgtgagtttgtagcctctgctccaaaggatggtttacacattattttttcattaccttcagtattcctgtgaatggttcaagagagaaagtcttcatttactaagatttgggttctgcctcccaagtgacaatacggggctgagatccctctcagcttctttgagatgtggccaccataagcatcatcgttgtagggacagtctcattgctgtcttctagcagacagaagagttaggtgccagaaaggacaatcttgatggtgggtcccctccctgaaggactttaagaaggcataaaggggttggggtggagggtggcgtgtgaaggaggaggcccttgattaggtcagtggtccctgggagccatcggcgagaggcctccagccgggtgacagtctgggctctcgggtactaatctttctaatatggcagtggttgtggcacttctgacttgaattgataattctcatatctaataaaaccaagaagtacctcgttgatatccttatagaaaaaaaaaaaaaaaaggccacaaaannnnnnnnnnnaannnnnnnnc

SEQ ID NO: 237350 - DNA, 484 bp, Homo Sapiens
acatatctagattccaaaagcgttattattgtgcaagcaagacttaaaagtaaccgccctagctactatatgttccaacattattgcaacacatcgaagagaacattattaatgaagactgcttaaaagaaataaaattagagatattgttgcatctcacttctttgtctcaaacttttaattattactttccggaagagaaatttgaatcattaaaggaaaatatttggatgaaagatccatttgcttttcaaaacccagaatcaataattgagttaaacttggagcctgaagaagagaatgaattattgcagctcagttcatcattcacactaaagaattattataagatattaagtttatcagcattttggattaagattaaagatgactttccactgctaagtaggaagagtatattgctgttactaccattcacaactacatatttgtgtgaactaggattttcaatcttgacacggtt

SEQ ID NO: 237351 - DNA, 536 bp, Homo Sapiens
ttcaaagagatatctgccactcgcatatgttcattacagcattattcacaatagtcaacatatggaaacaaacttagcatccattaatggatgaataaagaaagtgtgatgtatatttaaacagaatattactcagccgtaaaaaggaaatcctgacatttgtcacatgaataaacctggtggacactataaaataaggcagacataggcaaatacttcatgatcccacttaattgtggaatattaaaaacttaaactccgaggcagagggaggaacggtggttactagagtccagaaggtagggaaaatggagaaatgttggtcaaaggttaaaaaccaagttgtaaggtgaacacgttctggagatttaatgtacagcatgggtggtcatcaatgtgttaatttgactgtggtaaccattacagaatgtatatatatacatcaaaacataactgtacatcatgaacatatacaatctttgtgaagtattttaaaataaaaaaggaatgtttactgaaaaaaaaaaaaaaaaaaa

SEQ ID NO: 237352 - DNA, 527 bp, Homo Sapiens
aaaaaaatacaaaaaattagccaggcacagtggcatgtgcctgtagtcccagctactcgggaggctgaaggagaagaatcgcttgaacccaggaggcggaggttgcagtgagccaggatcacgccactgtactccaccctgggcgacagagcgagactacgtctcaaaaagacatcagaaagcctgcttgctctctgcaccatgtgaggatgcaggaagaagccagctgtctacagaacaggaagagaaccctacgagaacctaaccatgctggcgacctgttctcagacttccagacttcagaactgtgagaagtaaattgttgtttaagccacccagtctatgatgttttgttatggcagccccagctaatatatggagtggaaagcctagatttatctactgggttcttttcctgtcagcagttcaacatgtgtagtagctttcagtctctgctgtttgtgccaaatatataagaaataaaatcagataacttttttgtaattggaaaaaaaaaaaaaaaaaaa

SEQ ID NO: 237353 - DNA, 716 bp, Homo Sapiens
cctgccttgtcagctccccttggaaataaacacgaccatgcagagaggttgctggtgagagcgtgggacagcccgggggtggatgctgggatttggatgcttatttccaggtcgggggtggagagacctacaccatcggcttgcagtttgcgcctagtcagagagtgggtgaggaggagatcctgatctacatcaatgaccatgaggacaaaaacgaagaggcattttgcgtgaaggtcatctaccagtgagggcttgagggtgacgtccttcctgcggcacccagctggggcctgtctgtgcccctcctgccctgcaggctgtcctccccgcctctctgcagcctttcacttcagtgcccacctggctgacctgtgcacttggctgaggaagcagagaccgagcgctggtcattttgtagtacctgcatccagcttagctgctgctgacacccagcaggcctgggttccgtgagcgcgaactccgtggtggtgggtctggctctggtgctgccatctacgcatgtgggaccctcgttatcgctgttgctcaaaatgtattttatgaatcatcctaaatgagaaaattatgtttttcttactggattttgtacaaacataatctattatttgctatgcaatattttatgctggtattatatctgttttttaaattgttgaacaaaatactaaactttaaaaaaaaaaaaaaaaaaa

SEQ ID NO: 237354 - DNA, 783 bp, Homo Sapiens
gtgactttgcatcatagctggagatccctctgtagttcaaatggaaagctggtgttgaaggtgaaaccaggtcttcttcagaaacttgtgtgggaacctttcatgggctggataagcatgaggatcaggacagggcagggtcactgaccttaaaggaggatgctttgacctgcctccagcatgcacccttcctgctgaagccattgttagtgtcccttaattactcaggccaccacccagcagcgcaactgtcaacttgcagaggacttcagtggtatcagtagtgttcctttttactctcataggtgtcctgattcggaggatacgttatatggtcaccctacttataggtgaatattgagtgaggtagtgtaaataatgtgcataaggccaggcataaggcaaggactcaacaaacatccactgtttttgttagagggggtgctaggtgctcaagaaatgtctgctgagtggccaggcatggtggctcacgcctgtagtcccagcactttgggagactgagttgggtggatcacgtgaggtcaggagtttgagaccagcctggtcaacatgatttaacctcgtctctactaaatatacaaaaaaaaaaaaaattagccaggtgtggtagtgggcgcctgtaatcccagctactcgggaggctgaggcaggagaatcgcttgaacccaggaggctgaggttgcagtgagccaggatggcaccactgcactccagcctgggcaatagagcaagactctgtctccaaaaaaaaaaaaaaaaaaa

SEQ ID NO: 237355 - DNA, 703 bp, Homo Sapiens
ggggaaaaaaagatttattctatacaaagccttgtctggaccactttagagagacttctatttttttaacccttctataaatatttgatggcacttgaaatattcctgcaataaaatgtgatttgtgtaaagaaaaaaagattttgtaatgtgaaacaaagaaagaaagtaatgtaattttctaaaaaaaaaaatacaaacaaacaaactttgtattattttcttgatggaatttgtctatctgtctttggaaaactttttatttcattgaatgtgccatagtagaaatgtgtgtttttagttttagactaaggaatagctagttgttgtgttccgacattccaaaatgcaaaacaacctagtagtatctttcatgaaaaggtttaagtagtatgtaagcttctctcattgttgcttttttgcacatgttcttcattcctctctagtgcaatatgtacatagagcacttgcgggtgtaccttgatccctcagggaaaaatacatatttgtacagttttttggggtttttttgttttttggttttttttgttttgccttttgtttttggctaaggaatgtcgatcgaatcacttgttattgttgaggggcagccagataataatcctaaagccactgtttccaacattgattgtttaaatcatatgtccttccaatgctattattttaagataataataaaaag

SEQ ID NO: 237356 - DNA, 731 bp, Homo Sapiens
tttcataacttatgtggcttttaacttattgcttcccttcctgtttctgcatgatcagtctgtatgtactatctggaaagataacacatactccagccacctcacctgattggctatcttggggccatgtccccttcttgctgccacaggatgaataaagtgttgagatttgtctatggagaaagctgtgtgtctgtttttatctcccctctcaggaccagtcagccactggtcaatcaggctgatcatggaacattaggaattctccaattaagggagaaaaagtccagggacttagttatatcttcagaccagtgcagctgggacacacaaagttctcctgtctcaccatctgatatggtttggatgctcgtcccctccaaatctcatgttgaaatgtaattcccagtgttggaagtggagcctggtgggaagtatttggatcatgagagaggatccttcatgaatggctcagcaccatctccttggtgatgagtgagttctcactcaattcacatagatatggttgtttaaaagagtctgagacctctcccctctttctcgccatgtgatatgcctgctcccccttcaccttccgcctttactgtaagcttcctgaggccctcaccagaagctgagcaaatgttggtgccatgccagtacagcctgcagaattgtgagccaaaataaatgtcttttctttataaattaagaaaaaaaaaaaaaaaaaa

SEQ ID NO: 237357 - DNA, 781 bp, Homo Sapiens
tctcttgcctcagcctcctgggtagctgggattacaggcacgcgctgccacacccaggtaatttatttattttttttttgagacagagtctcgcactgttgcccaggctggactgcagtggcgtgatctctgctcactgcaacctccgcctcccgggttcaagcgattctccagcctcagcttcctgagtagatgggattacaggcgcctgccaccacgcccatttctactaaaaatacaaaaattagctggggcgaggggataggccgagttccgggtgtaagggggccattagggagagcagagcgaggcagctgatcttccggattgggggccttgcccggaagctggacctcacggagatgaaacggaagatgcacgaggatatgatctccatacagaactttctcatctacgtggccctgctgcgagtcactccatttatcttaaagaaattggacagcatatgaagattggacatcacatgtgaatgcatgatatgaagagcctggttacagtttctactgttctctgcaagtaaataggcccagaaaggtataagagactctttgaatggacataaaaattctgcttgttaagaacaagttgagctctggtaactgatcttaatagctaaaatataaaaatatttgggaagtctgaaatgaggtctcctggccctggtgtgcccttaatgcctgtgacagttggcctctgtgaatattggtataattgtaaataatgtcaaactccattttctagcaagtattaataattaagg

SEQ ID NO: 237358 - DNA, 551 bp, Homo Sapiens
gtgatccatccacctcggcctcccaaagtgctaggattacaggcgtgagcctctgcacctggctagggccagtgtttttaaccctcctcaaattccattttggactacaactaatgtgtatctcacactgtccaaattaaagatgtactctgtccttcactctcctttggatgtgtacggttagggtgacgatgtttgaaaatcaacacataactgaaatccaggatgaaacagtaagcagaactacttagaagtgaatacagaaatgatctatttcaagaggaaggttttccaaaattaagagtacttgagtagtctcaataggagtgtatttgtagacagcagtttccctatattatttggagtcaattcttacgtaatttgttgtttatttcttcagtgaacattgtctttttctggcagctgaaactgcacacaactgatacacatatttaatttgtattcctttgtagtaatacattttaaccatgatttatgtttgtgaatttactggatgttttctttctgaattaaagattgtcaagaccaaa

SEQ ID NO: 237359 - DNA, 507 bp, Homo Sapiens
tctggaactagatatgtaatctagtcagggatattcctttctcagagggaagtgagtcgcagttgcagtcttcctttgataattatctacttctaggacatgttacacatctgagacttttcaaagacagcaccataaaaggatggagaaatgccagtttcaggctaacaataactacttcataaaattgtgttgaggattaagtagggtaatacgtaaagaaaaaatacagtgtctggcatacagtaaaccatcaataaatggtgctttgaactgactgttgaaagcaaaggagttgatataaaaactggaagactgtttcatatcataaactgctttttaaaccaatacacatttttcgattcataccaccaactttagtttaagacaaagaggacaggcacaagtgcacattagcttacagtcagaaccccttctgctgacataccattaaaagaaaatgattaacacattttttttcttccgttctattttcttggtcattcc

SEQ ID NO: 237360 - DNA, 787 bp, Homo Sapiens
aggctttcgcctttttagacgcaacgccgccggttccaacagagacgcggccgctcactgaaatagagagccaaggagacacaggccccagctagtcccgcgccagcttctccccgcccggaaagcagccccgcgcactttcgatcccgagaccctctacgatgctcggggtcgccagaaatgccaccgcaggaagcacctaccactatccggacggaggggagctccctgccgcctcctcccgcccaaccgcgacggggacccacacctcggagcagacataaggaagcctcaggggtggggagaagggaggaagcaatgcgggggcggggagggaagaggacccagaagtccaggtatcagtcagcctccaaaaaagggggaggggtgttatccgtggtgtttggggaaggagtggaacccagaagccatcttgggatgggaggaatcaatcgcgatggctccagaggttgctcctcgcgggactacccgcaaccccgcccgaccgcgcttgttcccgtgaaaccccgagcattgggccgccgcctagacggctcccgcggctttgtactcactctgccctcgaagttgttttcctccacatcactcatgtcgacgaggcgctccccagaactaaataagggacaagtctcggctcgagggccgatggcctaattaacccgctgactggaccgtggggaagaggaaagagtcggcaaccacagccgctccactccactcccactcggtcgcaggctccagcaaaatggcgccccccggccgtgaa

SEQ ID NO: 237361 - DNA, 674 bp, Homo Sapiens
agctttggggtttgccaatttgcagccaggtctgtgttaatcattacatatggaaaaaagtcatataacacgacgaaagtctttgcaccatctcctcttctttccttttccaaaggtgacctctgtggggagtttggggctcatggtctctccctgttgtccaggctggagtgcagtggcatgatcatagttcattgcagtctcaacatcctgggttcaggtgatccttccacctcagcctcctgagtagctggggctacaggcacatgccaccacacccagctaatttttgtatttttttttgtagacacagggttttgccatgttgcccaggctggtctcaaactcctgggctcaagtgatcctcctgcctcggcctcccaaagtactgggattacaggtgtgagccaccgcacctggccttaatcatttttaaatgtgcagttcagtagtgttaaatgtacttttattatgtaacagatctccagagctttttcatcttgcccaactgaaactttatttatttatttttttgagatgcagtctcgctgtgttgcccaggctggagtgcagtggcacaatctcggctcactgcaagctccgcttcccgggttcaaaccattctcctgcctcagcctcccaagtagctgagactacaggtgcccaccaccacg

SEQ ID NO: 237362 - DNA, 650 bp, Homo Sapiens
tgtccattactgcttagcccttttgtactttctgaagtactttccaatatatttgtttacatgaacatcataaaaacccagtaaagtatagctcttgggtagttaactctggtgtagaggggagaacatggaattgcagaataaaaacctgaattctggtgcttgccctaccactaactaacttagatgttagacaagcaatttcctcaatttcaatttttaaaaattttcttgtttgtaaaacaagatgattgtaccagatcacttctgtggttccttcctgctctaaagtattctaggacttttctataatttctgatcatgaccataaaagaattttatggtcagatatttctgacagctggcaaaaagcccaaaccttctgccttctgatcatcctgctaagtcatgcctttttctgcttaatgacaataagaaaatgaaaacatctagtgaacttctaaagtaagtcatttacattccagtggtgcttctcttcatttatttaaacaatacttattgaacaagtttgctaccatactaagcattgaatatgcaaagacaaaaaagaaaaatcagtaactttatagtctagttaaagggataaaaatgaagaaaaattttattataaatataattaataaaaatag

SEQ ID NO: 237363 - DNA, 571 bp, Homo Sapiens
tgtcctttcttgactgtccagtacaagttgaatagaaatggccaaagcagacatccttgtcttgtttctgatctcagggggaaataatccagtccttcaccattaagtatgatgctaaccatgggttcttcatagatgccctttatcaggttgaggaagtttccttctattcctagtttgttgagggttttttattttttattttttattgtgaaagggtgttgaattttgttaaatacttttcctgtgcctaatgaagtgatcttgtaaattgtaatttaatcttatctattctcatgtccaaacactcaagagaaaactataaggaactatatttacaaaataaatcataactttacaaaaagggcataaaatagcattttggcaaaaacttaacttaggtaatctgaaggtatctaactgtatcaattttaaaaatataaaaatatagctttatgacgaaattttttctgactaaaaaagtaaaacttcatttgctggttataagacaatatgttcatttaagaaaaaagtggacatcctggctaacatggtgaaaccccgtctctac

SEQ ID NO: 237364 - DNA, 757 bp, Homo Sapiens
  misc_feature (4)..(4): n is a, c, g, or t
  misc_feature (52)..(52): n is a, c, g, or t
gagntgaacctcccgacgggccatctcctcattcagctctttcctgatattntgaaagttagtaactgccccaaagggccattaggagctgggagatggtaatgactagacttgggaagagggcttgggtggggagaatccaagtgaaatatccaatccagaacccaagccttcctgctacactaggttctttatacccataagccaccaatcccagctttcagaataactttttcccaaccacacttcccaaacaagtttcacctcctctatgcttacccatcatggctactatgatacttcgaaagataatggagccaagcaacaaccaaaggatgaaatagatgctgctgaagatgcgactgacttcaggcaccttccagacgtcctgaagcagtgcataccaatgatccaaggtgaagagaatgaacactgttaccagggaattcgggaggtccctaaagaaaaagacatgtgaatagacagaagcagagacctaaacctttcaaaaatggtaccattcttacttttaaagaaacataaagcatttctttgtagtttgttctgattttggctccttttctaccatactcagtttttagctaatcattctatagtttgaagttttttttgttgttgtttttattagatgcagtctcactctgttgcccaggctggagtgcagtggcgcgatctaggctcactgcaacctccacctcctgggttcaagagattctcctgcctcagcctctagaat

SEQ ID NO: 237365 - DNA, 606 bp, Homo Sapiens
  misc_feature (42)..(42): n is a, c, g, or t
atctacttttggtctttgatgatggtgatgtacagatgggtnttcggtgtagatgtcctttctggttgttagttttccttctaacagacaggaccctcagctgcaggtctgttggaataccctgccgtgtgaggtgtcagtgtgcccctgctggggggtgcctcccagttaggctgctcgggggtcaggggtcagggacccacttgaggaggcagtctgcccgttctcagatctccagctgcgtgctgggagaaccactgctctcttcaaagctgtcagacagggacacttaagtctgcagaggttactgctgtctttttgtttgtctgtgccctgcccccagaggtggagcctacagaggcaggcaggcctccttgagctgtggtgggctccacccagttcgagcttcccggctgctttgtttacctaagcaagcctgggcaatggcgggcgcccctcccccagcctcgttgccgccttgcagtttgatctcagactgctgtgctagcaatcagcgagattccgtgggcgtaggaccctctgagccaggtgtgggatatagtctcgtggtgcgccgtttcttaagccggtctgaaaagcgcaata

SEQ ID NO: 237366 - DNA, 596 bp, Homo Sapiens
ggatctcactcagccgcagacaagtaatcactaacccgttttattctattcctatctgtggatgtgtaaatggctggggggccagccctggataggtttttatgggaattctttacaataaacatagcttgtaacttgagatctacaaatccattcatcctgattgggcatgaaatccatggtcaagaggacaagtggaaagtgagagggaaggtttgctagacaccttcgcttgttatcttgtcaagatagaaaagatagtatcatttcacccttgccagtaaaaacctttccatccacccattctcagcagactccagtattggcacagtcactcactgccattctcacactataacaagaaaagaaatgaagtgcataagtctcctgggaaaagaaccttaaccccttctcgtgccatgactggtgatttcatgactcataagcccctccgtaggcatcattcaagatcaatggcccatgcatgctgtttgcagcagtcaattgagttgaattagaattccaaccatacattttaaaggtatttgtgctgtgtgtatattttgataaaatgttgtgacttaatggcaaacagg

SEQ ID NO: 237367 - DNA, 735 bp, Homo Sapiens
ccatgaatatgccctctttaaaaattacctttaaatacttatttttctttctaatatttaaacaaaactacaaaatgaaatatagtagataaaggagatgaatttctgaacattttcttattttgagacatcctttttcttctttcagcataagaaggagtttgcatccattgtagtatagttggatttttttagtttgaaaaacaaatcatgactttttcttaattggtttattgaattcatttactggtttactgaagactttaaagagggcaaaagatatattttgttaagagatttgttaattttgagaagtatcccattgattactgtaagaattatgtttataaattagattatttggcactgtagtaaatatcagtgaaaataaactttaactcataactttaatattttcatacaatcaaaaaatagagatatactctaggcataacataaattgttataattgatcagaatatcttgaatatatttttacagataactagtggtttctactagcagattaaaaccaagagaaaattaaaagtaagttcacatttaaaaaaaattataagcaataaatacagcactacagccaccactaattctatatacattggattacatttaaacaaacactgcattccagaatgaatattttatgaataaatgcattggaaattaactttaggaaataaaatgacaaattagaatttagaaaattaaaatatg

SEQ ID NO: 237368 - DNA, 673 bp, Homo Sapiens
aactaagcatctgttccctagaaatacatgtgtccaggtcgtctccatgggcttttctttgcagatacttttatgtggaacaacagtggcaaatgttttcatttacttgaatttgaaaatgttagggtttcctccacctttttatgaagtaaaagaacctgtcgtaccagcatcatgagctggatgcaggagcccatggctgaaaggagttaaaacgcccagtggtcattaagtgaaacatcttttatcaacctgcaaaagctgcagcgttctctgccaggtcaaatgggcatgtttagaaaataagagaagatggctgagtatagctaatgaataaatggttgtttctttagaaaattaaacacacacagagtgtaagaggagaggatacggccctccctgaaggataaagtccacctggacggtgccctgccctcgcttctcacattaactgcccaggaatgtcatgctgattggttcccggaagggtgtttggcaaggggcagtgtatggagctacgtgtagaaggagagaaatttgtgtgtggcttttgtaaattttgaccgattgcagcaattaaatagttgattactgtgttgatttaaatacttatgaaagctttcagacaaaaataaactttcacgttaccatgataaaaaaaaaaaaaaaaaaa

SEQ ID NO: 237369 - DNA, 577 bp, Homo Sapiens
agtaatataaattagctttttccagaaggatccttttgtagcagtgtttatgaatgtaacccccagcaaaatatggctatatattaggggagccagtttggagcagaggcctgaaggtccctgctatgcagccgtggccacagctcgcagcccaagcactgtggagcatccacacctttgatggcaatgcagattggtagcaggttccataggcgtacaaaacagtattaaagctcagtgttttgcatattgttagcatttacaaatatttttgctttagtatgaggaaagtaaggatgggcaaagaagtgatcaaaatagctattgctacaacattttcgaaaacaaagttggggctgtatttctttaaaaagataagcctctaaaaatgcttggcaaaaaaaatatagtgttaaaataggccagtgatattaatgagaaaatgaaagtatgtatcaggaataaagtgatattgcataggagtattgtatttttatgaattttatgccagttgtttacatgtactatatatgttaaattaaaaaaaatcatgagaaatgaaaaaaaaaaaaaaaaa

SEQ ID NO: 237370 - DNA, 501 bp, Homo Sapiens
tgcttggagcattctcattcgagaggcacaggtttagtgatataggattacatttccttctctatgggtccaatcacactacttggttctgcagtgaataatattttcataatcctaacattgtaaatgctgtttattggttttcaattttagaatcaacctatagacaaagcacggaagacttatgaacgccttgttgcccagttccccagttctggcagattctggaaactgtacattgaagcagaggttactattttattttattttttcttatatcagtattgcagcattcactgtagtgatagaaaacaagttaggaacatagccaattaggacaaggaggatttaaatgtgtcttacctttattttgtaaaataggtataaaggagtaattaaaatgaatttttgaaatttgggtcttttacaagctgatgattgttgcattttggagttgcaacaacattaaaacagtttcaatggtaaaaaaaaaaaaaaaaa

SEQ ID NO: 237371 - DNA, 405 bp, Homo Sapiens
  misc_feature (6)..(6): n is a, c, g, or t
aaggantacaaccaccttccaacaggccctttggacaaatacaagattcaggcgatcgacgccaccgactcttgtatcatgagcattggatttgatcacatggagggcctagagcatgttgaaaaaataaggctgtgcaagtgtcattatatcgaggatgactgtttgctgagacttagtcaacttgaaaatttacaaaaaaccatattggaaatggaaataatatcctgtgggaatatcacagacaaaggcatcattgctttgcgtcatttaagaaacctcaaatatttgttgttaagtgatcttcctggagtaagagaaaaagaaaatcttgtccaagcctttaagacagcactgccttctctggaactaaaattacaattgaagtaaaaaaaaaaaaaaaaa

SEQ ID NO: 237372 - DNA, 604 bp, Homo Sapiens
tatatcacactaccttgcaataggacaaagggaatatgtggtaaactatgttcccagcatctaaaagccaggagtggttttcatttttctttaagaagatgatagtgtgatttgaaacatatctgaatttcagaagaggggacttttaaaaattgccactcataaggaaagaaagaactttttcacatatttttgaaagaaacgatggtgagaagatattcttgataatagagatatgctaacatttgctttgggtgttttgtaggttagatttttttggtgtgtactttataggcttgcatattgcttactttaaacagctgaagttctaagtaagagtgttcatatatgtgaaagagttcttaaagtactatatagttttgttattgtattgaatatatattgttctaattcctagagtatgtcatcttctatatactctatacagcaggaatccttgctgtacaacaattatattaaagaaaactctcagttatcctttatggtcttgtcaatcaaatgttttggtcaatgcatattactaactttcatctaattaatgcacaataaaatatacttagtgtgataacaaaaaaaaaaaaaa

SEQ ID NO: 237373 - DNA, 595 bp, Homo Sapiens
  misc_feature (80)..(80): n is a, c, g, or t
tgtggagatgagatatacccctttgatgtagaattattcatgtggtttgtttcatacttcattataggaatcaagtaatntgatgactaatgtggattatatttcagtcaaagctctgctttcaatttctctgatttgctcactaatgccttatgtgtgttttactaaccttttatatcttgccttcaagtgagaaggaacaaacaactctcagtggttactacttgcttttatatgctggctgtgaaggttaaaagaaagaatggtctgtaccattttttctgctttgctgcccttttattgtaccccaggcctcctagaggactcctgcagattctattgttgggtgggaaatagtgttggaatgtgtttgcacagtcttatgatattcagtctcagtctgctataggtatttgttattcttggatactacacacctgctcagactgagtaaacatttgtggtgctgtcaacctgatttcttgactctcaaatgatttttgtatttccaatatgaatttgtgtgttatgaatttctgatttctccaatagtatatgccactatataaatttgtattaataaaaaaaaaaaaaa

SEQ ID NO: 237374 - DNA, 411 bp, Homo Sapiens
gatgaaattcaccagtgaagccgtgacatcctgggatattctttgttgagagtcctcgcagtccgcctgagagagtagagaagaccccctcccagaaccttcctgtaaggtctccccgctgacttcctgtagtggatgtgactgtgtgccaggtgcctgccgaagacccctgtcactgactgtgccctttgggaaagagtcaacaatggcctcctcctatggctgacttcgttcatgttcaggctctccagcttgctagtgagaattgccaaggattggttcatggcaggatagaactaaactgatagatgaaagctccacagtgcttcaagacggggtcccgttcatgttaagcagttttccttccttcaaaataaaaaactagcagtccttaaaaaaaaaaaaaaaaaa

SEQ ID NO: 237375 - DNA, 518 bp, Homo Sapiens
caggtatttataagtagctcaacctaaattaaataaattgtcaccaacctatttacactctacattttattatgcctaaagagtcagtgatgataaattcggaattagagaagtaataacctccagaagcaccttagtgggtcaccatccttttgatcaaagggtgtcatcagtacagaacttaagtattatgtcatttaatttacagtgctttggctaattttatttaacttaattaatttaacatcttgaattaggttggttacattttgactgtttttacagtcaaggaaacttgtagaaacacagcaaagctagtgaccttcacactttcatgcatgaacataaatgagctcataagatcatcgtctctttttgttgcgtttcaaaggcgtttacctatcttggagtaagatctgacatttctgaccttgataggataatcatagataacatacttttaaatgaatttacagagaaaaataaattttatttgtcctaaaaaaaaaaaaaaaaaa

SEQ ID NO: 237376 - DNA, 589 bp, Homo Sapiens
  misc_feature (90)..(90): n is a, c, g, or t
  misc_feature (105)..(105): n is a, c, g, or t
tacgagcagattcttgggatcacctgtgtggagagcagcctgcgtgtcactcgctgccgccagatcttacggagcctcccagagcacaantacgtcgtcctccgntacctcatgggcttcctgcatgcggtgtcccgggagagcatcttcaacaaaatgaacagctctaacctggcctgtgtcttcgggctgaatttgatctggccatcccagggggtctcctccctgagtgcccttgtgcccctgaacatgttcactgaactgctgatcgagtactatgaaaagatcttcagcaccccggaggcacctggggagcacggcctggcaccatgggaacaggggagcagggcagcccctttgcaggaggctgtgccacggacacaagccacgggcctcaccaagcctaccctacctccgagtcccctgatggcagccagaagacgtctctagtgttgcgaacactctgtatatttcgagctacctcccacacctgtctgtgcacttgtatgttttgtaaacttggcatctgtaaaaataaccagccattagatgaattcagaaccttctaatgaaaaaaaaaaaaaaaaaa

SEQ ID NO: 237377 - DNA, 670 bp, Homo Sapiens
  misc_feature (9)..(9): n is a, c, g, or t
caagatggnttctcttaacacacttgtaacccatttgtgcacacaggtgtgccgtgactcactggtgaatccaaaaaaagctgaagcctacatttcccagagcccctttcagcttgaattccaaatgtgacttagcttcctctatgcagatgtacctacttgaaactgggaaggccaaatgagatagaggtaatgtttctgccaacaaacagccacagagcattttatttttctagaagagcaataacagagaccccagggtgtggtgtggcaggacgaggagcatccattttgctggtggggattgtggctaaaataatgtggctctggagccagcaatgggcagcatcttcatgactttccagcttccaggctgtaagcagagatagcatctcttctggacagccagttatgtgatagtgttctgagagtcattcctggaagtcagactaaaggctgctccttcagcctttccattcatcttgtaagcaggaggcttctgtgcatggccagaaactaacaaaagcacattgtgtctaaactaggttgcagtggtttctgttatcagcaagtaaatcctgattgataaagatactacaatatatgcacatatatatgttatagaatcaataaaaattggatactttgctttaaaaaaaaaaaaaaaaaa

SEQ ID NO: 237378 - DNA, 615 bp, Homo Sapiens
agaatactgcagtcctgaggaatttccctgcagtaagtccggttacaggcaaacgtgcaggacgtgcaggagcgtcttgtgaggaggcctgctgcaggtattcctgcatgagagctcccccttcgtggcctcccgactccatttgtttagggattggtggaagtagttccattttggtacctgcaactttcacagctgtcgtgatgaaatcaggcttagctcttcatgattgagtacctgctgttcactgctacagtataaaaccatgccacaattcctgtacaatctttttttttcttttgagttaataattacctaatattttcacatatctagctttttactaacccatggccagcctttttttcaagtaccccaacgtttttgccacatgcctaacgataccgttttccaaaggctcaaacacatccgttgtgtctaactgattctcctgttccgacctagaccgatcacttcctgacccggctgcacagctcttatctcgagcttttctctgctctcatccttgagactcactttgtctgtctcctttcttggattccctgtgtaaacgaaaaataaaatcctaagctctctaaaaaaaaaaaaaaaaaa

SEQ ID NO: 237379 - DNA, 510 bp, Homo Sapiens
tctttaatagtgttgagtggcacaaccttgtaaatgtgaaagtacaactcgtatttatctctgatgtgccgctggctgaactttgggttcatttggggtcaaagccagtttttcttttaaaattgaattcattctgatgcttggcccccatacccccaaccttgtccagtggagcccaacttctaaaggtcaatatatcatcctttggcatcccaactaacaataaagagtaggctataagggaagattgtcaatattttgtggtaagaaaagctacagtcattttttctttgcactttggatgctgaaatttttcccatggaacatagccacatctagatagatgtgagctttttcttctgttaaaattattcttaatgtctgtaaaaacgattttcttctgtagaatgtttgacttcgtattgacccttatctgtaaaacacctatttgggataatatttggaaaaaaagtaaatagctttttcaaaatgaaaaaaaaaaaaaaaaaa

SEQ ID NO: 237380 - DNA, 498 bp, Homo Sapiens
agtgttttattgatgtttaaacaattgtttaaatcccactgaaaaatttaaatattaaaatatcttgcacagtctaccaaatgagttaaatcgttacagtcgtgtctacctcttatttttctatctgtatttaggctgctgttttggtgagattctaatttctttttcccctggaactactttctgtggaagacaaggaacagactggggacagaggcctgaaaacaaattggaagcactcagagatctattgctgaccagccctattcctcatgagttggcggggggaaagccattgtttttaatttccacttaatatgaaaatgcttgtttttaaaatgttttttcctgctgaacaaatgtatttttaaaaggaaaaaaaattctcttttggctctaagaagtcagctgtatgagcaggcgtgaccatatcataacatgctgatatgatagaaatcaataaatttttacctctccgggaaaaaaaaaaaaaaaaaa

SEQ ID NO: 237381 - DNA, 493 bp, Homo Sapiens
gtgatgtcacagacgcttctctttcagcgctaaccggtggccttgaagggatcctcgaaaagccttaagcggggaggtgccctatcacagacggaaatccccgagaggaggggagggagcccagagccggctgaaaggaccggtcccggggagctttaaggtgacggtcgaagcccagggaccccttcctacccagatcccttcgcacgaatttcacccttgatcacagcctggagcagttgggaggaccccttctatatttctctggtctctacctgagacgaataaacacacacgcttgtaaacatactgagtatctctgcaaaggaacacaggaaactgccctaggggaggggaaccgcccttggaaggaaacttcctttcccttttgtgctgtttgcgttttactactctttgtatgcgttatctatcaaaacgacgaaaaatattaaaagaaaaaagatacacttcatacagaaaaaaaaaaaaaaaa

SEQ ID NO: 237382 - DNA, 512 bp, Homo Sapiens
  misc_feature (15)..(15): n is a, c, g, or t
tgggtcgttttactntaagagatgagggtaagaccattgcaattggaaaagttttgaaattggtcccagagaaggactaagcaattttcttgatgcctctgcaagatactgtgaggagaattgacagcaaaagttcaccacctactcttatttactgcccattgattgacttttcttcatattttgcaaagagaaatttcacagcaaaaattcatgttttgtcagctttctcatgttgagatctgttatgtcactgatgaatttaccctcaagtttccttcctctgtaccactctgcttccttggacaatatcagtaatagctttgtaagtgatgtggacgtaattgcctacagtaatgaaaaattaatgtactttaatttttcattttcttttaggatatttagaccacccttgttccacgcaaaccagagtgtgtcagtgtttgtgtgtgtgttaaaatgataactaacatgtgaataaaatactccatttgaaaaaaaaaaaaaaaaaa

SEQ ID NO: 237383 - DNA, 398 bp, Homo Sapiens
ttcgtcatctgcgtgaagctggacctcacagggggcgcctttgaggacaacctgaggtcactgcacttgcaggagggccaggacttccttcacttcagctgacggacccatggcagctgctcccagtgcatcccaggccagcaggagctttgtgagctgcaggcatggcgatggtgcgcctgttccacacccagcaggcgcaaccagagtctcgtgtgtgccgaccacaggagccaagccttttccactgtgtggactcatgtggccaaggctaggcctggtcacccaggaccctcaccacgtgaccccagccaatcgggacagttcaaggaggaggagacccctattacacaggttggaataaaatatttaaatctcgtaaaaaaaaaaaaaaaaaa

SEQ ID NO: 237384 - DNA, 549 bp, Homo Sapiens
ttgtagaatatggagactaactcctaggagttgctttactctgtcaggtgacttaagtcactgggattcactaattttctctgagagaacagctgattgagaatttccattgtaaatagctcagtgttgtatagtgaggcttacgatgttttgtagtcttggcgtaaggacacagcccaagtaactgacgtttcccctccccctcccctctgaggagcctgcctgcctcacaactcaccctcacttcactgaatgaggaggctgagcagctgcagtgtttctgtccggaggaaatggatcttaggccactggacaagaacctgcacccaagggccctgaacccattttcctcccctgtcccagccttcccactttgacagacacttttaactgtgttccttactgctgccacaatcagcatggttgtatagtgccccattaggccatttacatacccagagttatactcaagcagaatgcacaaatggacatgtcataatttttgttacaataaatatgaaatttacaagtaaaaaaaaaaaaaaaaaa

SEQ ID NO: 237385 - DNA, 653 bp, Homo Sapiens
gaaatagtgagcttcctactcaggccaatttacacctatcgaccgcccttcaaccgccacatagtcacattgtcaaatagcgtattcaccttctcttataagaaggctcagcgagatctggcgtataagccactctacagctgggaggaagccaagcagaaaacggtggagtgggttggttcccttgtggaccggcacaaggagaacctgaagtccaagactcagtgatttaaggatgacagagatgtgcatgtgggtattgttaggagatgtcatcaagctccaccctcctggcctcatacagaaagtgacaagggcacaagctcaggtcctgctgcctccctttcatacaatggccaacttattgtattcctcatgtcatcaaaacctgcgcagtcattggcccaacaagaaggtttctgtcctaatcatataccagaggaaagaccatgtggtttgctgttaccaaatctcagtagctgattctgaacaatttagggactcttttaacttgagggtcgttttgactactagagctccatttctactcttaaatgagaaaggatttcctttctttttaatcttccattccttcacatagtttgataaaaagatcaataaatgtttgaatgtttaaaaaaaaaaaaaaaaaa

SEQ ID NO: 237386 - DNA, 718 bp, Homo Sapiens
  misc_feature (19)..(19): n is a, c, g, or t
ctcctttctctccctgctntctgtgaaggagaaattagcctggcctctaccccctattccctgtgtctgccaaccccaggatcccagggctccctgccattttagtgtcttggtgtagtgtaaccatttagtggttggtggcaacaattttatgtacaggtgtatatacctctatattatatatcgacatacatatatatttttgggggggggcggacaggagatgggtgcaactccctcccatcctactctcacagaagggcctggatgcaaggttacccttgagctgtgtgccacagtctggtgcccagtctggcatgcagctacccaggcccacccatcacgtgtgattgacatgtaggtaccctgccacggcctatgccccacctgccctgcttcctggctccttatcagtgccatgagggcagaggtgctacctggccttcctgccaggagctctccacccactcacattccgtccccgccgcctcactgcagccagcgtggccctaggacaggaggagcttcgggcccagcttcaccctgcggtggggctgaggggtggccatctcctgccctggggccactggcttcacattctgggctgactcataggggagtaggggtggagtcaccaaaaccagtgctgggacaaagatggggaaggtgtgtgaactttttaaaataaacacaaaaacacagaaaaaaaaaaaaaaaa

SEQ ID NO: 237387 - DNA, 686 bp, Homo Sapiens
gagtgacagctttctgggatgtcacagtccaaccagaaacacccctctgtctaggactgcagtgtggagttcaccttggaagggcgttctaggtaggaagagcccgcagggccatgcagacctcatgcccagctctctgacgcttgtgacagtgcctcttccagtgaacattcccagcccagccccgccccgccccgccccaccactccagcagaccttgccccttgtgagctggatagacttgggatggggagggagggagttttgtctgtctccctcccctctcagaacatactgattgggaggtgcgtgttcagcagaacctgcacacaggacagcgggaaaaatcgatgagcgccacctctttaaaaactcacttacgtttgtcctttttcactttgaaaagttggaaggatctgctgaggcccagtgcatatgcaatgtatagtgtctattatcacattaatctcaaagagattcgaatgacggtaagtgttctcatgaagcaggaggcccttgtcgtgggatggcatttggtctcaggcagcaccacactgggtgcgtctccagtcatctgtaagagcttgctccagattctgatgcatacggctatattggtttatgtagtcagttgcattcattaaatcaactttatcatatgctcttttaaaaaaaaaaaaaaaaaa

SEQ ID NO: 237388 - DNA, 654 bp, Homo Sapiens
accagatgacttccagggagtctctcgctttgagtccaccctggcatggttgcagtctgtgggaaagtggggcaggcaggtggacttcagaagagcttgaggggtcagcactccgcacacccatgccctcaggtgcgatggataaacagaatggctttaggtgccgtctgtccaaattaccagcggaaccttccttcccatgcagtattgttgtatgtacttgtaacctttgattaggtttctctctgtactcttagatgtccttgcttttcttccccatcctgcctttaacctttctaatcttgccaaagctcttgagtgtttccccatcagtttccttctctcttatatttcagttttttaattgagttcatgatcaaaccttcatctgatcacatcacatgtactgtgcatccactgtgattagatagcttatgggatccttgaaatcacattgacaggcactgtaaagtcacagccaagttagcaattattagttgcacctcagagaatgttggaataatgatctttgaagatgggattgttcatatatttggataattattgctgtggatttctctctagcattttagctcattccagtaaatgattttttctttatgaattagaactcccaaaaaaaaaaaaaaaaaa

SEQ ID NO: 237389 - DNA, 683 bp, Homo Sapiens
  misc_feature (83)..(83): n is a, c, g, or t
ccccctcggccgcccggcagtgcacgcggcttgttgacttcgcagccccgggcggagccttcccgggcgggcgtgggaggagngaggcggcctccatgcactttatgtggagactactggccccgcccgtggcctcgtgctccgcagggcgcccagcgccgtccggcggccccgccgcagaccagctggcgggtgtggagaccaggctcctgaccccgccatgcatgcagcgccacctggaagccgcgcggccgctttggttttttgtttggttggttccattttctttttttctttttttttttaagaaaaaataaaaggtggatttgagctgtggctgtgaggggtgtttgggagctgctgggtggcaggggggctgtggggtcgggctcacgtcgcggccgcctttgcgctctcgggtcaccctgctttggcggcccggccggagggcaggaccctcacctctcccccaaggccactgcgctcttgggaccccagagaaaacccggagcaagcaggagtgtgcggtcaatatttatatcatccagaaaagaaaaacacgagaaacgccatcgcgggatggtgcagacgcggcggggactcggagggtgccgtgcgggcgaggccgcccaaatttggcaataaataaagcttgggaagcttggaaaaaaaaaaaaaaaaaa

SEQ ID NO: 237390 - DNA, 600 bp, Homo Sapiens
agctccatgtcccagataaaccaggccagactgagaaggctccccagaggcctctgtggcctccactccgggaaagccctctgcccacacccacaggcttcacattcccaccaccttcgcaccgtgcccaggtacactttcaagacactgtaaccacaagatgttatttattgagctggcgccgggacttgggcggggcctgccctacagtgagcagcccacacaggaacgctcctctcgcgagcggcccgggcagggaccctgtcccaacaccaacacctcctctccagcccaatcttctgggtccagacctgcttgtcccttttttagaaaacacttttaaactttttaaaaattttaaaccttttttcagcagatatggagagagctgacaatcaattcacattttttaagccattttagctaaactgtcattgtgcatctctgaggttccctcatggagctccacagatccatttttagggaagggattttggctcaaaacgatctgaccacctctgccctgtccaccaggataagtgacacctaggacccaggaaataaatgccgatgatttgtgtgaaaaaaaaaaaaaaaaaa

SEQ ID NO: 237391 - DNA, 666 bp, Homo Sapiens
cagcctggcgcccctgcagattccagcagggtccctctgagtggggccaggcccaggactgtcacacaaggcttgagaagccccctctccctggtcctctcctacccacccatgtcctctcagaaccccagccttgaaaatagtggggggcactcagaggggccacctcctcagccgtgggtggtgggcccatggcagagaagcctgaactctttactgggttaccaggttcatacattgctgaggacctgacaggacaacctaggggcagggctggggtgggggccgcagagggcagccagggctggggaacactgtgaaagttacttggggagggtgggccggtggggccgtagctctctacctctccctgctcctggtgcctgcctctctcctccaccccaggcttagaggacagaaaaatgtgaagagacgccccacccaccctcagccagccctctccagtctcctttcctaggcttttttgggggcctaacccacgcagtgaccccagagggcagggctaggcgagagcctggggtggggcgggagggggaacagtatggaaaagactggaaggggaaaggaagggaagggagggagggtctgttctatctgttgctgtaaataaagatatttgtccatctcaaaaaaaaaaaaaaaaaa

SEQ ID NO: 237392 - DNA, 607 bp, Homo Sapiens
gatatcaaaacagaggttccagaagaagatgcactaagtagcaaagaacactcagaaagcagtgttaagaaaaatttacctcagaatttactgaatatatttaatcagatagctgaatttgaaaaagaaaaaggaaataagtcaaaaaattaatacaccaaggatatcggcaccattacacaaaatgccattaagtgaagtttttggttgtattagtcataacagttgagtgcagaaatctctgcttctaaaattatttgtagagattacaggaaacaaatgcttttaagtaagtttttctcaaattttgtttcagttctaggtcccttgtcacagcttggtttttagactttttatgtatatgtttatgtacagtatattactcttgacagtttgaatttcttcacctaaagataattctctgaaagtactgtttcttcattctattgcggtatatgagaattcctgggtgcatcttattctgctgtttgagagaaaaatttgtgcattgaacacttggatcatttttataaaaattaatttcattttcttttctgttaaattaaaaatcgtcagcttttgaaagattaaaaaaaaaaaaaaaaaa

SEQ ID NO: 237393 - DNA, 674 bp, Homo Sapiens
  misc_feature (654)..(654): n is a, c, g, or t
gtacgagtccgagaaggttgggtcgcctcttccgaggagctcgcccgtcagcgaggagtcctggagcgcacagagaagatggtggacaagatggaccaagatttgaagatcagccagaaacacatcaatagcattaagagcgtgtttggggggctggtcaattacttcaaatccaaaccagtagagaccccacctgaacagaatggcaccctcacctcccagcccaacaacagattgaaagaagctataagtacaagtaaagaacaggaagcaaagtaccaggccagccacccaaaccttagaaagctggatgatacagaccctgtccccagaggggctggttctgccatgagtactgatgcttacccaaagaacccacaccttcgagcctatcaccagaagatcgacagcaacctagatgagctgtccatgggactgggtcgtctgaaggacatagccctggggatgcagacagaaattgaggagcaagatgacattcttgaccggctgacaaccaaagtggacaagttagatgtcaacataaaaagcacagaaagaaaagttcgacaactctgaagacagacggatttccactctattgtgatgaaaagatttgaaagatctttttttgaacttcccaagaaatttcatttnctaaaaaaaaaaaaaaaaaa

SEQ ID NO: 237394 - DNA, 887 bp, Homo Sapiens
aaaaactggaggcgttccaaagctttctggattcccattaaattaaaaaccctttttaaattaaatcccttgtaactgaagagtatcggtggatgaagaaaaaaatagtctcaccatgtcttcatttccatccttggctcagtacagctccagttccattattcttaaacatctattaacatgattgctaaataattacacaggctaactgccaagcatttttcacaggaagcaaggcactgctcttctggcttatgcaaaagggtcactgttttttttttttttttaactttatcttgttttgattgaagaaacatctctaaaaataccatctgagtgcaagataaaaaggaaatagcaattcaaggcacaaagctaagcacatgcaacaatatagatgatttgggggtgggacagtacagaattcagaactgatagaagttatcagctccatatttcagaaagacctaatgtcttccttctgcttatactgttctgacagaattttaattttggcagagatcactctcgatgttatgatgtactgattcagaggtcccaaatcagtaacctgatcctagatagatcctcaaaggtcaactgccactaggtgtccccttcttgatcattcttcatgctgcctggattggggcatggctaagcactcaagtcaaaggattagttggcaatatcctacattgtcaacaaagctttgaagaaaaacagagacagaaactggtatttactaagtacctaggtgataaattattttcataaacattaccctataaaacagacaactctcctgtcccaaatccaaacagatctttttcctttatttacagataaagaaaatgggcttagagaggttataaaatttgtctaag

SEQ ID NO: 237395 - DNA, 619 bp, Homo Sapiens
cagtgcgggggggatagctagttattgtactaacttcttgcaacagtttcttaattgacgtatcaggtgacaggtctcacagagtcaccaaggccccactgtgatacttctccatgtatttattggcttgtaaatgaatgttcaaatatatcacttaggttcatttgattaacgaaagcaagggctggctgtaataaataaacgctcacagaatggcttagtgaaggaatttgaatattcctagcctcccagacttcgcttggcaggggctgggggtcgggggagtcaaatgtgtggctaataaaagtgacttttgactttgagctctattcagaagtaattctgcaacatgaagccttccagtattctcccttcaccttgaacatttctctcctgctgctcttcatttgctgcctggtagtcagtctggagctgctttcatctctgttgctgccggtgctcttggcctagtacaagcttgacctcttagcagctggagttgacttagttattctcctagcattctctgagtgacttggttgctcttacagcacttcagattagctttgctgatgtgaaaggtcacttttcaccaatattaaaacttattaatcttcaa

SEQ ID NO: 237396 - DNA, 524 bp, Homo Sapiens
aagaaaaaggtttctatcatgtcctgtttgcttttgtgcaaattatttttgtttaatgtattttatatcttcgttgcattctaattttgcccttctttaaactgctggagtctcttctcactgcttgtacatttcatcaacttgtataaaaactcttcagactaaaagattgcccctaatgtaaataataaatatttatgaagtagttattttttaaatttttatcgtgtttaattctggctttctctgaaatccactgtgatttcagccaggtctgtaatgacgctggacagaaacaaggctagagaaaaagccatcgttcaaagaaatttcccttgagctcagcctgcgcagtgcccggaaacatggtggggaaagggcccgagcagttggaaggaaaacaaggcaatttaaatttagagtttatgacttgaagttgttttgtttgttgtctattttgtttttgtaaatttctttgacagacttttactaaaaggacatgtagtttccatgaaagtaaaaaa

SEQ ID NO: 237397 - DNA, 560 bp, Homo Sapiens
ataggagtccagggtatgactgatggaggccccggcccacgtgaccagcaaggtcagaggcccagccagattccatcctggggaagcaaatgaattctcagaggaagtggtctgtgtctgcatgaactgctctcaaaccaacaaacaggcttctcttggcaccagactcatgacaaaggattcaagattgtttgaaaaaaaaaaaaggggagcagggaggcagaaagtcctggaaaagtaaattgtttattttacaataagaaagtgattacatattttttttttttacaatggtggaaaattagaagtcattgtgaaaatgatgtctacctgccttgctgatgagtaggatgtgatttggctctttaggaaactgaatttgcagaacttaagaatattgatttataaagggcatggccattgacccagtccatcttatgcaaatctggatgccataaataatatttaaaaatgaaagtattggggtggaggttgcagtgagcagagattgcccccgctacactccagcctggtcgacagagtgaactctgtctcaaaaa

SEQ ID NO: 237398 - DNA, 463 bp, Homo Sapiens
tgtcatccccccagccaagcgagcccctcgtgctgctggcggctgagcagaccagtggcagtttctcacagctctcaggaaagccccagctcacagcagacaggaacaatgacactgccattgaaatagacaactgcagcagctacaagataccctctccagtggcatctccaatcaatttgaatatacccatgagagctgccttgagccacagcctctgggaacaagaggactggaatgagcaccttctacaagttcatatagccagttacctaggagagcacttcttgggagcctgacacctaggcaaaacatgctcttccttgcatacgtgtacttgctaccacctcttataatgctccttttccactgtgagccaagtgaccttgggagaggtaagatggtgtttccaacaaggtgcttctctacttccaccaataaacttccaagtgagtccctaaaa

SEQ ID NO: 237399 - DNA, 470 bp, Homo Sapiens
cactcactgcatttgtgagagtggccaggtcacctgtgtggtggagatttgtcccccggctccctgtcccagtcctgaattggtgaaaggaacctgctgtccagtttgcagagaacgaggaatgccaagtgattccccagagaagcgctaataaaagttttgtgctgttgagccccaaatgggaaatttctcaggaagagacatttaggacttcagaacttttaacttgtagtcacattgttgatatggaaaccactgacttaagcaacttagttcatctaatcttacatatacttacgatcttttattttttcattttctaacataccttgaaataattcaaaactaaaagcaataaagtgcatatgaagtgtttgatcataagaaatatttcttactgtaagctgtcagttttatatgccacacctggaaataaaaagaatatcatggaatatttaaaaaataaaaaa

SEQ ID NO: 237400 - DNA, 455 bp, Homo Sapiens
tgtgatatagaaagatggtctcattactttgggagtagttataaatctccctataatgcctgtatataatgctcatatgtgatataaaatgatggtcccattactttaggggtacttgtaaatctctgtataatgccgacatataattctcatgtgtgatgtagaaagatggtcccgttactttaggggtagtcacagatctctgtagagctcctgtgtgtaatacccatatactatgcctctgttgattcagatagatcaattacttcatagaatgaatctgcgtgtctatttttaggtggatgagttgctatgttttaccattactattcttgctacattagttcagcttctacaggtaaccaaatgattttcattatcgtatatttataatgtctcatccagttattttctggaatgagagtacaaataaatgtatttctcaacctgaaaaa

SEQ ID NO: 237401 - DNA, 449 bp, Homo Sapiens
atctggcatgtcacttccttgggcttgtgtcatcagcagttgtgaagtccccattggggacttggtagcatggaaagccacacaaagatgtgctgcatctgttattgtctgtgtgggtactttgttttcaataatattttgtctccttgcctaattttatttgtctatgcacatgtgtgcgtgtgtgtgctcgaatgcatgcgtgtatatgtgtttagggtctcttcccagtgatccgtaactcaccaaaaatcacctgtttttcccaaaattccctggagcagtaaattaccattcttaaagaaggatagagaaaggccaggtgcaatggctgacacctgtaatctcagtgctttgggaggctgcagcaggagactagcttgaggccagtagttcaaggctgtatgccacacctccagactgagcgacagggtgagaccctgtatctt

SEQ ID NO: 237402 - DNA, 1000 bp, Homo Sapiens
  misc_feature (366)..(366): n is a, c, g, or t
  misc_feature (371)..(371): n is a, c, g, or t
gagagatagaaagtgtagtggaaaagtaaggtcccccccccacataaaagagtgtatctttttctcctcttggagagagccccctctctgaagtgagtggcttagtctgccgatcgcatatattctgctctcatgtattcagagtaaaggctatatctttacacaccccactgttgaagatatttatttttttctccaccccgtttttgggatatattttttacacccacggggtttctagaagaaaaccacgcgtcctccctttctagtacttacccaacaaccgaacgttgacataactacggggaggacacaaatgagattgttctaagcggatttttgctttgtatcccaaccctcacaggnggacntaagagaaagttcgccaaagggtgggaaacatatggatatctctttgggggggacttcccaaaatgtggacaaaacctctcttcttgcctcatttagtggtgggtgttttccaaagaggggaatttttttccccttgacctttacgggcccttaaaaaagatgtaagcttggggaaattatagggggcggttttggcccacccaacgccggggataaattttttttggttaaattttttaaccaagagaacaggggttttcaactgtgttaagcacacgatgggtttcaatctccctgacacgggtgatccacccacctcggccctccaaaagcgctgggattacaggtgtgagccattacgcccagctgaatagtatacctttctaaagtcctttagcttttgccagtgattaaaaaaaaaaaatcacctgtgtaatttctgtgttatttacaaattagaaaatctttaccttttattgtttactgccaaattctagagttttagatttcttgttccatgatccaaaaaatcagaacatgtcttctgatttaatgttgttaaaaacaggaaattaagatatctgggacaaaagttctaagacaaattctgcttattgtctacagacgg

SEQ ID NO: 237403 - DNA, 459 bp, Homo Sapiens
  misc_feature (2)..(2): n is a, c, g, or t
gnaagatggcttgagcccaggaggtggaggttgcagtgagccgagatagtgccactgtgctccagcctggatgacggagccagatcctgtttcaaaaaaagaaaaagacaagaaagaagtatggactctaccttcttgcccttgtggagattgggaactgcctgcccttggcctctttcctgtccatcttgtattatgaaaggctgtttctggcacacccgggctcctctgtgtggtttctgggaagtgactgagggtcaggggaatggagcccctctgcagccggccgctggtaccttccctattgaacccttctttaggcttgctcactctttttgatgggtgtctttccaaagctggctggggacctccctgattgagagacatggggccagttctgttgctgtggctacacgggaataataaagcagaacacctgaggaaagctgatgtttacta

SEQ ID NO: 237404 - DNA, 420 bp, Homo Sapiens
tgtgttctgtccaggaacttgtatcctatcctgcctgcatttcctctgactgcaggcactgccgtggcaccatagagaggatacagaaggcctctctcattatttgtgtgtttaagtgggagggcacttccagtgacagatctttaagaaagagagggctcactcaaccacagcaaaggccagacctctctttgggcaacatgaaattcttgactacacgataatgttgattttgaaaaattatgattgaatttactagaaatggcctgtgttttaactgtgtttttataaatgaggttcaggccggttgcagtggctcatgcctttaatcccagtgctttgcaaggcctaggcaggaggattgcttgaggccaggagttcaagaccagcttgggtaacatggtgagacccctatttcta

SEQ ID NO: 237405 - DNA, 497 bp, Homo Sapiens
tggagaaccagctggccgagatccgctgcgacctggagcgacagaaccaggagtaccaggtgctcctggacgtgaaggcccggctggagggtgagatcaacacgtactggggcctgctggacagcgaggacagcaggctttcctgtagcccatgttcgaccacatgcacctcgagcaacacttgtgagccatgctcagcctatgtcatctgcactgttgaaaactgctgcttgtgaatgttaaggacagcaggtagaggaatcaaagccagcagcatcctagaaaggagatggggcttcaaccagggacatccaaaccggaagcacaaatccaggaggctctcatatcctggaattgccctccaggtatcctcagtctttctgctttactatttcctctccttccggcttatttgtggtatactggaagcccataaagcattcttgctcatctccaaataaaacgtgttttattcctttagcgtggtaaaaaaaaaa

SEQ ID NO: 237406 - DNA, 454 bp, Homo Sapiens
actgctctgtaggtcattggccactgtctccactcacaacccctgctccagtcctggagggagtgggttaaacacaaatagaacattccatttgaagcagtgattctttttttttttttttttttttaatcaaatgctttggacttttgaagtccacttgttctgtacttgtaaaagggaaagaaggccgggcgcagtggctcacgcctgtaatcccagcactttagatcacttgaggtcaggagtttgagaccagcccggccaacatggtgaaaccccatctctactaaaaatacaaaaattagctgtgcatagtggttggcacctgtagtcccagctactcaggaggctgaggcaagctaactgcttgaacccagaaggcagaggttgcagtgagctgagatcacgccactgcactccagcctgggtcacagagtgagtgagactctgcgtt

SEQ ID NO: 237407 - DNA, 629 bp, Homo Sapiens
  misc_feature (77)..(77): n is a, c, g, or t
  misc_feature (163)..(163): n is a, c, g, or t
ctgtagtgtagcacctaatgatattccactggtttctagtactaacctaattaatgaaataaatggagttagcgaanaattatcagccacggagagcattgtggaaatagtaaaacaggaagtattgccattgactcttgaattggagattctcgaaaatccnccagaagaaatgaaactggagtgtatcccagctcccatcacccttccacagttcttcccttcctccaactcctccaactcctccagcttctcctcctcacactccagtcattgttcctgctgctgccactactgttagttctccgagtgctgccatcacagtccagagagtcctagaggaggacgagagcataagaacttgccttagtgaagatgcaaaagagattcagaacaaaatagaggtagaagcagatgggcaaacagaagagattttggattctcaaaacttaaattcaagaaggagccctgtcccagaaacatcgaatgaatgctgaaattcctagtctggtttcttcagtggtgtgtttgtgttttagtacaacctgcaaaagagttactccattgtctaaaaatgcaaatgagaatttccaaatatacaaaatgcctccaaggtatatgtcacgaaa

SEQ ID NO: 237408 - DNA, 482 bp, Homo Sapiens
cagatggatagaggaaaagacagaatcagatactggatgagttagtactgctgcctgtgcttcagagctgtcttattaccacaaggccggcaagcatcaatgtccccacatccccctctgcctccccctgaaatgtaccgatttatatgaaaattaagattacaaattaaagcctggctatcctggagttttccagttcatcagccatccaataaaaatgatgtcaagcctgtatgcataattcccggaagattactttcgtccttacagctaagccctgtccctgatatgaaagatctctatccacttttattgaaataaagaactaacatcataatcccaatattgaggtataatcttcattatctcctgaccctcttgaggttcccccaatctatattacttcagatttggtttatgtgtaatccttatgtatttacttttattgagataggattaaaaactaaaaaaaaagcttcaaa

SEQ ID NO: 237409 - DNA, 528 bp, Homo Sapiens
cttctgtgttctgatattcaatgcaagtcattagagtaaggtgagactcttcctgtggattcagattgaaatcagggacggtgtagggaggccatggtcaacttttgagctacccttgagggaagaaattaattgatcaaatattaactgcccaagtatattcacaggatggccatccagtaatgagaatgaacagtctccaactaaaggcaacaatatagatgaatctcggaaacatgatattgaccagacagaaaagattccacttacataaacttcaaaagaagataaaactgatctatgacattaatagtcagaatattcattatccttgagggaactaaactgggaagccacatgatagggcatctggaagctagtaatgtcctctttcttgatctgttacattggtgtgtttatttcattagatttattgagctatacatttaccaccgtgtacttgtctctgtatatgttttgcattgaaataaattttaccaataaaatgataaagcaaaataaagcaaa

SEQ ID NO: 237410 - DNA, 483 bp, Homo Sapiens
aagtcaaagtaatatcaaatcctaaattcagttgatctgggccgagcatggtggctcatgcctgtaatcccaccactttgggtggccgaggggggcagattacttgggctcaggagtcggagaccagcctgggcaacatggcgagatcctgtctctgcaaaatatacaaaaattagctgggtgtggtgtcagatgcctgtagtcccagctacttgtgaggctgaggtgggaggatcgtttgagcctgcaaggtggaggttgcagtgagctcagatggtgccactgcactccagcctgggtgacagagtcagaccctatctcaaaaaaataaaaaataaataaaaaatcagttgaactatatggaaacttctgtacctgtgtcaacggtgcatcttatctaatactatatgatactgtaatctaatattatctctgataattcaaaaatgctaataaactctgctcaaatgtgaaaaaaaaaaa

SEQ ID NO: 237411 - DNA, 427 bp, Homo Sapiens
ttgccatggattctggaaggacatagttcttctaaaatttcctgttaattggcatgtacgtctcatttaaagcaaattaagtaggacaagcaagtcagtaaaatagaagtattaaaaagaatcatcctttaaatcacagatcttattttgagattaaaaaaaatacttctagctttagccaggtgtgcatgttgctgccattttgcatttttgaatcatcttgtgtaattgtcaccatgaaagtgttactcagaattgtcatagattttctcttctttgtgcaaaaacatggaaaattgtcactgactttgttttgaggtttcccccattttgctgccttttgggacacttcgttaaatactggtcttggctgcattctttttttttttcctgtggggttcaaaagaataaacattttcttacagat

SEQ ID NO: 237412 - DNA, 399 bp, Homo Sapiens
cgtgtctcctcgtcaggggagacttttaggaggccgcagccttccatcaccggatcagtttttcctcttaggaaagctgcaggaacctcgtgggctccagggacccaggcccacatccatccagcgttcccgctggctgtgggacagacagggaggggcctgtacagaaacaccacactgtttattaaatcacaatgatttttattaaccatgtctaactacgtatctgtgccacagcttgcagtgaggcaggccactcgtggcagatacaaggggctcctgagaggcagtgggtaggatggtcacactctgcccattgccctcctggaggccccatttcctcatcataaaatgagggacttttaaataaagtgctatgccgggggataattaaaaaaa

SEQ ID NO: 237413 - DNA, 364 bp, Homo Sapiens
aggacaaaattttggtataaaagtgaccccctttggttgttggaaatgaacacaaattttagacttatgtgggattaaaggtaaaaatcttaccagtcatactttagataatttttagaagtcaaaggtggggtggatatttactttttagtttaaacccagcattttaaaaatattttaacaagcaagcgtaactttttttttttaagatagaaaaagcaggaaggatcacttaagcccaagagttccaggctgcagtgccacatcgtgcctgtcagtagccacttcagcctggtcaacatagcaagaccctcatgtttaaaattaaaaataaaatttaaaaaaaaaaaaaaaaaaaaaaaaa

SEQ ID NO: 237414 - DNA, 373 bp, Homo Sapiens
caacctgggcaacagaacaagaacccatctcaaacaaacaaacaaacaaaaaaaaaaaaactcttgtctccttaggatatgttacctgctccactgcagactagagaaataaatgtgtattgaaccttttactgcaaacttgaaaatgctagaaaaccaagcatgaagaataaatacatggcgggaaacacacaggcatgtgcatatgcatatacattgtaagttagtaagttagaaagctagctttgttgtatctgaacacatgaatcttttttggtcagtgtaggaagcacagccagatcctataggaatgaatacctcaaatctgttgtctgagattctagagattaaaccactgtgccatttttaaaaa

SEQ ID NO: 237415 - DNA, 443 bp, Homo Sapiens
tggaatcgaagcaacggaaggttaaaactgtttttatcaaggccaggcgggcgcggtggctcacgcctgtaatgccaacactttgggcggccaagactggtggatcatctgaggttagaaattcgagaccagttgggccaacaaggtgaaacccccgtctctactaaaaatacattttatcaacagaatttcgaaacttttatataatagaataattacaatgaactttcataaagaacttgagcatacctggattttggtatccgtaggggtccaggaattatcccccttggataataacggagggctgtactcatcatccaacttcaacaacagtttgctgcctttctcatttcatgtatccctttctgcatttttttttgaagtgctgtatattaaagcaaatcctggacatcatgtcatttcacctataaaaaaaaaaa

SEQ ID NO: 237416 - DNA, 363 bp, Homo Sapiens
tcccctgtggtcgggagttcaagatcagcctgaccaacacgaataaaccccttctctactaaaaatacaaaattaggccgggcacagtggctcaggcctgtaatcccagcactttggtaggcagaggcgggaggatcacctgaggtcaggagttcgagaccagcctgaccacatggagaaatcccgtctgtactaaaaatacaaaaaaactagccgggcttgttggcgcatgcctgtaatgccagctacttgggaggctgaggcaggagaatcgcttcaacctgcaaggcagaggttgcagtgagctgatagcatgccattgcactccagcctaggcaacaagagtgaaatttcgtctcaaaa

SEQ ID NO: 237417 - DNA, 466 bp, Homo Sapiens
agaggattttgttagagcagtgaaactactctgcctgatgctgtgatggtggagacatcattacacatttatccaaacccatggaatgtacagcccaagagtgaaccctgctgtacgctatgaactttgggtgatagtgatgtgtcactgtgggttcagggattgtaataaatctaccactgtagtgtgggggtgttgatagtggggaggctgggggcagggggaggagcaaagagacacatgagaactctaccttctgctcaattttgctgtgaacctaaaactactctaaaaaatgaagtctgactctttttcagcatgcattggtgcccaagtaaaaaccaaagaccaatgtgctttgtatttggtattaggaggaacttaagaattttatgtatttgatgttttataatccattgtagtcattagtgctttttcaatttaaaatgctatcatatattcggtg

SEQ ID NO: 237418 - DNA, 400 bp, Homo Sapiens
ttctagaagattcttaggaagagtcagtgatttcaaaagaaatctagacttacatgcagggatatgcagggtataaactttattgatggctcaggaaacaggtttgaaagagcttccggtacacaaaggggattcttctactgcagccgcttttgaaaagctaaggcagagtcagagtgaggaacacagaagcatccaaccgcttctgtcacgtaagcatgctgaggctgcggaaaaagagtgcgtctgactgtagtccgggagaaagggatgggctggcagaggaggaggagaaaatgcagagggtacaagtcttgtaaatgctctaattttaaaactgacggtaagttatgccatttccctctaacaaaaatgaggtaggattcgctattttcaaggt

SEQ ID NO: 237419 - DNA, 488 bp, Homo Sapiens
ggttctttctatattgttcctccccattctcaacctgtagctttttttttttttcttttaatgagatagggtctcactccagcatgaaagagcgagactcaatctcaaaaaaaaaaaagtttctggcacctgaacaggaactggtttccatcatcaactcagaaagcactaaaatctaggtggtgattcagggaggagcaggggaagacagcctcctatggtggcatgaataagatgcttccagaactagtagggaaataactaacctcttcaggctttatcaggcctggaggggaaccttgctcatgttagcaagaaaggtatcctagagaagccactcaaaaggctccctaatccagcctgtctccacatacatactgaaaattcttccctactctgaggcagggtgtagtggtttaggggtttctccagactggaatcctacctatctgtaccgacaattgagcaaacaacagttgagagagtcc

SEQ ID NO: 237420 - DNA, 710 bp, Homo Sapiens
aagcggcgctctttcaacggggtgcacacgggtttcgagtggaccaaggtcaaccagacgcatttcgattttaccaacctccgcccaagttcgtccatggatacaagttcacttctttaccccagacttatcgacaagcgctccacgccagagtacttcttgaaggcctgcgccgacaacaaggatttcgccatcgtgcgcttccacgcggggccgccctacgaggacatcgctttcaagatcgtcacccgcgagtgggaatactcgcaccgccacggcttccgctgccagtttgccaacggcatcttccagctgtggtttcacttcaagcgctaccgctatcggcggtgacggccctggggaacggcaggccaggagggccgagggccacacgggtgccacagcccaggtcggagtggcccagccggcaggcttgttcttcagcatccgacgggaacatctccaacagaagcaaaacggaaagtgcctcccggacccccagagggccacccaacctcaccagtcaccagccccagaccacccacagcccctcccagacaccccgcctcatctggaaatagttccgtttgtttctctaaaaagacttgtaggtgggaaaaaaaatcttttgttctcatggaattggcctattggcaagatcgcatgtttttttaataaacgttgtattttagaataaaaaaaaaaaaaaa

SEQ ID NO: 237421 - DNA, 331 bp, Homo Sapiens
aagctttgctccttcagttctgcttgctcccaaagcccctgacccgctcggacttactgcctgaccttggaatcgtccctatatcagggcctcagtgacctccttctgcaaagtggcagggaccggcagagctctacaggcctgcagcccctaagtgcaaacacagcatgggtccagaagacgtggtctagaccagggctgctctttccacttgccctgtgttctttccccaggggcatgactgtcgccacacgcctctgcatatatgtctctttggagttggaatttcattatatgttaagaaaataaaggaaaatgacttgtaaggtca

SEQ ID NO: 237422 - DNA, 504 bp, Homo Sapiens
  misc_feature (38)..(38): n is a, c, g, or t
  misc_feature (43)..(43): n is a, c, g, or t
  misc_feature (45)..(45): n is a, c, g, or t
  misc_feature (73)..(73): n is a, c, g, or t
  misc_feature (96)..(96): n is a, c, g, or t
gatgagaagatttgtaaaagtgaagatttaccactganactgncnatatatcagaggcagatctaagaaaganaatggtagaagaagaacagaaanaccatttatctggtgaaatatgtgaaatgcagaccgaagaattagctggaaattctgagacactaaaagaacctgaaacggtgggagcccagagtatatgagatgtcttcagaggctcatctaactctgtccttacatactcaatgcatatatgaaaacaatactaaataaacatctgatctgtataaaaatgtaaattagtttgacactgcttttttgataggtgtggtcatttctccccatggtagtttaaaacatcagaaactgaattctggacagatttaagccttgacacactgtgtttttttttttttcccccttcttttttgggtcttcatttttttccccattgtgatgtttggtaacgaatttaaaatgtagttttaaataaagtttggacttatcaaa

SEQ ID NO: 237423 - DNA, 866 bp, Homo Sapiens
tagtaaaaactcgcaattcacgaaatccttataaagatgatgagttaaggtacgacgacttctctgatcgagtgatgggtagtcagtgcacacataacgtgtctcagttgtcactgtgccgtgcagcatggataagaaaaatgagatcaaacaactcatcgaacgaaaggtaaatgatttcatttcaaaactgcctgtgtaaagcattacagaatcctggaccactgaataccaccattctctgttatcctgagtatgtcaattaaacagtaatttttaattaagagcggaaaaattttataatacaaagaaacatccatattgcaatttctgtttacaattgcacacagaagtacagtgtacgtaagaaatacatgtctgcatataacaaggtatgtacattggcaagtgatgtctccaatgttgaggtggtcgagcctcctagccttgattggcagttgaaaaaaatatatttatttcaatttgtggtaaaagtttattgagagccaagtttgcctgcaagtgaagaaaatgcagcaacgaagaacagggaacacggggcacataataatattctaagactttgtgccattaagttaaaaatatctgttcataagaaaattgggttccttttccacctcccacccccaaattggaattttcaggctttaaaatttaagtaattccacctggtctgaggatatgatctcttgccattttttcttcaactgttacttgtgagggtttagtttggagatgatgacttaataggtttctctttggagtgaagttttcccattgtaggcactaggaagaaccaaggcaaaagctgcagttagcgtctcatgtgtcccatttgcctcgtg

SEQ ID NO: 237424 - DNA, 449 bp, Homo Sapiens
cagaggagacagataaatgaagtgatgagtactgtgaagaaaaataatggaaaaaaagggaatgcaggagtgatgttgtatgctattttacataggaatggtaagggaaggccaccctatgtaaagtagcatctccccctcctcccactgctacactactctgtctttgcttttgttcaaagcatttttgttgtgttcttaacttaaaaatgggagaagcaaaataggaaaccttgaaggaatcctagataaacttatttttttttagaattgcccctaatatcttctaaaatttattacagaatgtaaaatgcttattacccatcaaatgtatctgttatgttttgatttatttttaaacaaccatataaagaactttggaagagatcagctggaaatatatctcatttattttatgaataaatatgaaaattctctttagtatgaaa

SEQ ID NO: 237425 - DNA, 440 bp, Homo Sapiens
tcagccagatgaagaggtacatgggaggaggactggaagggtcatgagcacaggagcctctgcttccacagagtcagggtgtgccgccctcttagtatcaggaagctcccctgagcatggtgtccagggtttttaatgaggtttcattatgtaggcatgattgattaaataattggccatatgactgaacttaatctccagttcttctctcctcctaggaagttaggggaatggggtgggtttgaaatttccaatctctaatcacatgtttgggctttttgatgtgacagccccttccttggaactatgtaaggatcccttagatagttccataataagccttcctaatagagtccactaggaaacaataaataaataagtttaatggctgaaacttcattttcccacttcacaaatattaggatggctactatttgaaa

SEQ ID NO: 237426 - DNA, 377 bp, Homo Sapiens
tatttagcttatttttaattttattagaatttggcacaaatatagccctgtttgcttttaaaaagatgggtgttagattgcctggattttccccttatccactacctatgagcaaattacttccctcagctttagtttcattttgtagaaaatgggattatttttgtacctcatacgtataatagtagcaacaaaaactttgcctagttagtacttaatacttttttcttgccgagattaaataagctgatgtagcttccatgcttaacactatgcccttcattggctttggcttcacatacgctttggttctgatcctagttctactgtgagtttacaggttaatttctctgagccttctttacttaatcagcaaa

SEQ ID NO: 237427 - DNA, 498 bp, Homo Sapiens
atgtttattctcaagattgaaggactcagtgcagctctcgtggtgacagattggctcttcttgtgtgttttttctcttgctgtttagacgtaaggaccccttttctcccacctcaacatggctacatgtttgttatttcatgataatttttaaaaaaatcataagtgaaccttcacactgttagaattatttaattgtaagtgaatatcttattagaattatttttacctgcaagactactcttttatgtaacaactgtctaatgacaaaagtggtaattatatactttgctacctacaaatgataggaaaacagagtaagctatttctggggccctctctgccactcattctgtgaggcctccatcacatcacctgacccctcacatccacagctttcctaatctttaacatgaacaggttgaagttgaggatccctaatttcccttccagatccactgttctgtgattctaggtatgtgtaacccagctatttaaa

SEQ ID NO: 237428 - DNA, 432 bp, Homo Sapiens
gaaaaaagaacgcacatctaggaagcgctggtacagacagccgtagaacccgaagggcaagtaccatggacgtgggagagggtcacagattagaagagcaccaagcagtgagttctatttttaactggccacttcctgtgatttttctcaagctgccaacacaggtacagaatgcagctttcttagcttggggacgtttaccttcctgtgatggtgttaagatagatgggttggaggaaccaaagttttatggccttgaagtgaatagaggatcataatcaggtgctgctcaccagcaacaacttcttgatggagacttaactggcagtttgtttaatttgagaaacatggggtaagttatgattcagaccagctgcaaataacagagaacccttatataacagtggcttagtcacgatttcttgttcagtt

SEQ ID NO: 237429 - DNA, 410 bp, Homo Sapiens
tgaatgaaggcttaaatttcatggtcttgggtgggagaactttttcatattctttccccatatggaataacaatctgccctgaaaacagggagtattttggcatgatctctttttgcttatttgccttccattttccataaagcaacttttgccaagcaccatacttaagactcaacttttttgcaaaaatatcagacaaagcactgtctttaagaacacagagaacacactagatcccttcttctgaaaatcactgttctatgttgtttgtggatatttttttagcattcactgcatgcctggaatgaataggctgtgtttctccccaaaagagcacaaattaatatacaaggtcaggttaaatagttaagtctgctttcctatcccttatacagaagctatccattca

SEQ ID NO: 237430 - DNA, 448 bp, Homo Sapiens
agtagaatggtagttgccaaggactgggggaggaggaaatgaggagttgtttaatgggtatagtgtttcagttttgcaagataaaaagtcctgtggattggttgcacagttaagttatgtgaatgctgtatgccaactcaactgtacactctaaaatggttaagatggtaaatcttatctttattttaccacagtttttttttaaagcatggtaaacaccatttcccaggatgtaaatcggtactaaaaaaaaagtgctccaaagtaagatatatttgggaaacacagggataactaaggttagataggtgttctttattgcaggaattctaagagcatttaacaaattaatttacactgggaattttcagtgtggagggtctggctcatagcatttcacaaacattatacttcagagtcccaaagcctttaaataaaatgttaatgg

SEQ ID NO: 237431 - DNA, 456 bp, Homo Sapiens
cccataattgtatatcagagaaatatagtgatatcaatttccttgaaaccaatttctaaataattttcttctctgtaatctaagtgtaaaaaggtttagttttttaataggtttaggtgtttataagcaatagttctctattttctagttgatataagtagaagaattgacaagtgagatggaaatgttaatttataaagggaaagaaaagctaggtgaggttgagttataattaaactgttcaggaaacatcgtaaaggctttaggctccctttttcatttctataccaattaatctcatgggttctagagtggttagttctacgggaattgtttttgtttttgtttttaaagatgctgaaaactactctcaatcaaattagtaccatcatttaagctttgaatacttggcagtaattgcctgggctcgtcaataaatgttagcaaattcttaaa

SEQ ID NO: 237432 - DNA, 442 bp, Homo Sapiens
ttctttggtgtagtggattacctaccattactctgagattttatatctctaatccagtattttttttctttttatgctaaacatgggagatcctggttttgtgtgaatgcattattttggatgtgagaaataaatgccaattatatgtactttcccttttctgcacaaattctgggaaaatgtaaaagccttcattttttaacatggttttagggaacaactgtaagtccattcagagcagtttaatttagatgatcacttttaacactgcagaagacctaaggagtcataagattccatctcatgtagaatactgtatattaattattttttaccagatattttacaaatacctcacctcatcctgtatgtaatcaataatgtattattttagggtagaacgacacagaatatcaatataaaaatatattcaagcccttga

SEQ ID NO: 237433 - DNA, 440 bp, Homo Sapiens
cctttgttactgaccgatgcttaatttggtttctgggttttgttagttttttcccctgcccttacctcatttaccttaacgacagctcccccctctagagctcagctagggcaggctgccactgcggattggggggccaagaggcccagtgcaagaagaaagtgggttgaaagcaaagttctgtttaaagaattttctgctggaaactagcccagagggagtaaagaggagctttaatgaggagcagctgcagcgccgacgcaacccacatgagacttttttttccccttcgttccacattctgtatagtttttttaaaaatcatgactttgaaatagctgttttgtaaagcatgcctctctttttcttcttgtatgtggtgggattttgctttgttgttgttgttgttgtttcttgaatggccaaatcctcgttttaaa

SEQ ID NO: 237434 - DNA, 441 bp, Homo Sapiens
ttaatcactcgacctgaatgcatggcaaggcatttttgtcatcaaaaggatgaggtctgtggtggcttaaaatgtagctgttattatagaagagtgagttacgtcttttctttagaacagaaagagaccaaagctatctcatagaactaaaacccctcaatgacaagtgaggaagtagatgtgagaggtcacgcgacctcctgaggtcccagccttcctaggcggtggagctgtagagagggctcttcactgctgcctggcccatctggggtggcctgcgctcggggacacaggcggatgaggaggatgttgtggagcccactgaaaatgagagtcttaatggtcactaggaaaattccggttgcagactttttacatcacacttgatattaggacagcctacctacttgtttgagtgtcacagcctgatatgtaaaatag

SEQ ID NO: 237435 - DNA, 702 bp, Homo Sapiens
  misc_feature (22)..(22): n is a, c, g, or t
  misc_feature (76)..(76): n is a, c, g, or t
agtgcagtggcacgatatcgcntcactgcaagctccacctcctgggctcatgccattctcatgcctcagcttcccngagaagctgggattacaggcacccgctgccatgcccggctaattttttttgtatttttagtagaaacgaggtcatgccatgttgtccaggctgatcttgaactcctgggctcaagtgatctgccttcctcggcctcctgaagtgctgggattacaagcatgagacaccatgcctgacccctgcttttattttcaatataaaattttatgtttacaagcgtgagccaccacacccagccttacataaacttttaagagcaaacctgtagagtgtaattagatgcgtagttacttataaagtggtatatatttttcaaatgagcccttttctctaaatatatatatatgtgtgtatgtatatgttattgacagtaaactttcaattcattaagatttgcttgacatataaagagtactattaaactcaaacatgtggaagtggatcactaggattgaatacagttttttaaagtattgtcttttcatctctttttgtttttctcagaacacacaaacaagaaacccaaatcataccaacactgaaaagaagagacaataagaagcattctttctttcaacatcacagacattggcaactctaggatgtctatacagagggataaaaag

SEQ ID NO: 237436 - DNA, 757 bp, Homo Sapiens
  misc_feature (99)..(99): n is a, c, g, or t
tacctgtgaaaatgaatagtggaggacaggtctacaagtatctacatatctaaagaatatggaaagtcttcagtttgctttctgggtttcagacttgtntgggagctcacccctttctcctgtttctcacttttggaataggaatctctatcctgtgcctgtctcatattttggaaatacatgactagtttggttttcaccggttcggagctgaagaagaattttgcctcagcatgaattgagtctcatccatatctgagtgatgtgatattgagatgacactttggagtttgagtttaaacattaggcttcatgctggaattaactgagacttttgaggcctttgggatgagatgaatatattttacatgtgatgacatggattttgggggccagaggtgtaatgttttggctgagtgtatgccacctcagattcatatgttgaaaccttacccccgtgccccccctctcccccacaatgtgatggtatttggaggccctgtctctggtggtttttaggattggaggacatcatgaagatggaggccttgtaattgggattagtttcctgataggaatccctagagagctagctttgcccttcaccatgagagggtgcagtgagaagatagctatctttgaaccgggaagcaggcccttaccagacatggactatgccagtgccttgatattggacttcccagcctcccaaaccatgagaaataaatgtttgttgattaaaaaaaaaaaaaaaaaa

SEQ ID NO: 237437 - DNA, 438 bp, Homo Sapiens
agatttcaaggctgagatcacaaaactctagcaaatactgcacagacactgacaaatgacagcaggtgctgcctgtcaccctggagcaccaggcaggtttccaaagcacccttgctgtgccagcctctgattgctggttatagggaggtctggggtagtcccaaaagctgggatgtctaaggcagctggggtcagtcaggaggctcagggcagtggcaggaaaatattttcctccctggtagagccacagcggggtatccaggctgaatattattggcgagaaggaccatggcaccgcaccaagacctgcaggacaaactttgttggagctgaatccagaaaaacaatcttcttctaaaccactctcctgcccctcatttaattattgtgcttttgggtgcacttggactactctgaaacattcagaactctgtcaaa

SEQ ID NO: 237438 - DNA, 497 bp, Homo Sapiens
ctccgccctgctcagccagggctttgagcctcttcggttttccggccagacccggaaaaacgaaaacacagcttggggagcccccactagccggcgcctgtgccagctcacctctggccatggcgcagctgccggtgcacacggcggccaaggccagctccacattcttccctccccctcccacttcaccgtagccccgaaccctgcgcgcagagaaagggtctcagctccacagacgactgggtccctcctcaccaaaaatggtgagacaagatttcatctgtcggccgaggagccacaagcaggtttgtctgagagggatggtgctgggggaaggctttggattgcatctcaaattaagctttgctccttaaatgtggcgctctcgccaagaaaaagcttggggcctgaattcttgagatttatggtgcaccttattgatcaaatttatctggactttttttagttccccgatgtgtccctatcattaaaaaaaa

SEQ ID NO: 237439 - DNA, 396 bp, Homo Sapiens
caatatattgtatatttcaatgtagctagaagagaggacaggaaatgttaccaacccatagaaatgatgaatactcaagaggatggataccccaaatactctgacattattatacattttatacgtgtaacaaatacatgtacccataaatatgtaaaatatcatgtatcagtaaaagaaaaaggctggatagagagaggtaaaaataggagaaatgagagcagtcagtgcacataagagtaatatgcttgttatactgtgtggctacactggttaaggaaattcctgctgcatataacccaaatttgccattagaggttaagaaaactttccacttaacaatttaaaaattatacaactaaaacatccattatttaaaaatcaacataaagaagc

SEQ ID NO: 237440 - DNA, 357 bp, Homo Sapiens
cactattataaacagcattaccatgaatatccttgaaactaaatctttgaacatgttcttaattatttctttaagataaattactagaaatgagattgcctggccaaagttttattacagatttccctccagacatatgacagattaaatcatcaatcagatttttttatttgagtactagatttagatacagttagccaaaataccccttttttccagactgggcaacatggcgaaatcccacatctacaaaaaatacaaaaaatacgccaggcatgttggcattgagactgcagtggccatagtcacatcactgcactctagcctgggtggcagagggagaccccatctcgaaaa

SEQ ID NO: 237441 - DNA, 594 bp, Homo Sapiens; identical to SEQ ID NO: 96221
  misc_feature (92)..(93): n is a, c, g, or t

SEQ ID NO: 237442 - DNA, 400 bp, Homo Sapiens
ctggaagggcaatttttctaaaatgtaaatctcatgagatttactcttctgcttcagatctttccatggccctccattacccccaggataaagtctgaaatgatggttatggcccagaaacactgcagacctgaacttggcctacttcggatgccttgtttcccgtggctcttcctagggcctgtagctacactgatccactttgaagttctcgaataatctgcaacctctggcctttgtacctgcttctgtcacgtgtagtcttcctagttctcctccctcccacccctgacctaggtaacttttgatcattcttccaaatatattttaaaattcacttttaggggtccttcctcttgtctgacagacctgtgtgaactaccttagcgcctgcagccag

SEQ ID NO: 237443 - DNA, 420 bp, Homo Sapiens
  misc_feature (12)..(12): n is a, c, g, or t
  misc_feature (78)..(78): n is a, c, g, or t
agttgaaagagntatgtaaattaaaattctttgttttagttgacatttttaaaatcttaaaatattgtttaaacatanatttgatatccacattgagtactaattttgctagttaatattgctggcagtaagttatttaatgtttttttaaattactttttgattgtccagaatttattttttataaaaaattaatttttgaataggtaataaattcacatggttcaaaaataaaatgtaaaagagtatacagtaaaaagtatcttatttctgtactctagctactcataggtaatatgtttattataagtttaaaaatcctcagtggagcaggtcaaaactcctgtgctgatcagtagtgggattgtgcctgtgaatagccactgcacttcagcttggacaacagagtgagaccattcc

SEQ ID NO: 237444 - DNA, 448 bp, Homo Sapiens
agtgctgaagtacatttttccttccagtactttgactcagataccacttcatattagacaaatgttttatattctctactgagtattttccattttcatagggctaatgtcattttcagttgtaataatcgattggcatagtgtcaatggaaattttttaagattgagtttgtagtgagcagacttttggaaggaacagtgctgacatccaatggatgctcaaagtaatacagaggaggaatctcctttcaaaaaaaaaatgtacagacagtggaatggagaatgaattattccctaaaaaaaaaaagccactgtgggctggatgtggtagctcacccccggaatcccagcgcttttggatgccaaagtgggaggatcccttgagcccagaacttccagaccagcctgggcaacatagggagaccaccctctacataaaaaaaaaaaa

SEQ ID NO: 237445 - DNA, 372 bp, Homo Sapiens
agattttcttatcttgggaacctgctgtattttatcttagttttatattctatgagcttctctcttggtgagctccaggttgagctgctctgctggcttaggcttcatctggtagaattaaaagttacattgggtcacacgtcccaggtgttgcatcacaggccacagaattacctatataaaactgagtgcaaatgtagacactcttccactaaattgtttttagcaattaaaagtgtacctttggttttgcagattttacctcccaccctgtgacccctcagtgtggtttatgacattagcatttccaagagtgtgttcattataaagaattgtttgcatcagaaagtagagagggaagctgaggtgcag

SEQ ID NO: 237446 - DNA, 553 bp, Homo Sapiens
  misc_feature (120)..(120): n is a, c, g, or t
ggcacgagtgagtaggagctgaaggctgcttagacagtgatttggaagcacagatttcatggctccctttgtgagaagtgtgtgctccagggtccggcagagcaggtggaatctgcagtntgaagagtcacattcacttttataacgtagtcttatatttgtttgtggtttgttttcatgataaaattgtgatttgttttatgataaaagaaactatagatatttaagcatgacaagatgttattagctggtaagcatatacaaaaagttgctttttgccaggtgtggtgactcacgcctataaatcccaggaccttgggaggctcaggctggaggattgcttgtggctagaatttcgagaccagcctgggcagcagagtgagacctctagaaagaagtaaaagtagctgagcatgatagtatgtgtctgtggtctcagctattcaggaagctaaggtcagaggattgcctgcgcccaggaatttgaggctgcagtgagccatggtcgccccactgcactccagtctgggcgacagccagatcacgtctcttt

SEQ ID NO: 237447 - DNA, 543 bp, Homo Sapiens
  misc_feature (27)..(28): n is a, c, g, or t
  misc_feature (84)..(84): n is a, c, g, or t
tctgtctccatgtgggcatgacaagcnntgggtctcttaactttttctccactataatgccatggtctttatgcagcaggcagnaagaattcaggtggttataattccgtatgtgctttttgaacatttttctactgggctattgctctcttcataatgatttttttaacttctctctataaggaactgatttcatctgaaattgaagagacaatcagagaaaaactatagaccactcatgatggttgttatatgtgcttggctgggccatgggtcccagtgtttggtgaaacacagcagcagatgtccctcacacacatgccctcttggttctgtttctttgaagaaccccaggaaaacacacaaaggaaaaacaactcgatagacagaagattcttcaatgacaacaatggaagccatcttcaccattcaactaaacttgaatgggatattatcaaacttaaaaaaaaattatcaactgatcgtgtaatcagtttcatcttttaagacaggaaatgaaataaagtatttacagatgaatgt

SEQ ID NO: 237448 - DNA, 448 bp, Homo Sapiens
cagaaattcctggaaaacccatgtggttttctttatgagcaatttaaggacacgttcttccaaagagagagatggacaatataaaacataatccacttttaaaaataaattctactctgtgaaaaagttccccctgagtggtgctcagtaaaccctttggtatcagtagtttgtcagctctagcacaattggagcttgtgtgggaagccatttcactcagtggtggttgctctgccaccaccaagaagccagagaacatgggctgtaactgaggagaaggataaccatgagagaagtaataagcagaccttagaaaatctttgaaatggtcctaggtaagatctcttatcctggaatcagattccccttcctccttatcattttgttggaggaacatttgagaaagaaatggattttcagttgactaggaaaatgtaaattgataaaa

SEQ ID NO: 237449 - DNA, 434 bp, Homo Sapiens
  misc_feature (31)..(31): n is a, c, g, or t
atcatttccattaatgaagatacctgggtgngggcagattgtataatttatcgaagataagctgtgtttctctactgggctggcaaaaatattttttctggaccttaaaggtagaaaggttctggtgaagaagctatttaaaagtatccttagtattattttggggaaggagatataactttgccctatttattgaggtttttggaggacttttacaggcagtagagatgtttccatagctggatttctgagccattacgttgtggttgggaacctttcttttgtagtatactgtagaattttgggatgtgacactgtaaatgggatagatgaggaagatgaccagttcctgagaactggaaggaatcccagcttgacttgagaacttctttaaaacaaaatgaaacaaaacaaaacaaaaaaactgctaaaaa

SEQ ID NO: 237450 - DNA, 406 bp, Homo Sapiens
tggggtatcattttctgagccctaatactgtgacaggagaaaagtatttatccagcaagtaccatctgtcaaccttgttctctgcctgccagaagttgatttgctcagcataagggaaggagagaggcaggaccctagagatgtgggagggggcttctggattctgtaggggactttaggaactagggggcaggacagaaacgtctaattaggatgttttattaagtaattttgtgtgactccaaggaaaagctctcttctaactcctttcaaaattctcagaaaaattacctgttcactgatacttgaaatgtggatttggttttggggatttaagtctggtctcaagatggcaaccaggtcagcttactggggccagccacatgtaacagtttggttaaaaaaa

SEQ ID NO: 237451 - DNA, 295 bp, Homo Sapiens
ttaaaattgtttcttctaacagctattaagaatttgaaacttggttctcttcaaattttctattattttggaaaacattttagtctgcctggaatttctgtgtataatctgacgctttccaataaaaaagtaatgactggaacaagtatttgcagtgaagaaagatcagtaactttggcataaagatctcctacaaatcagtgaccataggacatgaacagaccactccaaataagagaatatacaaccatggaagcttggaaaaggctcaagtgtacctcggccgcgaccacgc

SEQ ID NO: 237452 - DNA, 832 bp, Homo Sapiens
tgacaagtgggccttggactttgtttccaagaagcccaggttgtaggttttcccaaaccccaggccttaaagaaaagctggagaggaattagcttacaccccagaaaagaaccttctcagtgagggaaaccagactaagaatagtatcacactacagccttctaccaacagatgatactttactttaaaatacaaaacaaaattagctcagccagttagttgttttattttgagttttgtttttttaaaaaaagaaaagctttgagaaaatgtgttaaatatcagtaaagggcaggaacacacatggctagctttacaatagcaatctaaacatacacaaaggcaaacattgagtaaaatgctagggaaagacggcactttgggggcctactgcagttttccttattgcacataaaggttgtggataacgccaagtctttaatttttcacagttatactttaatgtcattttatataacgtttatttatataacatactataatgttaattttataaaaccaccagtttgctactgttgaatggaaatagaagacaaaattctccccaattacactatgtaagctctctataaaaagttccctagaaggtcacatcattccatgttaaattcgtcctattctattttaaaagttgcttttcagctattaaatgaatctttatggccttctcatttaaccattttcatggacatagtacaactttccaagtaaaaagtaccagatgtattttatgtgaaaaacaaaaggacaacttaggaggagctggccctactatgaagtcacactggttctacgctgtcacctcgctaga

SEQ ID NO: 237453 - DNA, 801 bp, Homo Sapiens
ggattcttacaatcatttctcttttttctttttttttttttttttggttgctggttgtttttgagacaagtcttgttttgttgcctgggctgagtgcaagggctggatctcggctcactgcaacctccacctcccgggttcaagcgattcttctgcctcagcctcctgagtagctataggcgtgtgccactatgcccagctaatttttgtatttttagtagagacggggttttactatgttggttggccaggatggtctccatctcttgacctcatgatccacacgcctcggcctcccaaagtgctgggattaaaggtgtgggccaccgtgcccagccctttataatctttttctatacacagggtttgggggtccttttcctgaaacagctgggatcatatattcaacttggtgttctctttttgttcactaataatagcagaggcatttgtcacatcatatagtccccgtagacactgctgtgatggggtgagactggagtggacgtctcacctctgttgctatacatttgggtcatttccaggttttcactattactaaatagcactgaggacattttttgtgcagaaagtagtttcctaaactttaaattatgtccttaggacaagatttcagaagcagatgacagaatcagggagaaggaacattttaaagactcttgacgtctattgccaaatcactttttttcctcatactagaaatagctttaaacataaaacaatcattgctttaggaaggtttaaagagattttgaaactctactcttatcagccctcgtg

SEQ ID NO: 237454 - DNA, 794 bp, Homo Sapiens
  misc_feature (1)..(1): n is a, c, g, or t
ngccagaagggacccagactgactggccaagaatcccgccctgggtctcaatccaaatgcagaaacgcaaaccagggaaaaaattgtgtaaaaaaaaccaagtttttttctttcctaatagctagttccaatgatgttaattacccgccctgagctgaaataacagtagacaaagatagaagctagcctctggttttacaaagcctttgtacaagtcctctctgtcttttctgtccatgccagggaaatgtattgctggtgctagagggagaggaaacgtggacggccaagaacagggcggcacagtcctctgggctggaggcctgtgttccttcccataagcagggcctgtggggtgtatggggcagaacataggcctccacaccaaactgacagcagagaaaagccaggcaacctgttcaatcgccccagcagtgacctgggttctatgtgtgggagtgaactgctgcggccctggagcgactgctcccagccttggggctgatgtggtctagaaggacacctcgccacacagtggcagggccaggaccctggccaggcagagaggttgggtgggtggaggactatgctacgctgtacttgactcagggaagaagtcttgatggggactctttgtggactctgcccccaggggctggagcagccggaaggagcaggccttgggcagcaggctccacgttcctgctcatcgggagcccccaggaatcttgtctgttgtccctggccactcacagcaaaagaaccccgcttccccctgtgccgaatcggcgcgc

SEQ ID NO: 237455 - DNA, 670 bp, Homo Sapiens
tcctaaccccagtccattttcaaaaccaaataattgacattgagaaatcttattctgtcccttttttaatccaacatctaaatcggtatctcacaatgcagttagttatcatatttctttactctcttccagtccatgactgttcctcagtctttccttattgttcacggccttggcactttcaaaacgtactggccagttattttgtagagtgtctctcagtttgggcttgtctgatcttttctcctgattgcactgagattgcacatttctgacaacaccacagaagtgacaattgtgcccttctcagtgcatcatattggaaggtacatggtatcagtatgtcttattagtggtgatgttaacttgatcactgggttaaggtggtttctgtcaggcttattcactataatgactgtttttccctttgtaattagtatcttgtgaagggatcttaaaaccatgcaaaatcgtgtttcccatcatacttctgttcactaattcggcattcataggtgtttcttgtctgcaacaactattcctatggtgtttgcctaatggtgtttttttgtttgtgggtttgagatggagtctcactctgtcacccaggctagagggcagtggcacagtcccagatcactgcaacctccacctcccagttcaagcgacc

SEQ ID NO: 237456 - DNA, 677 bp, Homo Sapiens
  misc_feature (37)..(37): n is a, c, g, or t
  misc_feature (47)..(47): n is a, c, g, or t
  misc_feature (65)..(65): n is a, c, g, or t
  misc_feature (76)..(76): n is a, c, g, or t
gtcagcagacatttttgagcagctacagtgcaagcantgggccaggntgtggggcatataaagangataaaattcntgctccctaggagcttacagtctagtcaggtagacagacatgcagacaactaactagatttctttgggtagccagactctttgatgtcttttgaaactactttatggattcttcaaaaacagattttaaaaaatcttgtttgccatgcccccatccctcatcatgccttaagcatatgccatcttcccccaaatccccatcaggtatttagatgtgttcagttttattatttttgagatggagtttcactcgttgcctaggccagagtgcaatggcgtgatctcagctcactacaatgtcagcctcccgggttcaagtgattctcctgcctcagcctcccgagtagctgggattacaggtgtgtgccaccacgcccagctaattttgtatttttagtagagatggggtttctccatgttggccaggcctgagtttggtctcgaactcccgacctcaggtgatccacccaccttagcctctctaagtgctgggattacaggggtgagccaccgcacccggcccagtttcctttatgacgtaaaacagaactaaataagggaggggcttttctgtattggaggatgagtagaatgaggaagcc

SEQ ID NO: 237457 - DNA, 668 bp, Homo Sapiens
agagggaggacgagagaggtatctaattttatatctttttattgtggttttttatttttttgctttttttaaaaactaaaagaaaaatttattctagaaatttgggaatgttgttccatatagattgtttaataaaaatgatttgtttcttgattctgttacagaatgtttaattaaaatttgtttcttgattctgttatatacatggagaaaccatgtgaaaagggatgctaggatctgagtaaaagacaagggtttatagtaaaaactaatcttttatataacttttgggaccaccttgaaccctactgaaatgttatagttcttcaacaattctaaatttcataaagaatgtcaggccaggtgcagtggctcacgcctgtaatcccagcactttgggaggccgaggtgggtagatcacctgaggtcaggagctcgagatcagcctgaccaacatggtgaaaccctgtctctactaaaaatacaaaaaattagctgggcgtggtggcgcacacctgtaatcccagctactcaggaggctgaggcaggagaatcacctgaacctgggaggcagaggttgcagtgagctgagattgcaccattgcactccaggttgggcaacaagaacgaaactccatctcaaaaaaataaaacaaaataaatgcccc

SEQ ID NO: 237458 - DNA, 629 bp, Homo Sapiens
agtctgagggcgaggcggccgacatgttttttttttttttttttttttttttgtaggaaaacatcttttttattatattattttaaatttatttatttagagacaggttcttgttctgttgcctgggctagagtgcagtggtgcaatcctaattcactgtggcctcaaattcctgggctcaagtgatcctcctgccccacccttgagtagataggactacaggcacacaccaccatacctggataatttttttatttttatttcgtagaaacggaggtccagccaagttccccaggctggtctcgaactcttggcctcaagtgatcctccatgcctgggctggaaaacataaccttatgggaaagttcctaaaaatggttgaagaacaagactgaaggctagaatatgaaagcttaaattctgattctgccccttcctagttgcatattcctgagcaaatattttcaactggtatttctaaaactgtgccaaggcacccagggcattagagtgacctcacaagagtatctcagaatatttaaaaatttgaacacacaaacacaatgaaactcaacatctgtcagacatcacgtgaactactagtgaggtagttcattctttcaacatcc

SEQ ID NO: 237459 - DNA, 638 bp, Homo Sapiens
gaccttattttttacatctatgtggggaagtgaactttaatcaaaatgagaaatctgaaaataagggaggcctctacagcaatagttctggaaatactaaagggaataccagtcaacttttattttaaacttttatttcaccaacctcgaagacaaggatttggggccaatttgagaggaccacccataataaaatgtacagttataaaattgcagggcactctttatcatttcaaggcacactctgttttatcccaaatgactataagttcaaggtcacagtgatgatatatattcaattttggtctggtttctcatgggtatgttgttatatttatagccagtcataagcttcagaaactataatacaatcacttcaaaataatatgtcatttttatatttttaaaaatgtaaatatgtaacataatttcctaatttatatacagtataaatcgggagttttttttccactgcacagtggaggaagggaaggttatttctaccagtattccaacaaatacatatttgattatatagaaagcatgattatgttaaatacaggcatctcctacttagaatacaattattcaacacaaaagatgaactcatttcaaagaacaatgtaaactgaacttcc

SEQ ID NO: 237460 - DNA, 685 bp, Homo Sapiens
ctgcgagtagatacgaggagggagcgggtatgattatcgtgatcttgagacagagactagatcctcgatgtcgacgtcgtgcgcggggtttatgtgagatcaagcatatcagacagattctagaaacagtatgacatgtcactactacgggccgcgcgcaaacgatggtctagaagctctcgaggccgagcggccgacagttttttctctttgtttagggttggtggttcgtttttcagagattttattaagaataaggcatatgacagtcacccctaaagcacagggctctatttctgtgggtgagtgaatacactctgaaaagcattggatacaaaagcgcagccaacagagaatttggagcagggtccctctgccctgccacagggctcctgccaggtgggtttgaagccctgcacatcccccattcaaggctggcatgtccaggagaaggtgcttggagacccccggctccccgcgcttcgaagctgccccacaccctctaggcctccttcctctctccaccaggggggacgccatcctactgcttatatggggaagggttatcccattttggccctggactagtcccccaagctagagggtgctgtggctgagctgtgggggccaggggtacagagcctcaaaccgcactgcccagtgctccctggctgatttccagacc

SEQ ID NO: 237461 - DNA, 555 bp, Homo Sapiens
aagaaaagcagatacgtgagtagtctgaaaaacataatctctataatcatttaatttttctttttggaaaatgtatgtatacatacacacagtttccataaaaaaacatagatagtaaagctgattaaaatcttcctgtcctattggtaccagcacatgaagcccttctacaaaattcctgacggactgggaataaaaattcctagtgacagcccactccttctcaggcaggtgtgattgtttgaaatctctcccaatattgagatgaaacctgcttccctgtaacttccctgtaattctgtgggtcccttgtagccacagagaaggcagcaatcagtaggggaagtgctataaaaatatactatcccggccaagcgtggtggctcatgtctgtaatcccagcactttgggaggccaaggcgggcagatcactttaggtcaggagttggagaccagcctggccaacataatgaaaccccgtctcgctgggtgtggtggctcatgcctgtaatcccagcactttgggaggctgaggtgggtggatcacaaggtccc

SEQ ID NO: 237462 - DNA, 807 bp, Homo Sapiens
acctgcagttctagctcaaaaggtttctgacccagtggagagtgctaatgagcacaggagactgggacccgcccagcccccccgagacctgatgaggccttcctggcagagatggagaaggccaaggggaaccctgagagcagcttcaatgatgagaacctgtgcatagtggtggctgacctgttctctgccgggatggtgaccacctcgaccacgctggcctggggcctcctgctcatgatcctacatccggatgtgcagcaccgtgtccaacaggagatcgacgacgtgatagggcaggtgcggcgaccagagatgggtgaccaggctcacatgccctacaccactgccgtgattcatgaggtgcagcgctttggggacatcgtccccctgggtgtgacccatatgacatcccgtgacatcgaagtacagggcttccgcatccctaagggaacgacactcatcaccaacctgtcatcggtgctgaaggatgaggccgtctgggagaagcccttccgcttccaccccgaacacttcctggatgcccagggccactttgtgaagccggaggccttcctgcctttctcagcaggccgccgtgcatgcctcggggagcccctggcccgcatggagctcttcctcttcttcacctccctgctgcagcacttcagcttctcggtgcccactggacagccccggcccagccaccatggtgtctttgctttcctggtgaccccatccccctatgagctttgtgctgtgccccgctagaatggggtacctagtccccaaagcttctgacctctg

SEQ ID NO: 237463 - DNA, 503 bp, Homo Sapiens
agattactccacacgtttttacacactgaactctccagtccttccacttccttaattctgcaaatggagggggtggggactcttgggaaactactcctgtaaaattgaagttggaggtaggcgtgggctgaggaaagaggaatcagattaattctctgggttgcaaagaggctattctgcaagccccttacagtggccctgaaagctcaataagtgttttgtacctcttgtaaatgtgccattgtgtgaagcattaaacccaacatctagaattcaggattcatccagaataaaaggatgtaaaatctttcccaacagaagagtgttacttttggtcagacaacttcatgggttcttactgcacattaaattatgacttatggaacattgcaatatattctcggtccttaagttatgacttatggaacattacaatatattctcggtccaagtgagtaagttttttgctttatgtgaatccaataaaaaatccaaagaatttt

SEQ ID NO: 237464 - DNA, 386 bp, Homo Sapiens
gatgagattggccccatgtctgaaaaccagtatgtggggaaggcctggagaagcaattgaactgaccaaagtcaaaagtgggaagtccccctctggcaagcagctctaagatgacagagccggtgccagaatctaaaccttgggactctggttgctgtataaaaaaataaatattaggaacaaaattaaatacccccatctccatgctggacagcagaagagcaataagttgccaaatttttttttttgttttgttttgatagttttttactctctaaatgtaagctcctatatttcctgtcttccgtatgttagaagctcagtacaaacaggagaaaaagaaaaaaaaaaaggctggatgcccctcgtttgttgtcaaaaaaaaa

SEQ ID NO: 237465 - DNA, 476 bp, Homo Sapiens
tgcattagacaaatttcattcaagtatactatcaccctgataaaaatccttttacacttagggaagatataaattatgccctatggttcttgtaaggatgtttctcatagaaatcacggatagtatcaccagtctacagccactatctatcacagaatttacatggaaacctacagcctcattagaaaaacttagcatgcaaatttcataaagaaattaatgaatgatccattctacctcacagtggtaatgtgatataatggtaattcctaagaggattatgtgtcttgtttcctaacagcaaatgctgttttgttttaaatttgcaatgatcaaacaaatgcagttagtatgtttttgatgaaccatggatgaaaagggatcattgatattctagagaatcaatctatactgtagcttttctcctaaatcccttctgcccttaaaaaacaataaatgatttccttataaaaaaa

SEQ ID NO: 237466 - DNA, 556 bp, Homo Sapiens
ccaaacaacttcgctaaaatacccagattcttttgcaatatcagtgtcttcgtcaccatataattttggctctgtttcctcctggcatttatcagctggaggggaaaacctgagaccaccccaggtgaccaccctcttcctcattcatctgtgctgtcacctgcctgctcctgtaggtatgtctgcttttagccttgatgtgtacaagaagctgacagaagggcctcgggtcttaatcacagacttagggaaatcataaggaaaagaggcatgaaggtgctaaaaaaatcttaaagacaacagtttgagaactcccaggagtcaatatccctatttccctgacccactgtgcccagccctcattattcaactggcaaacttcaccaacaaaccaaaacaaaagaaaaaattgtcatatttttgtttctatcattttttcctttagagcccacctagtcctatgtggcaataaatagacactactctaaatctcatctggccaactgagtttcaaaacctaatctaaagagcctggaaagaaaatgcattgaaaaga

SEQ ID NO: 237467 - DNA, 557 bp, Homo Sapiens
ggtagctaggttataaactatttaaagacaagatcacgtgataagcttataatcttctcataattccccttacttagcattgtgttagacatactaataggtgcacagtgaaatacttattgttgattgtttaaaaataaagttttagaaaaccttttcaaaagtcagagtttaggccaggggcacaggctgacacctataatcccagcactttgggaggccagggcgggcagatcacttgggtcaagagttcaaggccagcctggccaacatggcaaaaccccatctctactaaataaaatacaaaaattatccaggcatggtggtgcatgcctgtaatcccagctacttggaggctgaggcatgagaattgcttgaacctgggaggcagaggttgcagtgagctgagatcgccccactgcaatccagcctgggagacataattcaaatctattttggtcttatatcttcttatgtttgtgttatttcatgtgtgccagtttctctttttttcacaacaatttaacaatttgtggcaataaaaatgatttaccttt

SEQ ID NO: 237468 - DNA, 424 bp, Homo Sapiens
aaattatttaatcagtgtccccccaataaatcacttatccatatattgctagttagttttatttatagcaacttgatttcctatgagtatggctcctgttgtaagaattttcccacctcttctgacatgaatgtagcataagttagcaatcggttcttccaaactcctgtgggttgaatatggtatagaaggtatgcaagaggaaaaagaaaggaaaagataaaactcctgcctgagaatttggaagcacctttattaacacatatatctcgcagaaactagaagctcataggctgttaactttttgcaactattcactcatttttaccactttttttttgggtgagggggtgatttttgtaaggttaacagccagattccattttgacctcagatgctgtgtacctgcccgggcggccgctcg

SEQ ID NO: 237469 - DNA, 447 bp, Homo Sapiens
ctttttttgcttaatatatctagtttataatgacctaatgtgcaaatttttgcatctgccctaaatatctactggtttatttttataatttttgtgtctatactatttgcaagcagtatgtgtcagtagactttattattaataaataaaaagccaatttggatagaatcactttataaattggtagtgctggttttttactaaaaatatttttaagttcttcaaaagaagttttatgagtgcatcttacagatctggtgaagatcttggcacattattgtatgctgtttgttgacttgtgtccgcatcggtgtccctgaggctctagcagttatgtcttgactgataaggctctaatttcttctactgtgttaacttgcttctggcaagattgaacagatctactgaaaccttgaaaggttttctgggtactcttaataaaattgc

SEQ ID NO: 237470 - DNA, 458 bp, Homo Sapiens
ggaggcagagtttgcagtgagccgagagtgcgccacttcactccagcctgggcaacagagtgagactccatctcaaaaaaaaaaaaaaaaaaaaaaatcccccagtcatcgaaacacaaaaggggtctcagactcccctgagggtggaggagctgtgcctgcatgctggcaggccacagcccctggctttgtgcccacttaggcagtattatcaacaaggtcctgctcagtgtccagcccccgctgagttcagaaatgcatctgccaatcagcagcaggattctgcagctccttttgtgccaagcccgttcccaccaggcaggctcgagataaagtcatcacagccttccctcatctgcagggagagaagttgctgtcagatgaatgtgagcagtctagcctggatgacatatttttcgttttgaattaaaagcactggctgtgtgattttaaaaaaa

SEQ ID NO: 237471 - DNA, 483 bp, Homo Sapiens
gacattgaaggaaatccgaggaatggacaagtgatgcaagagccagttgagttaccaaattagttctagaaagatctgaaaaagctcggtccgggttcctagctctatattcttgtagatgaatttcaggaacctttatggcagcttcggcgccgtggcttagttggttaaagcgcctgtctagtaaacaggagatcctgggttcgaatcccagcggtgcctttattcaattgaaacagcgtgattttgcggctaaatccacatcctttcatgtattgtttttatatcagaacgcgtaagagtttctgttctgcactcatagcacccacatttcctgcagagtcaagctgccactcccatgagatcgccactctaaaaggtggttctctaacttaggggcagaaatgttgcataggcctaagggtcctttgcttaactgatgccacaccccactggtgcaggtggactgggtcaggcggccgc

SEQ ID NO: 237472 - DNA, 385 bp, Homo Sapiens
gggtgacagagtgagtcccccatctcggaaaaaaaagaactagtttaaattctgactgtatcactgaaaggctgtgtagctgtgtgaccgtaagcaagtcacttaactccagattctcagtgctgtcatctataaacagggatgaatgaatatacacctcagagttgttaagaatccaatgagaaaatcacgggtaacccttatataaatggttgtgaaacatttcaaagatacaagcatccttggcctttgcagcccagaatcatccctccacatttttcctacaatccaaccacatcaagaaatgataactgctcagaaagtttatcaatatttaccaaaactcatggatttaaaataaacattaagtttctacaataaaaaa

SEQ ID NO: 237473 - DNA, 520 bp, Homo Sapiens
  misc_feature (63)..(63): n is a, c, g, or t
gctgacgtattatacggctgaggaaagatcaagaatgtgagggaaacccatgcccttaacaanaacttctcttctgaaagacaagagctcaccccaagaaaaaaaggactgggattgaacagagcaggaacacttggggtaaaggagaaaagctttagatacaagaaagaggtggccaatcccagaaagtacaggagcaaggactacacagaccgaccacagcaggggaaaggcctctccagctgtggagttcagaaagctactctgacccacaactgcccgtacgtagaacatcctgctgaaagaacaggaaaagatgctgatcacaccctgtacaaagatattgcggggagaaagtgaaccagataacctcccacagataatgaaagcacaccagaaaaacattcctccaggcagatgaaaactgtgtcctgatgtttctgagtgatctcaaaggaattagaaaaacgacagaaactactaaagaatggtataaattaaaaatgtttaaaaagctaaa

SEQ ID NO: 237474 - DNA, 442 bp, Homo Sapiens
  misc_feature (1)..(1): n is a, c, g, or t
naagatttttttttttttttaaagaatggctctttgcttttagaagaggagatgaagcttggtatgaaaataagggaatgagtcaatgaaaacttgataagaagaataagtgaaagaagtatctaattagaatatatagcctactgaacataaaggaagttttgtgaccagtcttatgtgcagtggggaagcaagggagacaatgagtgagcttgctttaggcttgtcctcatgtttaaaaagatcacagcaagtgaaaatgtaatttgaaagttaaacttgagatgaggtatgaaactgtataagtgtgttgtctgatatcctgaagagcctggtttcatagaataatatgattcttgctttgggattgctattaacttaagcagtgatgttctcatcattcataaatatttggcacattaataaacatattttaataggg

SEQ ID NO: 237475 - DNA, 445 bp, Homo Sapiens
ctctgtaaagtgggtgaagacctctgtcgtggatctgtgcctgccttaatgccgccagaccatcatgtagcggtggacatgctggctttagctaatgctgttttgcaagctgtgaattcggggttgttgaagacactgtctgtttatgaaaaacattccttttttggaggtgatgaagttcaacctgaatgtgaacttatcactagtccagatcatgtgatccttagagcagcaagcttagttataatgaaatccttagaaatcaagtttcaaaattattcttcagcaagtgaaatgaaaggtaattctccaaactccttttgtatgcagtgtgtaattatttacttaagtacagtaattcataattatcaaatctcaggactagtttaaattccagtaatttaagctgtatgttatcctatttgtaacttattacattttcaaa

SEQ ID NO: 237476 - DNA, 455 bp, Homo Sapiens
aaatggggcataggctaccatttaagtttgcatctgaatgaaaggtgtgatccagagagtataacatcactggttaagcagcacatctctgatgccaaattgacagctcaaagtgaagaagaacttgtatatattttgcctttggaaaggacaaacaaatttccagaacttaacagggatcttgatagatgttctaaccaaggcattgaggattatggtgtttccataacaactttgaatgaggtgtttctgaaattagaaggaaaatcaactattgatgaatcagatattggaatttggggacaattacaaactgatggggcaaaagatataggaagccttgttgagctggaacaagttttgtcttccttccacgaaacaaggaaaacaatcagtggcgtggcgctttggaggcagcaggtatgtgcaatagcaaaagttcgcttcttaaagtt

SEQ ID NO: 237477 - DNA, 492 bp, Homo Sapiens
cgcttgagctcaggagttcaagaccagcctgggtaatatagtgagatcctgtgtctctataaaaaaattaaaaattagtcagttgtagtgacacatacctgtagtcccagctactcaggaggctgaggtggaaggatcacttgagcccagaaggtaaggctgcagtgagctgtgactgtgccactacactccagcctgagtgacagagaaagaacctgtcaaaaaaaaaaaaaaaaacaacctacatttcaagtactatttcccttctctcccatctaattgctaaagattttctttcatacgcacacactccagtgactggaaaaacgggagttttcagtcaaagcttgacatttagagaaaacaaggactttctgcctttataaatggaaatcaactgtgtatgaactataactctgcagaggttatgaattcatcctttacaaacaataatgaacttttagtcctgtaataaatgaaatgttattaggc

SEQ ID NO: 237478 - DNA, 536 bp, Homo Sapiens
  misc_feature (116)..(116): n is a, c, g, or t
  misc_feature (179)..(179): n is a, c, g, or t
  misc_feature (192)..(192): n is a, c, g, or t
atgggtgaccaaaaggggcctttttaaaagcaattagaaatatgagttaatggttcttaaaccaagctgatgaaagtaggctcttgaaggtacctgtttaccaattgagtttgganctagttaatatttagatatcataaagaaaaattagttttaaaaagcaatcccccagaactganaatcaatgaaacnaattaatgtaaatatgtttctagttggtggcatcagcactattgcaagtgacttgaatacatagtaatttgacattctatccctaaaaaaaattactgcagaagaatgttcacactgtttgcaattatcctatttttggtgatagtgttgtgctggatatgatgattgggcatataatgtgtgagaaggtaaatgagtaattagatgatagtataattctgttagccccaatatccttgagaagtaggatgttcaaacttaggagaaagtagatacagatacaagatagatattgtatggcttaagtccgcaataaaaagcctgttgtcctgaaaaaaaaaaaa

SEQ ID NO: 237479 - DNA, 455 bp, Homo Sapiens
aggtggtgctggggcactgaggaatcagggggatggaccccactggagcttgtctcatgctggcagcaagtcccaggcctcaaacacatacctgggccacctcaggagagagactgcagggaagaaatgagttgcaatgctccagcctaaccaactccccttttgttaatccaatcccagaaggtactgggtagggtcagttaacagacagctgcctgtctcctggcagagtctgaccaagccccagtgggcgcttctcttcctaagtcctctggtgtaccccattcttcaagggaaacggtccccttaagaaactatgtgaaagggttctgaaattgctgtaccagttaatgaattatttactctaaacaatgtcttgataaagggggaggatgaagttagctgatgttgactaaggagagacggagttgccaaggaaattcttctaaatgaaa

SEQ ID NO: 237480 - DNA, 596 bp, Homo Sapiens
  misc_feature (82)..(82): n is a, c, g, or t
  misc_feature (106)..(106): n is a, c, g, or t
aatgttgtagagcagtgtgcaggtttgcagcttatggtgtggagagggataggaggagagatgaaatacgtagaggttttanacggtgtttggggaggcactcttncgattggaaaaataaaatggaaagccattctgaaggtgggtggataagtttcgttttggttgggtcatacagtatttgaacctaagaatcccaagaaaacttttattaaaagctatatttattgaatgttaccattttcaggtactgtgcaatgtgaatcatttaagtttttggtgacccatgtagaaaggaactgatctagtctaaacatggaactatctcttaaatcaagataacagctgtaatcatatagatgcttttcctgagttagttgttttatgtcttcctttgtgtgacttaaagtttttagtttgactctgctacttttgttctatttgtgcgtggcttgatggatttttcctgtccccatctatacactcgtcacaatgaggggctactaaataaggcagtgttctctgtttgtgtagtccccacagctgtttcctatagtaaagactctggaaaacaatgacctcatagtttccacaaa

SEQ ID NO: 237481 - DNA, 273 bp, Homo Sapiens
caggagctgagatcgtgccactgcacttcagcctgggctacagagtgagactccgtctcaaataaataaattaatttaattaaattaaaagtctacctgtgaaccatctaaaatcatctctgcatgccacggtttggaaaacaccaatttagagaagaaataacaatgatcatgatagctaattctgacatgctacttcatttgtatcaacccattgagtcctggcaattactgctggacaaggcagacagaattattatactgtctttctac

SEQ ID NO: 237482 - DNA, 461 bp, Homo Sapiens
  misc_feature (15)..(15): n is a, c, g, or t
ccttatcacccctgntgggtgacaagaataaaggctctgcccaggctgaaagttcctacccttttttttttttaatcttttatttttttgagacagagtctcactctgtcacccagactggagtgcagtgagccgagatcacgccattgcactccaaccctgggtgacagtgcgagactccatctcaaaaaagaaaaaaagaaaagggggaaaatgacaagtaaatattcttctctctttttgagtctgtgtcatattcagcactgtgaacccttaccagcaagtgactatttttgagttacaggaaggaaaggtgagcagccatgtggctaaagaaagctccttaactaggacatatgggaagcaaaagatggttaacatttttctgctgaatgaattctacattctttcacattctttgtgttgaaataaacttctagcttatctttcaaaaaaaaaaa

SEQ ID NO: 237483 - DNA, 434 bp, Homo Sapiens
ggaacagtttcatcctgaaccatccccacccccgagtctggaaaaattgtcttccaggaaactggtccttggtgccaaaaaagttggggaccagtgattcaatggttttaagccccaccccggcgccaccaagtttttaatgttctctttagaaataagcattattgagaaactgaacatgtgtttcagttattacatggcttctgattaaacatttgggttgtgtgagtttttctctgcaaaatatagtgccttcgaatgagaggtgaggggtagttaattcaaaatgagtctcaaagagataagatttggtttcctactacctgttctctgttccaacctgcttgtaaaatattctcaaatggcctgataattactatatgccatgaagaatttaactgactaccgcacagaaataaaagttcaatatgaaa

SEQ ID NO: 237484 - DNA, 485 bp, Homo Sapiens
  misc_feature (30)..(30): n is a, c, g, or t
  misc_feature (70)..(70): n is a, c, g, or t
ctgcgttccagcctgggtgacaaagcaagnctccatctcaaaagaaaagaaaagaaaaagctagtgctcncaatgacttacaagactctaccacgtcatgtctccagttacatctcttaacccctcttcttgagaagagtggacccctcacatatgcttctatgttaggagatttacattggcagttctttctgctagcagggtctttcctggagatccaccttccttagtttctcatatatgaagtctgttcaagtatcactttgtcagtgaagcctgctgtgccccctactttatttaaaattgcaatcccccgccctcccttactgcacatttttggtctcttatcctctcctattttttttttccatagaatttatgacctattttattacatactctttattttgctcattgcctgtctccctctacccctacacttgaataaaagctgttatgtaagaaaaagaaaaaaaaaaaaaaaa

SEQ ID NO: 237485 - DNA, 547 bp, Homo Sapiens
  misc_feature (167)..(167): n is a, c, g, or t
agataccataaataaaaacataatatgcagatcagcagaaaacattttcaaacgtaactagcaatgaattaataaaatatcttatttaaaatttttattttaagttctggggtacatgttcagagtacgcagcttttttacataggtaaatgggtgccatggtgatntgctgcacctaccaacccctcatgtaggtattagggcaatacactttcaaggtagaatgctaacacattctttcataagcattaccaaggctgacatctaatgttagttctgatatatttattatacatggaaaactttaaaaatgttactccagtctgtcattgtatatcccacggtgttactcatcaaattttcatagctgctttaatgacaggaatggttaaaaaggattttgcagtagaagtttaaaattggaaaagtctggccaggtgcagtgcctcatgcgtgtaatctcagcactttgggaagccaaagtgggaggatcgtttgagcccaggagttcaagaccagcctgggcaacatagcaagaccctgcgtc

SEQ ID NO: 237486 - DNA, 455 bp, Homo Sapiens
aaagtgtttagattcttgataaagatggaaatggaagagaaagaaaattatatatgtatatactaaagatccagacatcagggctgggcacggcggttccgcctgtaatcccagcactttgggaggtccaggcgggtggatctcttgagaccgggaggtcaggaccagcctggccagcgtggtgggacactgtctctactaaagatacaaaagtgagctgggtgtgatgatgcatgcctgtggtcctggctgcttgggaggctgaggcatgagaattgcttgagcctgggaggtggaggttgcagtgagctgagctcatgcgactgcactccagcctgggtgactgagcaagactctgcctcaaaaaaacaaataaataaataaaatcctgacatcctgccatcttttctcttcaatttaaagttgatttcttaatgatgacttcaaaaattaat

SEQ ID NO: 237487 - DNA, 528 bp, Homo Sapiens
ccagaacaggtacttcaaaaggcacctgaggaatttgaactcctcagtaaagtgccattgaagcatgaatatattgaagatgttggagaatgtcacaaccacatgattgggattgggccagtcttaaatatctacccatggaataaagagctgtatttgatcaggtacaacaactatgaccgggctgtcatcaataccgttccttatgatgtcgtccatcgctggtatacagcacaccggactctaacgatagagttgaggagacctgagaatgagttttgggtcaaactaaagcctggcagggtcctatttatagacaactggcgtgtcctacatggcagggaatgcttcactggctaccgccaactgtgtggctgctatttaacaagagatgatgtattaaacactgctcgcctcttggggcttcaggcttaaaattgacagcatctggattatgaatacacctggcaccctggctaccagaatttcatatgggcagaataatattgtgtcaaactctaaaaaaaa

SEQ ID NO: 237488 - DNA, 419 bp, Homo Sapiens
tggtgctattactagtactagtactatgacactgttaatagtactattaacaacccataggcacttgggatgtctgagatcagtgcctatgggttgttaatactatattgctgtatggtatatgcatgctgatttaccacttatgcatagatatatctttaataagtaatctaaaaatcctttttgtatttgagagaatctactaagttcagtccagtcaagaaaagaacctaatagcaccaatacaaattgaggacttaatttactttggaatgttgaattgcatttgttccattaaaaaaaacagaaatttgcgatttggtttttttgaaaaaatagctcagctgaccagaatgaatgtattctacttgttgagccatccagcatcacgttaaatgcaaaatgtatatataaataaa

SEQ ID NO: 237489 - DNA, 467 bp, Homo Sapiens
gcccaaggatccactttctgtctctgtggatgtgcctacggaatctgtttctcaacacacttctgggtgattctgctcctgcaggtccacggtcgagcattcaggaaccagtggaccagactgttccaagatcctttcctagtctaagctttcatagccggaacaatgaataccgacgaagtagcaggtgctttgcttggtgctggggttgtaaaagaaatatggtacaccctactcttgagaacctacagtcagtgggaaaaatggaatcataaatgactaactttaatacaatgtgagaagcgctctaacagcatgtgcattcaaaagaggcccaggatgcagatgaggtgattaatttgcagccaggagaagttaaagggggaagggaatgctgtgttaactgctttccatgcatttcatgtactgctcatcacaattctgtgagctggatattaataccacta

SEQ ID NO: 237490 - DNA, 639 bp, Homo Sapiens
  misc_feature (150)..(150): n is a, c, g, or t
cactacgtccagcaggcgctgaccaacgtcttgctgatggacgccgtcgtgggcacactgcagtcaccaggcgccatctacgctgcctccaagttatcctactttgataagatgagtaacgaaatgcccatgacgcttccggagacaacnctggaaacactgaagcataaaatcaacccctcggcgggggaggcgttcccacaagcggtggacgtgctgctctacactccagggcatcttgacccagccgaaaaagttgaagatgctcaccccaagttatggtgtgctctgagcgaaggcaaggtgaccgtgttcaatgcttcttcatggaccatccaccagcactcctttaaagtgggcactgcaaaagtgaactgcatggtgatggccgaccagaaccaggtgtgggttggctcggaagactccgtcatctacatcatcaacgtccacagcatgtcctgcaacaagcagctcacagcccactgctccagtgtcacggatttgattgtgcaggacggacaggaggcacccagcaacgtgtactcgtgcagcatggacggcatggtgctggtgtggaatgtgagcacactgcaggtgaccagccgcttccagctgccgcgaggtggcctaacgtccatc

SEQ ID NO: 237491 - DNA, 454 bp, Homo Sapiens
gtatctttgatgagttcaagaaccatgttttcagaagagctaaccctttctttgagaatatttctggagaaatctcccttgtacaaaaaattcttcttctgggtattctgaaaattattgaaagtgatactactatgagcccttcacagtatctaaccttccctttactgcacgctccaaatttaagcaacggtgtttcatcacaaaagtatcctgggattttaaacagtaaggccatgggtttattgagaagagcacgagtttcacggagcaagaaagaggctgatagagagagttttccccatcggctgctttcatcttggcacatagccccagtccacctgccgttgctggggcaaaactgctggccacacctatcagaaggtttcagtgtttccctgtggtttaatgtggagtgtatccatgaagctgagagtcctacagaaaaaggaaa

SEQ ID NO: 237492 - DNA, 710 bp, Homo Sapiens
  misc_feature (71)..(71): n is a, c, g, or t
  misc_feature (157)..(157): n is a, c, g, or t
atgaaatatcttgcagcaaaaaagtttgtccacagagacttggctgcaagaaactgtatgctggatgaaanattcacagtcaaggttgctgattttggtcttgccagagacatgtatgataaagaatactatagtgtacacaccaaaacaggtgcanagctgccagtgaagtggatggctttggaaagtctgcaaactcaaaagtttaccaccaagtcagatgtgtggtcctttggcgtgctcctctgggagctgatgacaagaggagccccaccttatcctgacgtaaacacctttgatataactgtttacttgttgcaagggagaagactcctacaacccgaatactgcccagaccccttatatgaagtaatgctaaaatgctggcaccctaaagccgaaatgcgcccatccttttctgaactggtgtcccggatatcagcgatcttctctactttcattggggagcactatgtccatgtgaacgctacttatgtgaacgtaaaatgtgtcgctccgtatccttctctgttgtcatcagaagataacgctgatgatgaggtggacacacgaccagcctccttctgggagacatcatagtgctagtactatgtcaaagcaacagtccacactttgtccaatggttttttcactgcctgacctttaaaaggccatcgatattctttgctcttgccaaaattgcactattc

SEQ ID NO: 237493 - DNA, 542 bp, Homo Sapiens
  misc_feature (47)..(47): n is a, c, g, or t
  misc_feature (115)..(115): n is a, c, g, or t
  misc_feature (147)..(147): n is a, c, g, or t
ccgcggatgtgcgcgtaggcagccaggctgttgctgagcaactccantgtcccttcgcggggcatccatgctgctctggggggcagcttcccctaccagcctgcgaggtcagcanagtcagatccttctcccagcctggagcccacnccgaccccttccgcgggcagctcctctcccgggagccgcgggcccaggttccaccctggagagagcgcttccctaacttcgtggcggcccggggccctgtcggggggaacccctctcccgggcgcggacgcccctccagtcctgggagcagcgccggggaccgcgggaggccccgccccctggtgaggtccccagctgaggcccggttccgccgtcccggggcgggatggaggatagggacgctgagcctccacgccccaggcgggctccgggaagggaagctgcctctctcctcgcccggccgccccgcggggacccaccggcccggggccaggcccactcaccgtcagcgccccgcttcccggctgcccggccccagcgcgtcccgcggccgc

SEQ ID NO: 237494 - DNA, 585 bp, Homo Sapiens
tttcttttcaccccgaaatacaacagcccataacagagacttcctcggaccccactaacagggcaaggaacaagaagactacaccgctcatcacaaaccctgcctgtatcgaaagccactttcctgctctgaagctactgcctcttagagaaagggaatagctctttatgggctgggggtgagggcccctccccagggtccctgttaatttctggccttggtgctcaggcctgtccacagcctcccttgtctatgtctctatccatgcttaaggggcccggacaggatttcccaaaccagccgaggccccagcacccgccgtctccccagaagccccctcctccttcccccatgggtcatatgttgaaagtctattttaaaaactatgttccttgccgtagattgcagagctaatttatcacgtttctctcctgtgagacccccccttttatatgatatatccagaggaagttttgtaatataaaacaggacgcccacactgatggttttgcactggtttttgtgaatgtttcttacaaaaagaaaaaggaacaaagaataaatagtgaccgtgaaaaaaaaaaa

SEQ ID NO: 237495 - DNA, 673 bp, Homo Sapiens
gcaaagggggattattccatgaggcacccaggagcaaggggccatgatattcatgactgtgtctgctgggcatttttcaaagtgtccttgaattcactcagcaaacaaagctttctggagaatctctcaaaacttaggccctgctccatttggccaaaaatgatggctgctccaaaactctgaacttcttaaaactccatctgctacattatttctggagtttaaacatgactttttctgtctttgagtatagatgtgtttgtttaattaacgaagcacaagtctgttaagcagaaggctccaagctgtattctatacttgggaatccttggtgccatctttattctaccaagtgccaatcaccatggctaaagtgggcgtatattacagcctgtgtcctaagcttagaagctttaatgtacttttttaaatgaaaagtattagagggggttgaacattgtaactaaagcataaagttagaccaattacatgcagagatgtttatttaatattgtgtgagctgagtccttctgtataaattatttgcacacttttcttgcatgatgaactgattttttatagttgtttgtaccagacggtggcatatttttgtaaaaaacttttgacactgaattgcaataaatgtttttccaacaacaaaaaaaaaaaaaaa

SEQ ID NO: 237496 - DNA, 688 bp, Homo Sapiens
ttcgagtccctgcacgacacggaagatgagccccaggtccagaagtatgatgactcctttgacgacgttgaccgcacactggatgaatggaagcgtgttacttacaaagaggtgctcagcttcaagcctccccggcagctgggggccagggtctccaaggagacgcctctgtgaagatctctgggctccggggtggcagtgaggaccaccttcaccttccacctgagaggggactctcgttgccaccttgaccttggctggggcttgcatcccaaggcatccatcagagcagacgcccgggttccatggaccctcctccccacggccatgcctctgctcttgggcgcccatcatggaggagcacctgaactttctggacaagacctctggccgacctggggatggcctctgatccctggagcagtggcccacttgcccggtgctctcagaaacctcagagctggtggggctccagatcaggccttggcctctgagccctgcctgctctgggccatgcagaggaaggacagagggtgggcgcagggcaccaactcagggacatcccctctcctgggcgacgtcagtggaccttcctgcacccccagcctggaatgtaaatcagctgtgtggtgcccgcgtggctggaaggaaatagacccttttgtagctcaaaaaaaaaaaaaaaaaa

SEQ ID NO: 237497 - DNA, 658 bp, Homo Sapiens
ggcacgagggatgttgtgagcttgtcctactccatacgtgtttatcctgctatgcagttttacattgtgtgttcacatctattccaaggagccttgctagaaacaacactggcggttcctgcaggccaggcaggcattggcccatgctgtgtcccataggagccaatgaaagaacgtagcttggtctgctagccagccgtggggtggcgcaggccaggcagcctctgcaccagagtccagcacctgcccattccccagtcacacaatcatactcttctttcatagagattttattaccacctagaccaccctagttttcctctctgttagtgtcctgagctcttttgcaacaaaatgtaggtacagaccaatccctgtcccttccccaatcaggagctccacaccatgagttgtttggttttccagaagctgccagtgggttcccgtgaattgcgttaagatatcgatgattttttttattgtttttcttcttgtttttttaaataatatatttaaaggcagtatcttttgtactgtgaatttgcagtagaagatgcagaatgcactttttttttacttctgttggtgtgtattgtatatagtgtgtgtgcttcttgtgatgaaaataaactttttctttataaaaaaaaaaaaaaaa

SEQ ID NO: 237498 - DNA, 514 bp, Homo Sapiens
  misc_feature (448)..(448): n is a, c, g, or t
  misc_feature (489)..(489): n is a, c, g, or t
ggcacgagggctggtctcgaacccctgagcttgtgatccacctgcctcagcctcccggggtgctgagattacaggcgtgagccaccacgcccagcgtctgtctaccttttattcccatcactccccaccccagacagggtgttgtgttatgatggggaaggcccttgtgtcttttgggtgtgttagacctgggaaacaatctgtcttctcctttcacgtgccccaaagcaggactccaatcttccccgggcctttctgattgggagtcttaagaccctccccagagagggccccaccctgttccctgggaaaggcatgctgacaaaaccctacaggacggtttggagacagggttagttcaactcgtgtgtgtccccagagggtgacaccacagggatgaatgggagttccaggcccctccccagcacctcaacctgcacattgcttnatctggatcctttgtaacatcctttataataaaccagtganaggtgttaaaaaaaaaaaaaaaaaa

SEQ ID NO: 237499 - DNA, 585 bp, Homo Sapiens
ggcacgaggccgcccgcgttttttttttcattatctttcctcttttgagtcttctctgccttttcttttcctctctatctctttactttcttccttttttaaaaaaatctaataaaagacaagttattttaaaaagacataaaatgccatccgtggggggtgtggccggcgtggccacctcggggcccctcacgtgatctcctcggtccgtggttttctgtggattctctgtccggtccgtctcttcattgccgcctccggagtccactgcagaggggcagagtgaatgccggcggccaagtggcctccgggacaggtcctggagccctgctggactcagggtgggtggaggctgtgcctgtggacggccggggtggccaggacggccaagggctgggaggcacgtcccccagcccagcccccatgtacactgtagtcgttctattgtacagaaaaaaatatttctatatttgcaatgtttgctgtaaaatgagaaagaaaaaaagactatgtctactaaaaaaaaaaaaaaaagactatgtctacttaaaaaaaaatctgcaaaggaaaaaaaatcaaaaaaaa

SEQ ID NO: 237500 - DNA, 429 bp, Homo Sapiens
  misc_feature (369)..(369): n is a, c, g, or t
ggaacgagggcatctgaaccagagcaaaacaatggcaaccaggacatactcatcccacttagttgagagaagagatttctagtttgggttacagttgcccaaccttccctttaaagagaatccagtcatgttttcaatggtaaaaagccttaaaaagctgcccttcgaagatctcctatgactgcatgtcaaggtattttgtacctacaatcccagaacttggttccttccccatgaggactaacaaatgttcacaacaatcatgatcaagtgtgcactggaagaaaaaatccacaatctgggcttctcacttcgtgcttcataaatgacaatcactgcttgatgcagatgttgcactgtatccactcnagggatgtttccttaaaaaaaaaaaatacatcaagaaggaggaaaaaaaaaaaaaaaaaa

SEQ ID NO: 237501 - DNA, 501 bp, Homo Sapiens
ggcacgagggtagccctacctgccaggcggcgccccgcgggctgccgccgccgctgccttgaagaagcagttcaacctcatcagcaggtggccgacctgactatgggccggtcggctctggaccgaaccacagcccagcccgaggccagcgggacgcccgctgccgctcaatcgccccctggtccttggcgaccatctgggacgggccgctgcctcctctgtagcaacccctcgggtgccccctgcccattgtccctaccccggcgagcattgccctgcgaggactacacccgatgcttctcctctcttccggaggacacagccagcctgggaccgctgccctgtgctaaaactccgatgacttctgtccctaacgctgtgccgagcgctgtgctgtggggggcagcattgtcagactttccgggttgacccgctgttgggagtcctttaagtgcatggtagcaagaaataaagggatatatgaaaaaaaaaaaaaaaaaa

SEQ ID NO: 237502 - DNA, 628 bp, Homo Sapiens
ggcacgaggacattgttgacatggtaggactgtttatcgaaaatgtccaaagcctgatggctcagtgccgggacctggagaatcaccaccacgagaagctcctggagatctctatcagcaccctggagaagattgtcgagggcgacctggacgaggacctgcctaacgacctgcgcgcgctttttgtcgataaagatacgattgttaatgctgtcggggcatcgcacgacatccacctcctgaagattgacaatcgagaagatgagctggtgaccagaatcaactcttggtgtacacgtttaatagacaggattcacaaggatgagatcatgaggaaccgcaagcgcgtgaaggagatcaatcagtacatcgaccacatgcagagcgaactggacaacctggaatgtggcgacatcctagactagatgaatgtcagccacaggagcttcttcaaaacatagcaccagccccagccaggagaaggaagtgcacacgcctcacccgcacctctagagagttgctgggcatctctcaaccgcgatccccaacaccattcttcccccacccctggaaaaacttccaaaagtagagaaaataaaggactcatttcacaaaaaaaaaaaaaaaa

SEQ ID NO: 237503 - DNA, 513 bp, Homo Sapiens
ggcacgaggggtgtccatccctgttttttgacaggcagtcacacaggtgagcagtgccagaaactggttctcttttttgtgttggggaaaggagcctgcagtgaaaggatcagttggattttttgtcattgttagtttgtttaaataaattataagacagtatattaagctttagtctctgtaactcttatgtttgtgccccattattttagtgctttagagcaacaccttgtttttcctctattttatactagttcttgctccagaggcatggctttgaggctagaatcatgagcaatctctcataaacaagtctgttatgcacctggagatactcaagatttgcctctgttagcatggccacttagagattactctgttctacttcagagaccctccactatggcatccatgcagggtgtgtgcttggggactaagcaatcttgttcagtttaattattgtacttttttattaataaaaaggtcttaaacttcaaaaaaaaaaaaaaaaaa

SEQ ID NO: 237504 - DNA, 679 bp, Homo Sapiens
acataatgaaaaagaaaaacagaccatctaaaaactcagacaagattatatttaatatattaattactaaaaaggcacaagattacactgaacatattagctactaaaaaggcactgctaagacattcaagcaaatagctattacacactactgcagattttacaggtttctaattctaacatatgtttgaaaaatccgtgagtattccaaaatatatttaataatggaatatctgcattaatataccatccatgtgtttttaccatttgccttaatattgaatatactgtttacctcacactaaaaagaaaaccagaagccttatttgtgattttgggagtggaagcttccatttttgtgtcaaaaatgaatcctgattcttatggaaatctctgttattaagatatttcaagatgagacaacactgaagatcaaattgtgtttagtatcactatcttctctcctcgtttctctcttactcctcatcctcccagaatctaccagtttatggtagaaagatgggaaccttatttgaatgtgtttttttttttccatgatgtccaattttgttgtgggaaaggatttggataaaatttttgtttaaattttggtagatttttatctatacaaatttaaataaaattatgttttgtaagctgtaaaaaaaaaaaaaaaaaa

SEQ ID NO: 237505 - DNA, 761 bp, Homo Sapiens
cgagcacacccacacgctgcttcccatttttatagtcgtatcctcccacctggagggtgtgaatggggatcagtttttcaatagaacatgtatgtttggtaagttaatatgtgtagctgacccctttgcctttgtttttatatatttatgtttttctattgtagacatattgatgcaatacctgttcatagttgaatctgttacaaattgttaccttttatttgatgaagaactatttaaagattttccttttttatttcttctaaagcaaaagtcaatgcaagtaactctaatcagcgtgcaaaggcgtgcatatatatctgctatgtaattatataatgtttttataatgctgtgtggataacttttcactgatttagttacttgactgtaggaaacactgttgctttgcacgctgtgagaggtttgcactgttacagatgaaggcaacatatttacatatgtacatgtatatacatatatatatattcaaaaataacatcggctctttggggtgtctgtttccttggttgtctcacgccactggaacattgaacccagacagaccctaggatgtgaggttcctgactgcaccttacagaccacagagccacgtgtctatttctgtagacctatctccttagatttgtacatgcattttttgcggacttgaactttgttttctgaaattagatgccatttatgatgatgtgatgtcaatcaaataaagcatcattattttcaaaaaaaaaaaaaaaaaa

SEQ ID NO: 237506 - DNA, 727 bp, Homo Sapiens
tccacagaagggaagaggcgtcctgccaaggcctggtcaggcaggagaaccaggctctgctgccaccgagtccctagccccaactcaacaaacctgaaaggacatcatgtgaggctctgtaaaccatgcaagcttgagccagagccccgcctttgggtggtgcctggggcactcccacaggtgtagcactcccaaagcaagactccagacagcggagaacctcatgcctggcacctgaggtacccagcagcctcctgtctcccctttcagccttcacagcagtgagctgcaatgttggagggcttcatctcgggctgcaaggaccctgggaaagttccagaactccacgtccttgtctcaattgtgccatcaactttcagagctatcatgagccaacctcaccccacagggcctcagtcgccaccatgtgggcctctccagtgcaaaccaccgagcattccaccatgaccggtcacagctacaaatccagagaccatcaatcctgctagagtgcagggtggcaagcacccaagggtggctgaccaagactgcagagtctcctccatcttcaggtccattcagcctcctggcatttaactaccagcatccagtggtccccaaggaatcccttcctagcctcctgacatgagtctgctggaaagagcatccaaacaaacaagtaataaataaataaataaactcaatgcagaaaaaaaaaaaaaaaaaa

SEQ ID NO: 237507 - DNA, 734 bp, Homo Sapiens
ttcggcacgaggcctgttattactgatgtttgaaaccctgtcattagccccggcctggttaaagcccctcagagtcacctctcattcatagcaatagaattcaaccccaagtggttgatggtgtccccagcacagccgagagacctgatctctggattcagtgcttttagctcttcgagtttaccctaagataccttcgggcaatatttttaaccaacccaaaagctcttcaggtcatttctgaagaggacaaggtgaatcttggcttggaacaccatttttgggctcttgctactgaatgaatcagaaaggaattttttctgaagagcattagaaagtaaaggagatgttaaaataagttcttgaagtatgttttatatttatctaaaacactgattttaaaagtttacattcaaatgtgtattcaaaagaagtactgatttgtaattattatagtttgtgtgtatcatcccttttaaccgtgcctaacaactgtacttaaattttgttttctagtgtaacaaatgtttcccataagattttctagagccaaataatgggagtgaaaaattccttaagtgttatataagaaaatatattagaaaatcagctttggattatacgatttctaaaatatactaatacagaatcctcagtaatatgttttgaattggattttttctcagaactgttacataataaataatacatcaaccagaaaaaaaaaaaaaaaa

SEQ ID NO: 237508 - DNA, 616 bp, Homo Sapiens
  misc_feature (34)..(34): n is a, c, g, or t
gaggagagctttccacccagaccgtcaacttcgngacagtgggggagacggtcacccttcacatctgcccagacagggatggggatgaggcggcacagccctgatgctgctgccatggtggcttggggcagcggggagaaaggagtgtccttgaggcctaggacgctgcccggcctcagcagcagccctgggagcctcctgagggccctccctgtccctggccacgggcccttcttacctcactcaacttcagccaggaggactgggtggtgcttgcaatgttggaatgaccggctcaaagacctcagctctgggctgtttcctgtcagcctggcaggagcctcaggactgtggacgaaggatgtggccttgggcatttgtcctgttcccacatgggcctggtccctccctcctggccccagccacagctgccaggcctgacatggccttgcctctcctgcagtcttggtgactgagacccttgggtggcgcttcccagctctgcaggccctcctggccttttctgcagggtggacacagggtctgtgtgtgggcagcagcccctgtctctcagcaagaataaagcagcttcctgtgcaaaaaaaaaaaaaaaaaa

SEQ ID NO: 237509 - DNA, 564 bp, Homo Sapiens
ttttttcctattttctgaattgttggcctcatggaaatccctttcccgatctttgtagcaccatctactggcagaatggcagagtagctgcgaaacaatttgtttaaaaacttgcttaagacaattgcatcagatttggaagttttgccatcaaaattctttgcagaattggaagttaacacatttgcttgtaactgagatgggcttcacaggaatgtagttgccagttcatatcacaatagccctttctatatgaggtttgaaaatgtaaactgctatgcatagcttgggcaatagccctaaattgctatgacaactaatgaaccagctacgtatactggtattttaggtgcaagttgtaaagcaaaatatctgtgtattctgcttggttaacaaatgtatatttgtagccctttcctgcaatagcattcaagttgttgtttataagagaagaacaaaagtgataataggtgaaaattgcctttctggatagaaatagagaatagcaacgtttatggatatcacaaataaagaattcaattctttaaaaaaaaaaaaaaaaaa

SEQ ID NO: 237510 - DNA, 507 bp, Homo Sapiens
ggcacgaggcgcttgtgaggggactgaggggtgcgcaggtgtttcctggtgtgtacaccaagaatacatcttggcgaggtttctctagggtgcatgcccaggaggaagtgtggctcgtggggcaggtggacgtacatctgttcctggaactcccccaactgcaggcccgagaacacggtgtgaggatcgctggctcctgcaggacgtggacgtggcaggggcctgggatctggggtctggcctggggtctggggtctggcctggggtctggctcctgcaggacacaggcgtggcaggggcctggggtctcacacacaggacagcaccgcgctgcatctccttcctgcgtcataggggatgtgggtgaggagtgcctctccagtgaagctttataaccctaaaaagtattgtctgcccctaagagcgtttgcttatgtgcgttctgtctcttcatgtttatgatgatataaattaaaaccaagacattttaaaaaaaaaaaaaaaaaa

SEQ ID NO: 237511 - DNA, 625 bp, Homo Sapiens
agcactgtagacgccgactttaccaaccaagatattgtatgtgtgtgacattcagctaacattgatctaggcacttagtttgctaccacattgttcccttcattgattgaaactgtaaataacataacactttaaggcagctaagcaaatattttaataagccatgaaaggcaagatgccagagaaaatctgtatattcagctatttggagaactcgtgttttccacaaattaaactggagatgtcatttgaaattttcttcccttaaacatgctgtcacaacatggattccttctcatggatgtctttctaggcttataaatatatggtgtgattgctataattttgtgaaattttattcagcaattaatagtgatttcagcaatatgtactaagattccaaggcagaaataaatgtataaaggatttgagcctgtatgtgtaagaagaaactctctcttcagtcatatttcctaaattcagtgtaagtacctcgctgatttagcactggagttattccttgaatgtgtaaataatgatgttctattctgacctaatgaattcctgtaatgtgaatatttaaaataaaagaattcaatttaaatgtaaaaaaaaaaaaaaaaaa

SEQ ID NO: 237512 - DNA, 685 bp, Homo Sapiens
ggcacgaggttgataaggaaactgccagctgtcgaaagttaaccagcagagaggggaagatggcccaggagccagcccctcctgagttttaaactacactgttttctgtccagatattccaatggagacagttggaaaacctgtacttcagagaaaagaagttttccgtggaagttcatgacccacgcagggcttcagtgacaaggaggacgtttgggcacagcggcattgcagtgcacacgtggtatgcatgtccggcattgatcaagtccatctgggctatggccataagccaacaccagttctatctggacagaaagcagagtaagtccaaaatccatgcagcacgcagcctgagtgagatcgccatcgacctgaccgagacggggacgctgaagacctcgaagctggccaacatgggtagcaaggggaagatcatcagcggcagcagcggcagcctgctgtcttcaggtaggcagaggccagctggagggacgccccctgagcatggctgggaccccagaggggacccaggaaggtggggagagctgcagctggggagactgcagggcaagctgctccaaagctggctttgctttccagaccaaggttgggatccaaatgcgaatctgagaaaactgctcccaggaatcaaatagtggaagggaaaaaaaaaaaaaaaaaa

SEQ ID NO: 237513 - DNA, 643 bp, Homo Sapiens
  misc_feature (41)..(41): n is a, c, g, or t
tgccgcctgtgcaggacaccgcgagaccagcagggccctgngaccctggcgcagccagcgcacgtcagggtgagcatcccgctgtcgatcctggagcccccgcaccggtaccacatccaccggcgaaagagctttgacgcctctgacacactggccctgccccggcactgcctgctgggctgggacatttttcctccgaagtctgagaaaagctcagcccccaggaacctggacctctggtcctctgtctccgctgaggcccagcaccagaagctgtccggcaccagcagcccttttcacccggcctcaccaatgcagatgctgcccccgaccccgacctggtcagtgccccaggtccctcggccccacgtcccacggcagaagccctgaggactgactcctgggggagaacagcattcccgccgcctccagcctctcccctctggcaggcgcacccaggagatggaatcccctgcccgcccagctcaggcccagctgtcctaggttgggcaggtgggtggacccaagcttgtctgctgcctgagttccagagagggaggaccctggggtggagggtgagggattctgtggaagtttgtaaataaagctcagtgctctgcagctcaaaaaaaaaaaaaaaaaa

SEQ ID NO: 237514 - DNA, 638 bp, Homo Sapiens
ggcacgaggaaaaaagaaaaaaaaatcgaaaagaaaaaaaaaaatcttctgaaccaacttgtttcgatattccagagtgtgataattgtttcgagactctcctctagcgtgcctgtgttccgtgtgtccccgtgtgcaagcgtgtgccatgccaatctgcctcgagggggcctcacccgtgtccgcggcgcccgccgaggcccccgagggcctgcttgggagtgtgtgccggtgtgcagttgtacgtgtctttctggtccatgtttactggctgtaaataccatttttatactccacatcgcagacctgcgtgatttgtacaatgtactttatttctgctacgagtaatttcatgaagtttcaacttgcaaactgacttttgggacaaaccaacacacacacagaagagaaagcaaagaacttggaactttgggttgactcggtttgagttttgtgtcaaagaagatttcccgcggctgaagaggttggtgttcctgttacgtgtttcaggtgagaagcagcaaagcgtcttaatgttcaaaacgcctctctttggtctggagaaaaaaaaaaaaaaaaaaaaacaactaaaaatttatttaataaaagttttacttgctaaaaaaaaaaaaaaaaaa

SEQ ID NO: 237515 - DNA, 683 bp, Homo Sapiens
gaggaagattgtaagcaaaggttgaggctctgatggtttttttcttaattattggctgaatctgccttggagcactgctggttttatatattagccaaaggttttgttctggccttctgtactgatctgtgttcctgatcctaattcctatctgtctaacgtggaggtgatcaagtgtggctgtaggcctttgttttccaatggtgctatattctgttttcaaacacttcactgaacccagctgtcttgcaaactttcagtggtgctgtccctggatgggggctacaaaaacaagaattggtgaagatcttgctcttcagtgctgaaaatggatgatggactttggctgtgagccaggcctaggatggttcttgtcctatatccacctagtcttcacctggggctataattctgtcctggaaaaagaactctgaaaacctgggtcaggggaatgattcctaaggaaaacggtctgcatttgagctctggtttgaaagtagccaaggggactgatggtggacactccagatgtggttggaagcatatgtggggaggctggctggttgagttttgttattttctgtatagaaaggttgagatatatcaacacttggaattgttacccatctgcagaattgacttctcaaataaagatgctaaaaatcaaaaaaaaaaaaaaaaaa

SEQ ID NO: 237516 - DNA, 663 bp, Homo Sapiens
ctttgcacagcttgcacttacagtgattgtacatattgtacatctttgtacagagacatcttggcacctcatcccaacaaatcacatttgtagaaatgtaatgcggttctgagtggcttgaaatgtacagaatgttttgaaagtgttttattaagaatcacacaaaaataaatgtattaaaattaaattcattctcttattggtgacttatggaaataaagcatcaatattggatgtatttaattcctagtttgttttccattctggaataaaaaggtatttgctgataaaaggcataacgagacatagtgctgctaccactgaataagtgatactttggaaagatgcatgccagtggatgccagaggaccaggctaatgacttgtgtgtgctgatgtgtttccatttgtatttaatgtgtgtagaccctcctctgttcatcaatcaaaaagcatttcctaggcagctcctcgcctgtcagtgtgcatatggaaacagggacatctccatcattactggcttagttttgctttcctttgacacagtaaggcaaaggccaagctttcaaaagagtaaaggatactttcacaatttcccttcatatggatatgattccagtcaaaaataaaatgcacaccaaaatgtaaaaaaaaaaaaaaaaaa

SEQ ID NO: 237517 - DNA, 545 bp, Homo Sapiens
agaagttatattgggcagtggctccaatctgtggaccagtatttcagctttccctgaagatcaggcagggtgccattcattgtctttctctcctagccccctcaggaaagaaggactatatttgtactgtaccctaggggttctggaagggaaaacatggaatcaggattctatagactgataggccctatccacaagggccatgactgggaaaaggtatgggagcagaaggagaattgggattttagggtgcagctacgctcaccctaaacttttggtggcctggggcatgtcttgaggcccagactgttaagcaggctctgctggcctgtttactcgtcaccacctctgcacctgctgtcttgagactccatccagccccaggcacgccacctgctcctgagcctccactatctccctgtgacgggtgaacttcgtgtactgtgtctcgggtccatatatgaattgtgagcagggttcatctattttaaacacagatgtttacaaaataaagattatttcaaaccaaaaaaaaaaaaaaaaaa

SEQ ID NO: 237518 - DNA, 610 bp, Homo Sapiens
  misc_feature (37)..(37): n is a, c, g, or t
  misc_feature (591)..(591): n is a, c, g, or t
cgttccagaaatcccaactctcacacccagcccaggntgcagtctccacaccaaacagtcaacaaaacacaaaccctgaaggaaaaccttttccatacacccaggctatgcattgaagagttttccactgtatacatttttatccagatgaaggtatttttatattttgacaataggaaacagtgaccattttcagagtaatcaaatctggaacaaatgaaacatcttttagccaccaccaccctgttgcaattaagacaaccgtgggggaacacaccactttttactgttgaaaccaacacaacgttgaaatccaggcttatacgcagactccgattcctagagaactaaatttggctttagtgtgacgggatttgattaagcacttagtatagtcttttgaacacggaaatcctgttgtacttaaagctagcggacccgtgaacaactttgtcaggttcacgtcctataacggttaaaaaacacacacacacatacacaaaccgtttctatgagagattgatgaactttgtttaaaattttaaaaaaaggaacacgttctgtaaacgagtcgctaaatacagaattgtntaataaaaaaaaaaaaaaa

SEQ ID NO: 237519 - DNA, 668 bp, Homo Sapiens
aggcagctcctctgttagacctaagaaaactcgggttgtctgcccaacatcccacctgataagcaacaggaatcattagaacagggaggaatgtgaaaccttgccattcctggcccgtagcaattccaaaatcccagtaggcagccactgtggggccacttcacctaggctggcagatgttgcttgtttaggactgggttccattctttagcaggggtctccccattccattgtcctctgtggcctctggcttcaccctctgctaggttctttcatttccattatcctccctttccatcctccttttcggccacacccaaaagagacattcaagaatttcttggaggttgtgcagccttctcaatcctcatcctctaggcgattggagacccaaggaatattttaagttttgaacagacacttctggaacctgggcttgtgagtttgttttatttttgtcagaataagcttcaaaaatgtagtaggaattttacctgattgattgcaatcagtaacatgggccagaagccacactcagttcttttttgtgactcagttctcaaatctgctgtatttcttcactcccttacccttatgcctctctagatttaaactttgagtctagatttaaacctgtggggcttctgtgcaaaaaaaaaaaaaaaaaa

SEQ ID NO: 237520 - DNA, 551 bp, Homo Sapiens
ggcacgaggctttaatccacctggattttttgtttgggtttttgttgttctttagtcaaagatccaattcttttttctatttaaataaccatcattgactgactagtccatccttaccccacccctactgattatgatgtcactgctgtcacatattgtcatacgtggggggctgttactgggttctccagtctcctccctttatctgtttgtgtatccctgtgctggtgccacactgcctcgttcactgatgtttttaataagcctgcaccatttgtatgtcaattcttcctgctcttcttatccatcaaaaatcactttaacttttcttgttcctttactcttccatataaattgtttattcaaccatcaggttccaggaaaaagcctgttagtattttcattggacttacatggaatttgtagattttgaaaaaacagatatttttatgagtcttcctattcataaaaatagtatgtctccatttacttatgtctttaagtgtatttcagtaaagctttctatcttttccaaaaaaaaaaaaaaaaaa

SEQ ID NO: 237521 - DNA, 698 bp, Homo Sapiens
accacataatcttccggtcttagcatttagcctcttgattcagactctaatgactaaattcatctggaagcccctgagacacgatgcagctgagattactgtgatgcattattggtttggtcaagcattcttctattttcagggcaactccaacaacattgccaccgtggacatctccgcaggcttcgtgggcttagacacctacgtggaaatcccagccgtgctcctgacagcgtttgggacgtacgcagggcctgtgctgtgggccagccacttagtgcacttcctgagctcagaaacacgcagtggttcagcactgagtcatgcttgcttctgctacgcactgatttgttctattccagttttcacgtacatcgttttggtgacatctctgcgttatcatttatttatatggagtgtattttctccaaaacttctctacgagggaatgcacctgctcattacagctgctgtctgtgtattcttcacggcaatggatcaaaccagactcacacagtcttagactaagctgaacactggaaaaataatacatgcttaaagtctgctgttattctaaaatgaaagatatgaattcaacaaagttgatggataactttctttgactgctctacctgaatttagactaagcagtaaatagtttaataaaagatcactttaatataaaaaaaaaaaaaaaa

SEQ ID NO: 237522 - DNA, 470 bp, Homo Sapiens
ggcacgaggattatttcagctttgccgcatggctgttttatggcctgacgattctaggactcatcgtgatgagatttacaaggaaagagctggaaaggcctatcaaggtgcccgtagtcattcccgtcttgatgacactcatctctgtgtttttggttctggctccaatcatcagcaagcccacctgggagtacctctactgtgtgctgtttatattaagcggccttttattttacttcctgtttgtccactacaagtttggatgggctcagaaaatctcaaagccgattaccatgcaccttcagatgctaatggaagtggtcccaccggaggaagaccctgagtaacaagctccgtctcttgtagccaagtcagctgaatttattttcttaagcaatatttgtggttatttcttcctttttttcttacgaataaaatatactcagatgtttaaaaaaaaaaaaaaaaaa

SEQ ID NO: 237523 - DNA, 596 bp, Homo Sapiens
ggcacgaggtggaggacatcaaggccgcgggggccgagccggactccatcctgaaacccgagctcctgtcagccatcgagaagctcttgtgaaataaaagcagggttggcctcagccctgtgggtctgtctcatgctctccctgttcctctccccgccaccccagggcctccaagccacctctggaaatacttggctctgccccatgggcacgggaggggcgccagccgtggagctgtggaattgggccccgtggcagagcccccatcccttgggggctgtggggatgcgcccaagcccccgagggagaggcctggggacaccaacaaatctaagccctccctagctgcttggtaactgtgtcatgaagctgccggacagacacacgtggcatctccctgggcaggagagcaggcctgcagcatgggtcctgttcccgtgtgccgtgggtggcagtggctgcacctggcactagggctgctctgtggatgtgggtgacaacggcaggaggggatgctggccttcctgcacatagacctgcagttagtaaatcataagcccaaataaacaggttgtttgaaaaaaaaaaaaaaaaaa

SEQ ID NO: 237524 - DNA, 400 bp, Homo Sapiens
ggcacgaggattattttagaaaatgtgactggcttaggacggggataatatgtgaacagaaatctatctcatgagaaagtgctactgttgtcaaaattaccttatctgagtgaatggtattttttttatcttttccacacatgcgtgggaaaggtatgatttctgcatgtaattgcagtttaacccttatttctaggttgatcataggtcccagtttacccaggaaaattccagtttatacctgttgtacctgtgtaattattggtagcactccctttcactcttacaatgtcttggtttggatgatatatggtgaagtttttgttgaaactaaattatgaagtctgatatatttggataaaaataaagaattgcttttcttaaaaaaaaaaaaaaaaaa

SEQ ID NO: 237525 - DNA, 360 bp, Homo Sapiens
ggcacgaggtttatgtccaggcgtggaccgctctgccacgcactagctcggttattggttatgccaaaggcactctccatctcccacatctggttattgacaagtgtaactttattttcatcgcggactctggggaagggggtcactcacaagctgtagctgccatacatgcccatctagcttgcagtctcttcgcgctttcgctgtctctcttattatgactgtgtttatctgaaacttgaagacaagtctgttaaaatggttcctgagccgtctgtaccactgccccggcccctcgtccgccgggttctaaataaagaggccgaaaaatgctgcaactccaaaaaaaaaaaaaaaaaa

SEQ ID NO: 237526 - DNA, 685 bp, Homo Sapiens
tcagatatcctacggtgagaagcttaccataagcttggcacctataccttgaatatctgctatcaagccaaatacctggttttccttatcatgctgcacccagagcaactcttgagaaagatttaaaatgtgtctaatacactgatatgaagcagttcaactttttggatgaataaggaccagaaatcgtgagatgtggattttgaacccaactctacctttcattttcttaagaccaatcacagcttgtgcctcagatcatccacctgtgtgagtccatcactgtgaaattgactgtgtccatgtgatgatgccctttgtcccattatttggagcagaaaattcgtcatttggaagtagtacaactcattgctggaattgtgaaattattcaaggcgtgatctctgtcactttattttaatgtaggaaaccctatggggtttatgaaaaatacttggggatcattctctgaatggtctaaggaagcggtagccatgccatgcaatgatgtaggagttctcttttgtaaaaccataaactgtgttactcaggaggtttctataatgccacatagaaagaggccaattgcatgagtaattattgcaattggatttcaggttccctttttgtgccttcatgccctacttcttaatgcctctctaaagccaaaaaaaaaaaaaaaaaa

SEQ ID NO: 237527 - DNA, 576 bp, Homo Sapiens
  misc_feature (533)..(533): n is a, c, g, or t
ggcacgaggggcactgggctcctgctggccgccgtcctgagcctgcagctggctgcagccgaagccatatggtgtcaccagtgcacgggcttcggagggtgctcccatggatccagatgcctgagggactccacccactgtgtcaccactgccacccgggtcctcagcaacaccgaggatttgcctctggtcaccaagatgtgccacataggctgccccgatatccccagcctgggcctgggcccctacgtatccatcgcttgctgccagaccagcctctgcaaccatgactgacggctgccctcctccaggcccccggacgctcagcccccacagcccccacagcctggcgccagggctcacggccgcccctccctcgagactggccagcccacctctcccggcctctgcagccaccgtccagcaccgcttgtcctagggaagtcctgcgtggagtcttgcctcaatctgctgccgtccaagcctggggcccatcgtgcctgccgccccttcaggtcccgacctccccacanataaaatgtgattggatcgtgtggtacaaaaaaaaaaaaaaaa

SEQ ID NO: 237528 - DNA, 408 bp, Homo Sapiens
tatcttcttggtaggcccactttttggcatcccctaacaagaagtcctcagagatttttactactcaacatgtgtgcgtcccactcagatgtattgtgttctttctgttcaccctctacttcccattccatttcttcctctgacttagggttagaatggcccaatgatcctacaactttttgatgctatttcatttgattcctctactgtctaaatcacaagttggctaactttacttactgtaagggatcagatagcaaatagtttaggccttgtgggccattcaatctgtcataactacccactctgaccatatgtagtgcaaaagcagcccttgacaatatataaatgaatgaacgtgaatgtatttcaataaagctttacttgtggacaaaaaaaaaaaaaaaa

SEQ ID NO: 237529 - DNA, 781 bp, Homo Sapiens
ggcacgagtatgggactcaatggcttcttaagagagaataagttgaaatcaatgaccagaagaccctgatggaagtggaggagaatcatctcaggcaaactttttgtgtgccagtaacagaaaccctctttgtgtgatcacatgcaaagtataggatatttgcaatatagccatggggaggagtgcagggcccaagggtagattttagccaggcctcccaggaacagaactcggatccgaaaagcccagagaagctagagctgcccctccaacactctcggatccacatggtctgtgttctctagacccccctgcatgttagcggtgttctctctctgtggactgactgtccttctcagtgaacatgtccacccgacagctcctgagtttatatcatctcaaccctcacaacccacagaggctgtgtctcctagtcacagctttaaattactggaaaaataaatgactggccaaacttggagcaggtgtccatcccagccctgtgtagttagagcaggaatcaagatctcaacacaaatgtggctgccaagcactcagccccggggcgaggggtcaagttcttctcagagaaagaggaataagttggttctcagaagacatcacaagatacgtgtgtacccaacaatctctgatctctgctgatcttttgcttagacgttaacttgatgcatcattggaaaggtgtttctctcatctctgtcctaaggcttgataaagtcattaaaattgtgttcttttgactaaaaaaaaaaaaaaaaaa

SEQ ID NO: 237530 - DNA, 578 bp, Homo Sapiens
ggcacgagggttactgtaatacaatataaaggaaatatgctgttgaaattttaaaggtatgcccagttcctaacttttaaacgaattaccgttcttcctcttggctgatcttggcagagatgacaaaaaaaaccccaaaacaacccatgcatgtataatgtgtgtatacacatatacataagtatacatatactcccacattataacttagaatatttagttttttacctgttactaggtttgagttacatggttgagttgccaaattatttacatgctttgtttaaattcttcatcacctagcaactgtttgctgatcatggatttacttagttactttaatttataaaattaccatttggaaaagaactcaattgggaaatgtgatgacgtattgtacatgttactttttcctttgctataatcatctagggagactgataagaattttggaaatgggagcctggaaactcatctttgtttttttaatgctatgcctcttacgaggaatacgaattggtatgtcctaaaataagaacttaataaaggagggaaatcccaaaaaaaaaaaaaaaaaa

SEQ ID NO: 237531 - DNA, 686 bp, Homo Sapiens
ggaggcctgtctggctcctttctctacacaggaggaattggattcaagtacgtggctctgggagacctcatcatcctcatcacttttggcccgctggctgtgatgttcgcctacgccatccaggtggggtccctggccatcttcccactggtctatgccatccccctcgccctcagcaccgaggccattctccattccaacaacaccagggacatggagtccgaccgggaggctggtatcgtcacgctggccatcctcatcggccccacgttctcctacattctctacaacacactgctcttcctgccctacctggtcttcagcatcctggccacacactgcaccatcagcctggcactccccctgcttaccattcccatggccttctcccttgagagacagtttcgaagccaggccttcaacaaactgccccagaggactgccaagctcaacctcctgctgggacttttctatgtctttggcatcattctggcaccagcaggcagtctgcccaaaatttaaggggacaagtagctccccccacgacatgtctccctttcttagaatatattaaagtcagagtctctgaggaaggaatgtgatttggcagtcagggtactaagcatgggtgggaactcctgccttataaaaattgtttttgtgttcttaaaaaaaaaaaaaaaaaa

SEQ ID NO: 237532 - DNA, 703 bp, Homo Sapiens
  misc_feature (56)..(56): n is a, c, g, or t
aacaccactgtgtatgtttcatcattgctctgaaggtcaaaagcctcattttattntgctggtttgattttttttttgtaaagaagaaaaaaaaactgccctgaattaaatggctgttttaacagtaggctcttagcattataccacatagtcatttttcatgttcttgtttaacaggcactgaggttctggtttaaattaaatagctgcaaatgagacaatttataacccattaggttgggtggaaaattgtttctcaaaagcaaataagtaataaatctggtatctgcctataactcacagttgataagaaagtggccatttctcactagcattatatatgatttgggctctgggtaatttggaagtgttaggtttgtgtctttgtagcagtatttttattagaaaagaatctattggccttttacagggtattaatccctttgtcacctaccattgatgccttaagttttctgagtctcaattaaaaatcttccttttcttgatgcatgacaagtgtaatcagtacttgctcatttatttgtctgtatttagtttatgctgtactatttaattatccttccagcgttttttttttctccttacaaatatgatactctttagtgttaagctaaggcattgattcatgtatctgtccttataatgaattaataaactattttccaaaaaaaaaaaaaaaaaa

SEQ ID NO: 237533 - DNA, 624 bp, Homo Sapiens
gaacccacaaccagggctacccagaggcctgaccctgccagagtccatggctgcactgctgcccagacactagctgaacccaaggacaccagcgcccaaggacagctcctggaggaggccagcccagcaggaaagtctgtgagcaggaccccattcaccctgcggcagacgggcaccgtactggccacgggctgacgccggccacacttcccctccgagggccagctgagcacagcaggcatgaaagcaaacagagatacagcagtgagtcagttccttggagagggcagggactccgcccaccctgtgttcagataagggccagtgtgtgtccctgaaggtcaggccagccgggggaggggtccatgctgcgaaaattcagcctgcaaaggctcctctccccacttgatcaggcccagaccaggtgggggttggcgctggcctgtgttgcaggggacaagggcccacccaggccttggaacataagctctgcccctgcacaccctcatgtcaccacacctgggatggagacatcaggtggcccagcgagagatggaggactgatcctggaacgtgaagcagctttcaataaaccagctcctggggaaaaaaaaaaaaaaaaaa

SEQ ID NO: 237534 - DNA, 605 bp, Homo Sapiens
tcaatggattgaggcacttttgcttttgtgttaaatgtagatgtgctaaaatatatagatctatcatattttacctacatatgtatgtcattccagtataaaacattctcctctacccaagaaccatagccatgattgttataaatcaatgaagtgtaaacatacattattaaaaaaccacttctgacattccattatgtgctattcaaagatggactattgaactatagaaaagacagactgtgcatttgttcgttgatcctcatcttattcctgacatgtaaaaatcaattttagtagagtcaacattgtaggtaggttaaaataccagtggcaaatttggaaattcagaaacttataaaccacgagaaatatataggcttgtctctttggtcttttattttggctctattgttgggaatctatttcctattccataagtaagtatacctaacatgctgtggaatcttgagtttccaacaccgtgctgcttgatagaatgactttgaggtccttggataaaatgtgatatatgcaagtacagtatgttgctattactattgcaggaatataaataataaaagactgttattagcaaaaaaaaa

SEQ ID NO: 237535 - DNA, 437 bp, Homo Sapiens
ctaacatttaacaagaatcacatctctgatttcagtgtttatgactttatctaggagtttgtttttcattttgtttttttaaagtattagaaaaggttttagctgaaatgaggagtcacaattaaggatggaggtgatattttcctcaatggcaaattttaaattagtttttaaaaacttacttatttgggtagttaaattttgagattatgcatagaaagaatccatgctataggtttatttccatacctgactctgggtgtggtggttaaaatactaattttaaagtcttccagtgactttcggtcttggttatatggagaattctgaatcccaaacccctggtttaagtaggtagaaggaggatgcctaatcctacaaagtgaccctttatacatttcattttttatttgatattaaagtatgagatagaaaaa

SEQ ID NO: 237536 - DNA, 429 bp, Homo Sapiens
gtttgacctgccccatcatcttcccagctcattgctttccttactccttcaccagtcagatatcatcaccatttaaaataactgctctcacctgcctcctgaagaagccatagaaagttcctgtggcaggcacattcagcttatttagtgaacaagaacatggacacaaaccatcatcgcactgtattgcaggagcatgtgctgctctgagcacgcctctgatctgtgaaactgaaaccatgaataaggaagcttttctttgcttcaacagatttcatttttaggaaaacatcagtatctagtgtatttgcctttgtcttctttgtgtcatatattttgcttgatctcccataagtttatggcagtatccaaaccaatcttaaagtatcttttaagtgaaagcaacataaaattcagccttaaaaaaaa

SEQ ID NO: 237537 - DNA, 440 bp, Homo Sapiens
attgaaaattgtgtactgtgatatggtcctttgctagttgtctttttttctcaaatcaatttcgaagaaagcgtttttgccctgaaagcggctgcagctcagtggaagctggaactgaaataaagttaggaacttgcattccttgctcagagttctctctttactttctctagatagaatacaaagtgggtggtaaatttgaatattttatatgcactggggtctgtgctaaggtataattttagttacttctcatagcctttttattgaactttatcatttcataatatagatgatgaaattaagtaatttaggccgggtgcattggttcatgcctgtcatcccagcacttttgagaggccgaggcaggaggattacttgaggccatgagtttgtggctagcctaggcaacaaagcaagacctggtctcaatacttaaa

SEQ ID NO: 237538 - DNA, 227 bp, Homo Sapiens
tcgatacgacttttttttttttttttttttttttttcttgatgaattatcttatgatttatttgtgtacttattttcagacggagtctcgctctgggcggggcgaggcgaggcgaggcacagcgcatcgctttggaagccgcggcaacgcctttcaaagccccattcgtatgcacagagccttattcccttctgtcgtcttctcgcagccgtatagtagtagtaggc

SEQ ID NO: 237539 - DNA, 772 bp, Homo Sapiens
cttctgcccgtcctgccacaagcccagcatccttactacattccatcttcctcacgcacggcaactcggccatgaaccccattgtctatccttccgcatccagaagttccgcgtcaccttccttaagatttggaatgaccatttccgctgccagcctgcacctcccattgacgaggatctcccagaagagaggcctgatgactagaccccgccttccgctcccaccagcccacatccagtggggtctcagtccagtcctcacatgcccgctgccccaggggtctccctgagcctgccccagctgggctgttggctgggggcatgggggaggctctgaagagatacccacagagtgtggtccctccactaggagttaactaccctacacctctgggccctgcaggaggcctgggagggcaagggtcctacggagggaccaggtgtctagaggcaacagtgttctgagcccccacctgcctgaccatcccatgagcagtccagcgcttcagggctgggcaggtcctggggaggctgagactgcagaggagccacctgggctgggagaaggtgcttgggcttctgcggtgaggcaggggagtctgcttgtcttagatgttggtggtgcagccccaggaccaagcttaaggagaggagagcatctgctctgagacggatggaaggagagaggttgaggatgcactggcctgttctgtaggagaaactggccagaggcagctaaggggcaggaatcaaggagcctccgttcccacct

SEQ ID NO: 237540 - DNA, 612 bp, Homo Sapiens
  misc_feature (84)..(107): n is a, c, g, or t
gccagtgtgctggaaagagcccgtctgagctcagcgagagccccagcctgaggggagaaggggaagagggccgtcgccggccannnnnnnnnnnnnnnnnnnnnnnncgaggagcgagttccggcgccggtgtgcagccttttggttgagacgcccgcagccccgagcccggccgccgcagcctttcgatacactttgttgccggtcacccccgggcctgggatgcacccagggtaggtctcgtcccgggaccgagccccaccgtcgcctggtgcctcccgcctccgtgtgccctggttgtgagaagacgtctgtgtcgtgcggttatgcaatggtctctgcaagatggtttattcttgaattggacctttttaagactgacaaatgctggtacttcatcttctataagtggactataatttcttttctcaagacaactacataagcagacaaattgcaaagatctgccctgtgtcgagtatgacagccacgactcgtggctctccggtcggagggaatgacaaccagggccaggctcctgatggacagtctcagccccccctccaacagaatcagacttcatcgcctgattctttcaatgaaatttccccg

SEQ ID NO: 237541 - DNA, 443 bp, Homo Sapiens
tcctcctgacagtgttccaactcgcttagaacttgaccaaaatagaagtaaattaaagttgtacattggacacctgacaaccctctgccatgaccgagaccccctgatcctccgtggactcactccaccagcttcctataacttggacgatgaccaggcggcttgggagaatgagctgcagaagatgacccgggggcagcttcaggatgagttagagaaaggtgaacgggacaatgcagaactgcaggagtttgccaacgccattcttcagcagatagcagaccattgtcccgacatcctagagcaagtggtcaacgccctggaagagtcctcttgaccctgctttatggggaagcctgaggtagtcaacccaggagccaagaaaagagaactacgaggaacaggtgcccggaaccttcttggcaccaaacactacaaactct

SEQ ID NO: 237542 - DNA, 716 bp, Homo Sapiens
aggcttccacgcctggggcttcatcactgagagaccagcctcagcgacccattaggagcacaacgaaatgattctgacccacggtcccttcagacagcaggtgcctagatcgatgatggagcgggcatgtgcacctgagccagcttcacctggaggggacactccggtcagcagcagccgcctcctgatggcaccatgtcacctctgcttggttaacatttaggtaagccacaacagggccccacgcaggatcgttccatccccacgaggaacacaggacaggacaagagccccacgtggacccccggtctccgcaggcagccagctaggtcttgcttcgccgcaggagcgtggcggcggggccatggccgccctggaacttgaggctctgcaggttgatgtgggccccatgcctgagcagagtctccaccgtctgtgcgtgccggccctgggcggccaggtgcagcgcgctgagcccctgctcgtcgaacaggtcaatgacatcggcgctgaccaactcctccaccacctccgagtgcccgtgggcggcagccaggtgcagcgccgtctggttcaggggtccccgggccagcacatcggccttctcctcgacaagcagcttgacagtggccaggtgtccgttgcgggcagccaggtgcagagcggtgtagccgtcctgaggtcacggcctccttgccagcaagggaacaaaactg

SEQ ID NO: 237543 - DNA, 694 bp, Homo Sapiens
cggtcctgttcgcctcagagacttgtgctggagaccctctgtaactcagtatccaggacaataatgtggacctgatcttggccactcctccatttagtcgtcaggagaaattctatgctacattagttaggtacgttggggatcgcaaaaaccaggtctgtcgagaaatgtccatggcgcttttatcggaccttgcccaaggggacgcactagcagcaagggccatagctgtgcagaaaggaagcattggaaacttgataagcttcctagaggatggggtcacgatggcccagtaccagcagagccagcacaacctcatgcacatgcagcccccgcccctggaaccacctagcgtagacatgatgtgcagggcggccaaggctttgctagccatggccagagtggacgaaaaccgctcggaattccttttgcacgagggccggttgctggatatctcgatatcagctgtcctgaactctctggttgcatctgtcatctgtgatgtactgtttcagattgggcagttatgacataagtgagaaggcaagcatgtgtgagtgaagattagagggtcacatataactggctgttttctgttcttgtttatccagcgtaggaagaaggaaaagaaaatctttgctcctctgccccattcactatttacccattgggaattaaagaaataattaatttg

SEQ ID NO: 237544 - DNA, 674 bp, Homo Sapiens
ccttgtggcacgagagtgcggcccttgctgctggagatctgaggtcactgctgtgagctgggagaactgctgtgtacctcttgctgccagcacccaacagccttgccgtggggaccttggaaacctggctttgctctggacaaagggttccagagagaagctagaagtcccccttgaatgacccccagagcccctctgagaagggctggagtttgggggaaggggatggctggatgtgctccaggccatgctggaggtacccccgaggcacaggcactgcccgttccccttgcctgggcttcaggccttctggcaccttctcaggacacaagtggctgcccaaccctgactcagagaatgagggtggcttggacccctgggaatcaggccgccgagggctgagctccagagccgcaccatctgccacaaacagaattcgagacatacttaattttgaatttctccttgccacgttaataaagccaaaagcagcgggtgctattcgtggcaacacacttcactgaacccacttgcttccaaaacgatgccagcccgaggcactgctacgccagcagctgccacatgggatggtggctcaggcgctccctccaggattctgcccctgcctgtccacagactcctttgtgctggaaccaggtccctcagagctgctt

SEQ ID NO: 237545 - DNA, 888 bp, Homo Sapiens
ccaaatgaggaatgttgttcctggaaggctggaggagaccagtacgacacctatatatcccagaagcatgcagagaagaattggtttgttggcctcaagaagaatgggagctgcaaacgcgggtcctcgggactcactatgggccagaaagcaatcttggtttctccccctgccagtctcttctgattaaagagatctgtttctgggtgttgaccactccagagaagtttcgaggggtcctcacctggttgacccaaaaatgttcccttgaccattggctgcgctaacccccagcccacagagcctgaatttgtaagcaacttgcttctaaatgcccagttcacttctttgcagagccttttacccctgcacagtttagaacagagggaccaaattgcttctaggagtcaactggctggccagtctgggtctgggtttggatctccaattgcctcttgcaggctgagtccctccatgcaaaagtggggctaaatgaagtgtgttaaggggtcggctaagtgggacattagtaactgcacactatttccctctactgagtaaaccctatctgtgattcccccaaacatctggcatggctcccttttgtccttcctgtgccctgcaaatattagcaaagaagcttcatgccaggttaggaaggcagcattccatgaccagaaacagggacaaagaaatccccccttcagaacagaggcatttaaaatggaaaagagagattggattttggtgggtaacttagaaggatggcatctccatgtagaataaatgaagaaagggaggcccagccgcaggaagacagaataaatccttgggagtcattaccacgccttgccttcccaggttactcagacagcaaggacctacgtc

SEQ ID NO: 237546 - DNA, 590 bp, Homo Sapiens
gaacatcgatatattgaactcttcttgaattctactcctggaggcggctctggcatgggaggttctggaatgggaggctacggaagagatggaatgggtatgtaaagtttttaaaatatgcagggttagctgcttatcgatgagtctcaattttttttcttttttctttttaaagataatcagggaggctatggatcagttggaagaatgggaatggggaacaattacagtggaggatatggtactcctgatggtttgggtggttatggccgtggtggtggaggcagtggaggttactatgggcaaggcggcatgagtggaggtggatggcgtgggatgtactgaaagcaaaaacaccaacatacaagtcttgacaacagcatctggtctactagactttcttacagatttaatttcttttgtattttaagaactttataatgactgaaggaatgtgttttcaaaatattatttggtaaagcaacagattgtgatgggaaaatgttttctgtaggtttatttgttgcatactttgacttaaaaataaatttttatattcaaaaaaaaaaaaaaaaaagggcagccgctcg

SEQ ID NO: 237547 - DNA, 621 bp, Homo Sapiens
caacctgcaaaaggcagtgcactagcattcaaagaccacctttctcagttgtgcctctagatccagggattttaaggaaaattaggagaaataatgatcaaaacattcttgtgggccaggagcggtggctcatgctcgtaaccccagcaatttgggaggccgaggcaggtggatcacttgaggtcaggagttcgagaccatcctggccaacatagtcaaacatcatctctactaaaaatacaaaaattagccaggtgcggtggcacacgcctgtagtcccagctactcaggaggcagaggctacagcgaaccaacatcactgcactccagcctgggagacagaccaagactgtctcaaaaaacaaaacaaagaaacattcttgtgaatcatgcacagtctcagatgggcagttagtcattactttcttggtcaatgccttgtgactagactgtgcaggggccatcagcctgttcccaaagctgcgggtctgtgtgttttatctgttgaagaaggtcctgtttttttctgtggctgtttttagtgaatagtttacaaactcaggcaaaacaataattatactcaagcaagcaagcttttctctaacatagagtcagtactgc

SEQ ID NO: 237548 - DNA, 482 bp, Homo Sapiens
tgctagactggtctctttaaatgtaaggtctagtatcaatatttacttcattcaagtggaataaatggctttttgtagttacttccagttttcctcaagaatagaaataagtctgttcataagcaataccttcagttttgttcagttcacttccacgttaaataaagaataggattattcactggtaataatagagtcattaagaaatattaagcattgcagctaaaaattgaacaaccctgtaatgatacatttaagaattattcaaaggtgctacatggcagggttagagaataaaaagaacgtggtgtttgaagcaaaacagatctgtattggcatcttggttctcccttttatcagatgttgttgccttgtgcaaatcacattttctctgagtctccattttctcatttataacatgcggagaataatacttatatttgtggtagtagtgtgaacattaaaaagataatgtatgtgaa

SEQ ID NO: 237549 - DNA, 425 bp, Homo Sapiens
gagtgactctggcaggcttgctccattgtagagatgagatacaccaagatagtgacttcccagcttttctccccaaagcacccctaatagctgagaagaatctggaggcatagctaccatcacagctacactaaccaccatactttactgtatccttcaggtgtctgtcctagctagttttgtggtctggctccttcagtccctgcaacaagcctgtttattttcattatattgatgaggttatagagcttggacaagttacatgacttttcgaagatcacatagctaataagtgtcaagagtcttattctcaaaaccctggtctgtccaactacaagcctgtgctcctgactccactattctgcttaccctaagcctaaagctgcccacttcaagctcaaatcctcttggaggcttcatgcttt

SEQ ID NO: 237550 - DNA, 474 bp, Homo Sapiens
acttcttgcaaataataatatccacacaggaaacctaaatattaataatgaagagttaaccgctccctgatgtttgaatggggctttaaaaattcctatttcacgtcatgaagtgggagaaggcctaatggtaatgtttactttctcaagaaaatatctagttaaaaggggccaggtatgtagcaaagagacagcaagaggagccttccgcagtactttaagtaactaaggggactgctccaccacccatgagcccatctgtgcatatctctgcacacatacacatgcatgcatgcattcctccctgtatgcccatggatgctagagctgacccttttctacagaagtcctggctaccttgacatcctactcaggtgagtgctgaaagctgatcctctgcattgtccaaaacttggattttcatccatttgcccgtgattttttatgaaagaaataaacagaattgtagcctga

SEQ ID NO: 237551 - DNA, 475 bp, Homo Sapiens
aaaaattcccagcagttgtgtggcgtaaaaaactcccatggtcatgtgactccagatacttctggggctggttgaatgcagtgtttaataaggtggattatgatcgcatcagggatgttggccctgacagggcggcatccgagtggttgctgcgctgtggggccatggtgcgctaccatggccaggagaggtggcagaaggactacaaccaccttccaacaggccctctggacaaatacaagattcaggcgatcgacgccaccgactcttgtatcatgagcattggatttgatcacatgggtaactaccctatcgttttgctaatagaaaatgcagatgatttgcagtgaccattttgttgcagttgactcacgattatagtcataggtatgtcctttttgcccatttcattatagtcaagtttgtttcttcctgtgtttcatatttattttcaaattaaattgaggttacagac

SEQ ID NO: 237552 - DNA, 473 bp, Homo Sapiens
tctcaaatcttgattattttgatgtttaggcttaaataactaatcatctagagttccacagatgcctaaactatgaagtttttataaaactagagtttgactgaatcttcaactagacagactcaactttcccagaataattttattataatcaaaccatgttgaaagttctaaattttatttaacattagatatcttaaaacttgtagaatcctaaatggcctataaactataatccaaatgaaaggcatattacaaatattgctagctaaaaattaataattttttagtggcagttattttgtgctttttttcccccacatttaaacagtagactttatcttaagtggcctggtatcttctgttttgaaagtcttctaattaaaattctttggtccttgatgtctgtcagcattttttaactaaaggtcacaacccattaacaaccatgaaattggtgttgggaagaaaaa

SEQ ID NO: 237553 - DNA, 429 bp, Homo Sapiens
tgttttgaaaatttccagtgggaatccttccacacaggaggtatcattgtccccactgggatgccccttcccaacttctctgtttgttccagaataattacaacctgaagagaaatctgcctggggttaaagtcagatgttttgttcagataaaacacaggcagcccgactggcaaagcacaacttattcagtgttcctgtgtcgtggattaattcataacctcaaatgcataatcagatgaacgtggttcagagaacagcacagtcctctagtgttcttgctaaaataacaatttttctcaacttctgtgtgctcaagaggttggagcaaactgatgcttggctgaaagggaacccagtgcaaattcaccttcgagtcccctcatcaaggtgacgtgaacccttctgtcgtcttctagcagccgtata

SEQ ID NO: 237554 - DNA, 412 bp, Homo Sapiens
agagggagttgccccttccagttaaaagagttgcagcctgttaaacaatgtggtctaatttagtgtctctcccttggcaaatgtaagttttctaagttggccaacttgtctcttacagccagtggctgtggtctacagaattgtttcatataaaatacgggtagagtggtagagtttcaaaactttcgtcatagatatctgggacctttctcaggatctgtgttcacacagccaatagatttggaatcaggcctaagagtacacatggagggtaaatattaaagtgcgtattatgtacatctagaatccatgtgacttgcagcctacctgtaatttctatccattgagcatgcatggatatacccaatagtacacacaaaataaatgtttacttaagagccattctaaaaaa

SEQ ID NO: 237555 - DNA, 498 bp, Homo Sapiens
gcgagagagagaagaggagatgcaacacacttttaaacaagatttcaggagaactcattcactatgttctggagaccagaaggccaaaatcaaaagtatgggcaggcttgatttctttagaagactccagcggagaactgtgtctccttgcttctgattctacatctccatccatgggccactgtttcagcaacctcagccagtgcaacacaacctcagccaagaagagtatgcagagaaaggagtcccctacctgccacaaaactgttgtctgaaaactgtctcatattgtctcaggttgtcattcattgtgaattagacctgtttaacatgtaatctgcaacatgcttcactgtctaattttccagagcccctcatataaggaactgtattattggtataatcatcatggtgaagaagttggtatgtgggggagagatgacagaaacagagagaaagtcagagctggctgcctgacagataaaaaggaaatgacca

SEQ ID NO: 237556 - DNA, 502 bp, Homo Sapiens
atgggttgatcagacaccatacaatgaaagttccacattctggcatccacgtgagcccagtgatcccaatgagcgctgcgttgtgctaaattttcgtaaatcacccaaaagatggggctggaatgatgttaattgtcttggtcctcaaaggtcagtttgtgagatgatgaagatccacttatgaactgaacattctccatgaacaggtggttggattggtatctgtcattgtagggatagataataagctcttcttattcatgtgtaagggaggtccatagaatttaggtggtctgtcaactattctacttatgagagaattggtctgtacattgactgattcactttttcataaagtgagcatttattgagcattttttcatgtgccagagcctgtactggaggcccccattgtgcacacagggagagaacatgagtctctcttaatttttatctggttgctaaagaattatttaccaataaaattatatgatgtggtgtc

SEQ ID NO: 237557 - DNA, 457 bp, Homo Sapiens
  misc_feature (133)..(133): n is a, c, g, or t
attataaaaggtatgcattacataaaggcccttttatacaggaaaaaaagtatttagatgaaaaaacttcttaattatggaggtacatctccaatacctaaaattaaaaataaaatgaagtgcattttcctcntaagattttctcatcaaccccgagaaccactgctggaaattacctgaagaagaaatcttaccttgctctgtatctttaggaaatgttttacctaattttagaaggaggggaaaagaacgataacatcacagacacacacacacacacacacacacacacacacacgacacaaacacaggcacacactgtagtttcctaagcagtttgttctaattcttcacatccccctgtcaaaatgtttgcttatagctttctttgtattgtcatttaagcccatttctaattggtgattgttggaaattgaataaatgtgttcagtttttc

SEQ ID NO: 237558 - DNA, 488 bp, Homo Sapiens
gaattattctgctgccaaaagtaacacctagtaagattggcatttttttagactgtgaaatgaatgaggtttccttttataatttgaatgatagatctcttctctgtacttttaatgatgattttacaggagaactttggccttatttttatactggaactgactcaaaacctcttaaaatttctacaataacagattctgtattttctttcacctagtagacataactgagccagttaatctagttttggccattctgtattttgtccagtttttctcataaaaaaacaatattttttatctcaatttcagcaacttccaaaaaatgtgattatgggacctactttataataaattatggggtcaatgacaaagtactttagaaattctacggtaaaatacttgaaaaatatattactgaaggaacgtattatgtaagaaaatctattacttttgtaattgccaataaaagcccaatttttttctca

SEQ ID NO: 237559 - DNA, 480 bp, Homo Sapiens
ccctggagcatcactaagaagcagctaggaactatggcttgccagacagattatgcttgtgccagagaagtggagaagcctgaaatcccttgtcaagtattccacaggaaggaaaggtagtctttgggctttggtctactgacctgtggattaaactctatcccttagattatcccatttctaaatacatttattcaatcagtatttctataatcacttagcatttgataggcttcttccttgatacatttaacataacgcctcagttgcatattacattatggaagaatatacgattgcttcatataacaacattctcatcaccagtgacagtgtcctactggtttgaagaaagatattcttggattatgtgttttatatctaaatggttattctgagactggttgtattttcttctcctactcgtgaaacgatgtgaacaagcattttaaggacaataaaaagttagctggttgaaaa

SEQ ID NO: 237560 - DNA, 445 bp, Homo Sapiens
gattttaaagaattaactactattttctttcatgtcagaatcaggcagtctccttaggaggtgttctaacatgggcaagtggaaatcagtgggcctgctattaaatgtggaatatgattctaatctctgttccagtttccttcttaggtttggtgagatgagctgctcagcagtctgtgctctgtgtttcaataccatccactatgcaattagtattcttaagacatcacttacccaatttaagagtttaatttcaatttcttgctaataaactcacaaggtggttctttccagttaggaaatataaaaccctaattaagaagttgtgagctggaattagtggcatgtgcctgtaagtcccagctacttaggctgtggcaggaggattgcttgagccgaggcgtttgaatctagcctaggcaacatagcaagatcctgtctcttt

SEQ ID NO: 237561 - DNA, 453 bp, Homo Sapiens
cttcagcccagcaaggtttaatcaaaatgcaatgctttgcaagtctttactgcttggaggtggctgagttgggggccctaggcaggggtaagctggcaggcagtgccatggcaggccagggtcccctcccatggggtctggcccccgttccagcatgtccagcccctgaagttggagtggggggcggtctgcctttgctgccactgccaggcctctgccctgcagctgaaacttggccatcacatcaacagaaaacccctcccagtgccagctgcccagcgtgggcaggccctggggacaatacaggtccacctgaggggctgcagggtgacacccagcagccgctgccccctcactgcccacccagcgagggcagcctacccgagcctgccccctgccaggtgtgtgccctgaggctggcggctggatgcgtggccaataaaaagcagacct

SEQ ID NO: 237562 - DNA, 406 bp, Homo Sapiens
cagaatagagagtctagcaaaagatctcagtatatttcagacttagtaatttgttaaagttagtacagatattttatctgaaaccttagggccagaagcctcagaattaatttttcagcttcagaaaaccaatatgcaaggctgggggcagtggctcacacctgcaatcccagcactttgggaggcttaggtgggattgcttgagcccaggagttcctgaccatagtgagatctcgtctctacaaaaaataaaaaattagccaagcatggtggtgagtgcctatagtcccagctactcaagaggctagcatgggaagatcacttgagcccaggagtttgaggctgcagtgagccgtgatcacacaatggcagtgcagcctgggcaacagagtgagactcctatctc

SEQ ID NO: 237563 - DNA, 609 bp, Homo Sapiens
ggctctaggaatagcctgtgagccagccctggactgccctggacttgttctcagaggtatcaggaaaggctttctgttttgatctggagctgtaagggtcacataatcatgggactgccggtggccatcttttcctactacctagagaaagccagcaaagaatgaaggcaacaaaggaaacagccaagagaatcaaagatctagtaacactgtttagatgtctcaattatgtgagacagattcctgttgttaatttgattaaggccggtttgtgttggttttctgacttacaattgaaagagttctgtccaaaaagccaaaaggtggccaggcttggtggctcaggcctgtaatcccagcactttgggaagcccaggcaggcagatcacttgaggtcaggagttcaagaccagcctggccaacctggtgaaaccctgtctctactaaaaatgcaaaaactagccgggcatggtggcgcacacctgtaatcctagctactcgggaggctgaggcaggagaattgcttgaacccaggaggcggaggtagtggtgagcaaagatcgtaccgctgcactccagcctgggtgatagagcaagaccctatctcaa

SEQ ID NO: 237564 - DNA, 402 bp, Homo Sapiens
  misc_feature (118)..(118): n is a, c, g, or t
cgatgggtgcatcctccacgatgacctgctaacaaaggtgcatggatttcagagtctgattggcctacaacagcatttggcttgtggagacagtggttccctgatgaaaaactgcatngatatcagtgcttgagatattttgcagaccctgcacttgatggatcagctggcaccacccagactgattaactggctcatgtgatcttgtggtccccacccaggaacttaatcagcacaaggagacagcttcaactccctatgatttcatccctgaccaatcagcactcctgggctcactggcttccccctacccaccaagttgtccttaaaaagtctgctccccaaatgctcgggtagactgatttgggtaataataaaactccggtctcccacacagccaaa

SEQ ID NO: 237565 - DNA, 569 bp, Homo Sapiens; identical to SEQ ID NO: 7760

SEQ ID NO: 237566 - DNA, 476 bp, Homo Sapiens
atatttacaagggaactgttttacgtgaagttctgtatgttgtcttttcacctgtggattgtaatcaggcccaaggaatatcctggagtggtccccagaagcatccaagaaaagatatttggggacgtagcctaacattttaccaacttacgtaaatcaaaaaagtcattattgttgcaggagtttgcatcaaatagcagtgcatcgctgaagcttttggagacttttggatggaagataagatagggaagattaagttccagcatttctgacttgttattttgagttactctgctactcttaggctgcatagtttatgagaaaatgaacacatgcatttatggatccagtatcatgcagtgctgccctcatcctccagcagtgcaatttcttcagtaatttagatttttttcactatagcatgaaatatattcaaatacataccttattttatgcaataaattgtttaaaaagca

SEQ ID NO: 237567 - DNA, 423 bp, Homo Sapiens
attattgctcgctttacgcaactccaaattgctttcctatttaaatgaatgttcttctagtaaactggtgttagatttaaagaaatcactcaagcttcaccttggtaaactgaactcagtttaagattaagaaactgatttcggccgggtgcggtggctcacgcctgtaattccagcactttgggaggcccgggcgggcggatcacctgaggtcaggagttcaagaccagcctgactaatatggtgaaaccccgtttctactaaaaatacaaaaaaattagccgggtgtcgtggcttgtgcctgtagtcccagctactccggagtctgagacaggaaaattgcttgaacccgggaggcggaggttgcagtatgccgagatcgctgcacttcagcctgggcgacagagcgagactccgtaaaaa

SEQ ID NO: 237568 - DNA, 474 bp, Homo Sapiens
  misc_feature (38)..(38): n is a, c, g, or t
gtcactcggcactgagaatactggtgtccagttcccgncggtgtgctgggtcagcaccacacgcacctggttttattattcatgcctctttaaatagcatggaggtgaggctggctgcttctgtagtgttgcatgaggcttttgagataaatgattttcaatcaacagaatcaatagcagctgtgctcagtacctcgcgcttgtgtacgggtttgcgactgaaaagctcacagcctgtgggtgcttgttgctgcttttccaccagtttgatttgaagaaataaaagcagtcacagaggaaaggtaaaagagttggaaattgtttcagattggacagaaccttcccttggcggttgtattcatctgttcttatgctgctgataaagacctacatgagactgagcaattcgtctcttctcacgctgctgattcgtctgttctcacactgctgattaagacatacctgagactgagt

SEQ ID NO: 237569 - DNA, 403 bp, Homo Sapiens
ctttggtgttcactgcctttgtaaaacaagtaaataaagtaagcggaagatatctcttttgtttctgtagttgttaactgttctggattttctttacaatgcatccatttgggcataatgttatccctctttttatcaggtaaatgtagcatctaaaagtagctttggatcaaatcatgttgaatacctggtcaaagtaatgttttcttccttgttcttgcagagaaacaaattcatcagaacattaccacttgaccaggtttaaaattgtataacaggctgggcatggtggctcatgcctatagtcccagcactttgggaggccgaggcaggaggatcacttgagcccaggggtttgagagcagcctgggcaacatagcaagaccctgtctcccaaaaatta

SEQ ID NO: 237570 - DNA, 464 bp, Homo Sapiens
ccttttttccattcttcgccttaaaaaaaaaatctacttccctaccttcatgtatctttcctaatcatgatattgaattaaagcacacttaaagtacattgctcatttatgtctttaattctcatagaatttatttttgaatacagtatggcattaggattctaactttttaaatagataattaaccagagcactatttcttaatatgccattgttttcttcttcatttgtagtgacaataatgattattattgagagcttgctatgggcaaagcagtgttttgagaggtttgcctgtatttaaattcctggttgtgtttcttgaataaaggtcttcctcattttggccaggcacagtagctcgtgcctgtaatcccagcactttgaaaatgccaaggcagaaggatcacttgaggccaggagcttgagaacagccttggcaaggtagcaagaccccggtctct

SEQ ID NO: 237571 - DNA, 440 bp, Homo Sapiens
aatgaacattagtcttatttttctcccagaaatgtcagagggtgttacagtgctacacgagatgactcctgcaagttgcttgctagatagagttgcagttcatgtgaattgctttcagccaggttgggtatccaagctcaatgttctggtgttaagccatagggaagtgttgccatgagaccagcttcttggcaagtagccctgaggtgcagctgtaaggtgacccagtgcagtcctgaggccagagccctgtgctcagtgccagaaaacttgagccaaactttggaactaattcccagggcactgaaattggtctcaattaaaattttagatgaaaagggtttttgtttgtcctgaagaaccacttcaatttataaactcatagagaaagtagatattttgccggtgtacttggaatacctttcagaagccaaaccctt

SEQ ID NO: 237572 - DNA, 465 bp, Homo Sapiens
cacatacatatatgtaatatataattttagtatatttaaattaatccatattttcaagaacttcattaacttgaacactcagaaataccctgagtgttttaagacataattgcaaataactcatgtaatgcgtatatttttatatctttgcatgtatgaagtttatacattcaggcttgtgcaaatgtgtttatatcatttgcctaagcccttgattatttacatgttcctatgtgggatcacagtccttcagatatgaatcatagcacagtgatttctttacatattcgtattctactattgagatactttaagaatcctgtgagttgtgtacctggaaatataaaattgatattattattaatccattcagaaatcatattgggcaatagcactactacatgtacatttagtagcaaacatagatagaatatttggagataatgaagatttcaatactgtgtt

SEQ ID NO: 237573 - DNA, 499 bp, Homo Sapiens
atgatctcacagcgtgatgacgaaagtaactcagggggccagatgcagtggcttatgcctgtaattccaataactcaggagactgaggcgcgaggatcgcttgagcccgggagtttgaggctgcagtgagctatgattgcatcactgcactccagccggggtgaaagagcaagaccctttctctaaaaagtaaaaaagaaagaaagtaactcagggccagacacagtggctcatgcttgtgatcccagtactttgggaggctgaggtaggaggatcgcttgagcccaggagttccagaccagtcttggcaacatagggaggcccccacctctacaaaatatttaaaaattagccatgtgtagtggtgcatgcctgcattgccagctactcaggaggctgagttgggggaggattgcttaagcccgggaggttaaggccgtagtgtgccttgactgtgccactgcaccccaaccggggcgacagagcaaaacacggtctc

SEQ ID NO: 237574 - DNA, 381 bp, Homo Sapiens
ggccttgtcccacaggaggcccccaaacccagatgcctacgttgagtagtctgtctggtccatcaccacccttagggtgggggctaaagaggcaggtgggagacagtccggggcccctcactttgaactgataacagccacctcatcccacagattctcaggtgaaaaatactcattagccataataagcagcttgatcatccgacacagccttgtcccaaataaattaaattcctttaccttgagacagtcgccccgaaaccagactaaccacctttcccaacaggacgctgctttcaaaaactaaaccaccccccactaaaaaaataaaaacacacaccccagagccagacacacaaagatctttgcagagaacaaaaa

SEQ ID NO: 237575 - DNA, 291 bp, Homo Sapiens
ctgttggggtgaacaaatgagatttattctcattcatttgttcattcatgcattcacaaaatatttagtaatcacctactagtctagttgctaagggtacagtagtgaacaatctgtgccctcagaacattctagtaaagaaatagacaataagtatataaaatataaatagtccccaattaacaatggttcagcttgcaatttttaacttcatgatgggtattacatgcatttttcacttaacgatattttctttttcttttttgagacagagtgagattccatctccat

SEQ ID NO: 237576 - DNA, 430 bp, Homo Sapiens
ttttatgagaggagagtaataagttattagtgactgattatgtgatgggaatagtgcaggggaaatggttgccactttctctactgaatggcaatagctgttttatagcagagattgatgaaaaataggcttatttttgaaattgaagaggtaacagttattagagtggagagcttggtcagaaaaaccagaataccatggttttttttgttttgttttgtttttagtagaattcacactaattgctggaattacattttgctacagttttattaagaatgtgtcacagacataatgttttgctaaaaaaaattcaacgttttcttataactataaacaaatcacattctttgtaccaacatcattttatcctacctcagtaggatacttcatagcagataataacaatacactcagtcttttaggttgg

SEQ ID NO: 237577 - DNA, 469 bp, Homo Sapiens
gcaggaagggagagcagaggaaacagaagttgcttaggagggagttgggcaggctctgtccccagcagatccaagggtccctgacaaagagaacacctcacctccgcccctccccagaggcacacagaatgccccctcccaccacctccaggctgttaattcacacccacccaggctgcccccaggctccccagacctgtgccagtcaagcctggcctgtggctgtgacacctgcattaccccagacggttgcctgacctaggcctgtccttctatctgctttgtttttatgttgattactaggtgaagcacagtgttaaacgggaagaaaaggctaggaatgcagttatgggagtgtgaggctgggttggaataggtgggagaaagtccagggctgagtgtgtggaccctgctctagggatctgaccggctcaagctcccaggccattaaacaaagttgttaatgtca

SEQ ID NO: 237578 - DNA, 684 bp, Homo Sapiens
  misc_feature (17)..(17): n is a, c, g, or t
  misc_feature (24)..(24): n is a, c, g, or t
  misc_feature (49)..(50): n is a, c, g, or t
  misc_feature (62)..(62): n is a, c, g, or t
  misc_feature (64)..(64): n is a, c, g, or t
  misc_feature (153)..(153): n is a, c, g, or t
  misc_feature (299)..(299): n is a, c, g, or t
  misc_feature (345)..(345): n is a, c, g, or t
  misc_feature (378)..(378): n is a, c, g, or t
  misc_feature (390)..(390): n is a, c, g, or t
  misc_feature (405)..(405): n is a, c, g, or t
ataaccgttcccctctnacccctntaagagatgaaattctttcagtctnntagtatcttccntncaaagtgggcatttgccagtctaccctaagagactctccccatgagtcaagactttggggctctaagatccacttgaaatcacgtcccncatagtttaatagattctgctgatacggccattagatactcagctggtaataataatttgtttctgtaactcccccccttccacagtttaagaaagactggccatcagctgtttctcaatgcatcagtcacttgttcgcagatcanaacagaagacatgtgattgcatgaatcggcaggatttacttcctgnttacagagtgagatcctttctgtaattctcctnaacactgcatcntggtccatactactnttaaccttttaataagaccccttcttatcctggaagtggcttcttaaaacagtcttgtttgttcatcagggacccacggacaatgtcagtgtgttcttcctccctgttttgccgttttcctggaaggccagatcccatgatagagataactaaaatgactttttctggatctttttccgtttcccaaaaatctgtggtcctgctgcatccattttactattttctcatcaattctgcgtttttcttctaggaaccttactttcctaaggtgtgaaatca

SEQ ID NO: 237579 - DNA, 372 bp, Homo Sapiens
cagcattctatattctctcttctatatcttacctatttctgtgaataatttattttggacagcattttatgtatgaatattcacaaatgtgcttccttatttcagaggctgaactaataaaaattttgtttatttttgtgttgaggcaatatttttatatggtaccctaatctttaatacttaacctgccagactttaaccgtaacacaataatgtattgccaaatagcaccattcttcttctctcactctcttgccatgggggctcttaaaaaaaaaagtatacatctaaggtgtacaacatgctgttttgatgtatataaatatagtgaaagcaaataaagtatatatctaaggtgtacaaaaaaaaaaa

SEQ ID NO: 237580 - DNA, 418 bp, Homo Sapiens
tttcttaaggtggctacgtttaggacatgagccagggttgccagtgtcacccatcacatgtaccatatgaataactcttgtctaagatctggcaagagatggtggagcctaatgacattgttaaagatcctggatacagccatacctgaagcgtatccagaattccggctgagtatctgtactagtcaatgttctccaaataatatacacaggcataactcagagatactgtaggtttggttgcaggccacctcaataaaacaaatattgcaataaagtgggtcataggaatttttgatttcccagtgcacgtaaaagttacactatagtgtattaagtgtgcaataccattacatctaaaaacccctgtacataccttaattaaaaatactttattgctaaaaaaaaaaaaaaaaaa

SEQ ID NO: 237581 - DNA, 491 bp, Homo Sapiens
acaggcatgagccaccgtgtccagccttgcaaaccttcttaatagaggcaggcagagagctgagaaaaactatggtaagaatgagtcattgagttcctttctgcttgttatctgttgagcaaattgatatcacatgaatagaaaagctagcttggaagtagaatgatcttttttattttttgacacattcccagtaccatcagtgtctttatggctgttccaggctacattaatgttcaattctatattctctataaatcataactcacctttgtctcatttttaccagttttattttcttgtcattggagaatttctggtattgtggtaatagagtaaatgaattcttaagtgttgaaggtttaacactacaaaggtatgtcaagtcaggttgtttctcaggttcttttttgggaggttatacttcatggtagaggataaggctcaaacgggaaattgtgacattttaataaattttaattttaataaaa

SEQ ID NO: 237582 - DNA, 496 bp, Homo Sapiens
cagagtttatcacaggtacaaaattaggcggtatgactgtgcatgttctctagctgatgttgaaacttgtactgtcttgatcatttaaaactatgtttttgtaaatatcaggtttagtccgctttcgggaatatctgcatgctatggaaagagagaaaaaaaggatagataatgaggaatttggtttaaaagtgtgataaaaatccttggcattctttgttctgatattaattgtatttaaataagtcaacccaatgtaactcattccagatcttagtccagctgccctgttcagcctgatgccttttaaaggtttaaaggtgttaatgttttccttttcaacatggcaaacattttttaaaacctttttggcacaatggtgccactgtcctcatagtgttatttctttggtcatgaattttcaggcccttccagtaagaggagaaaggcacttaactggttaacagccccattattatacattgctctaaggaaa

SEQ ID NO: 237583 - DNA, 488 bp, Homo Sapiens
tgtttccaacaagttctctctccttatgttttaagaatcccaactatctcagtaaattgaaataagggtattagcagttttctaattagtaacacaaatctgtctaaacaagaggacatcctagtacacaaaataatgtccctgtttcacaccagtctagaccaaaaaaaaataaaattgaaatgttcagagtcaaaaaggaacttctgaagataaattaattcatccctaaaaattaaagtgtgttcaaaatagaaaaactattgtcaaaatcatttcatagtttaattgcaacacgtcactaacagatggtgattcttctcttggaaagattcaagtaaaaactttgatacaaaagcaaggtaaaacgcacagggttcccttatgtagatgtacacatagcattgcatatagagattaaattattatacttgtcgttaagttctttattaatttttaaataaaaaaatcaaagatgaaaaaaaaaa

SEQ ID NO: 237584 - DNA, 477 bp, Homo Sapiens
tgagcagcggaattcggaattctcagttcaccctcgagcgtcttaacgtgggcctggacgcctgtctgacgccctccagaggctggaagcagcaggaagagcccaggactgtggccttgagcagcccggagggcccaggaccaggctgcctcagcctctgaggtcccatcgtggcgggctgtggggcgttggtcggataggcagggcaggcacagaacagaccaggtgtccgcctctggccccgtggccttgctgagctctgtgtggagccaggcagcagaagaagcccctctgagtgaggggctgcggctcctccttgcggcagtgtggcctgctctttggttttccactggagttcacagctacctccttggctgaggtcaagggagccacgtgtgcagtgttctgtgtgaagtgtgccgtgtacagacccgttctcctctgtaacattcaggaaataaaactctttgctgtaaa

SEQ ID NO: 237585 - DNA, 729 bp, Homo Sapiens
  misc_feature (59)..(59): n is a, c, g, or t
  misc_feature (188)..(188): n is a, c, g, or t
gaagaagagaaatggagtcacatgcaaacttttctacaaagtatgtcatcacaagacanagtcattgtcttcgtttctcgaaaagctgtgcgggatcacttatcaggtgacctaatccttggaaatatatcagtagagtctctgcatggagatagagaacagagagatcgggagaaagcattagaganctttaaaacaggcaaagtgagaatactaattgcaactgatctagcctctagaggacttgatgtccatgacgttacacatgtctataattttgactttccacggaatattgaagaatacgtacaccgaatagggcgcacgggaagagcagggaggactggtgtttccattacaactttgactagaaatgattggagggttgcctctgaattgattaatattctggaaagagcaaatcagagtattccagaggagcttgtatcaatggctgagaggtttgaggcacatcaacggaaaagggaaatggaaagaaaaatggaaagacctcaaggaaggcccaagaagtttcattaatgtcttctgtactagtggggtagagaattcaagattttttagaaatatagtaagacagaagtattggacatgttggcagtatgaagagaccggactgatttgactgattcttaaaataatagtgtttgaaaatatagaatccagtgttttatactttctttaataaaaatagaagtatttaaacttaaa

SEQ ID NO: 237586 - DNA, 479 bp, Homo Sapiens
tgggctccaaagatcctcctacctcagcctccagagctgggggtctacaggcacgtaccaccatgcccagctactattcttattattcccaaatgccaccccaccatatttctaaaaactcccaaagaaagattctactttgcccagtttgtcctcaattgagcagttttgtctaagcccagagtttctgctgggccagagtatggatgagctgtctctccctggctggtgcccatgcctgcctgtagcctgggagggggagtggcgcccagggtcaggtggaacaaaacatgactgcctagggctgcctctgtctccatctcactgatcgcaaatcacagctcagacagccagctcttaagtgagacctgagtgccagagaggggtggatacaaggccaacagttactaaatgaatgaaaattgtgattccgatgaagcctgccagagaaataaagcattttttaaaagatggaaaaa

SEQ ID NO: 237587 - DNA, 492 bp, Homo Sapiens
ctatcacctaatctcagcctttcaacttcatcatctccatctccagctctcacaccactcttcaggaccaaattttctctcccttctacgctaactgtccccagaagtggcctctgcctctagtctggcctccctccaggcccccctctccaaagctgcccggcaccacctctgcagaaattctgcagttcattcaccaaaaagaaacacatgtggctcttaagcaaatgaaaaggtgaccagcctcacgcatcgtaagagaaacgcaaactctaactacacccaaattcctttgttttgtttagtttttgcctttcagatggacaaaaatcaaaataggtggaaaccaggggctggtgagcctgaggagaaacagccctgttgactgtgtgggggcctggtacctggcacagtctccaagaaggacaagctgacagagctgacaaaatgaccactgcactccaccctgggaatcagagcgggactctgtct

SEQ ID NO: 237588 - DNA, 463 bp, Homo Sapiens
gccacactgttgactatacacttagtatttatatgtgtattttatttctctaaaaaaagtcaggaccagtttatagcattgcagctatctgttctttgaagatttggcagaatttttctatgaaaccacctgggattggtacttttttgtggtgtagttcctggataagtttttctttttttcttctagggaaatcagtcttttttaaaccttttatctaacagggtcaattttggtaaacccttttttcttataaaattatcaatttcatctaacttttcaatttatttgcacagaggtctggaaagtaagatctgggcacagagccatgtgcctgtagtcccagctactcagaaggctgaggcaggaggataactggggcccaggagtgcagggctgcagtgagctgtgattgtaccactgcactccagcctgagcaacagagcaagaccatgtctcttaa

SEQ ID NO: 237589 - DNA, 456 bp, Homo Sapiens
catcacctggccctggcatgggactttggggcccagaatgttggcctgaggtctcagagcctgatctgccagccagaggtggtgctagaggcccaggaaagacacttcgtcctttaaatatctttgtgagcgctgctgtgtgagaaccatgcttggcacttggcttctggcggaggaaacacccaaagctggcagctaaagcccacagcccatgcacggaaaggcaggaccccagggcgatgagcggatgcacatgcacgcgggccactgcagaagagcacggggccaggctgggctccgagatgtgcctgaggtcccagctactcgggaggatcacttgggcctgggagttcaaggctgcagtgagctgtgatcacatcactgcactccagctttggtgacaatgttttgttttgttttttccttttgtttttttttacttctgagaccctgttt

SEQ ID NO: 237590 - DNA, 300 bp, Homo Sapiens
  misc_feature (126)..(126): n is a, c, g, or t
tctttgagcaagtgagttatggcaagagaaactcagcctctttctgtataaacttaacagggaagggctggggtgtgaaaaagaagattgtatgaaaaccattggtaatttttattttttattttngggactgcactatcctgttcacgaagacatgtgaacttggttcagtccaaatggggatttgtataaaccagtgctctccattagaaatatggtgcaagccacatatgtaattttaaatattctagtagccacattaataaagtaaaaagaaacaaaaaaaaaaaaaaaaaaaaa

SEQ ID NO: 237591 - DNA, 401 bp, Homo Sapiens
  misc_feature (7)..(7): n is a, c, g, or t
  misc_feature (193)..(193): n is a, c, g, or t
agcaagntaaagcatggcggccatcccctccaggggctcgctcgtggccacccacgactactaccggcgccgcctgggttccacttccagcaacagctcctgcagcagtaccgagtgccccggggaagccattccccaccccccaggtctccccaaggctgacccgggtcattggtgggccagcttctttttngggaagtccacctcccaccccccaccctgtaaactaggcggctgcagcaagcagaccttcgcatcaacacagcagacaccaaaaaccagtgagagccccgctctctaccgcccggccccagcactcgctagctttcctgacacctggaactgtgcacctggcaccaagcggaaaataaactccaagcagccagtaaaaaaaaaaaaaa

SEQ ID NO: 237592 - DNA, 567 bp, Homo Sapiens
agccaagaaaatcaatctaaacatttgtgggaagttgtattcatcaataatgaaatgctgactaaggaacaagatgtcatcagcctcaggagagagtggtatgtaccttgaaataactcaccgagacacaaacttgctgacttcttgtcctccatctcagagaagatatggaagatatgaaggatggagaaaaagaggaagaggaaatgtgatggtggagtgggtaacataaaaaagggaaggcaaataagtgtatgtgttttcagcggcttctcactttcttttggcccatcaaggaaaccaacacatccgaggagagtgctgataggctgctcttagccgggaccacacttgtgctttgaaaacaacccccaaaatccctgcaggcaattgaaggatgtcccgagaacatcctcccagggagcagatacccattctgtagaagctctaagcctgctgggctaagccctccataggccactttaatgaggaggagaggctgtaggtggtggtaggaccaccatgttgcatgacttttctgtgtgccccgtcttttgactctgtctc

SEQ ID NO: 237593 - DNA, 484 bp, Homo Sapiens
aaaggcacccctgtcctttctgtcccctccacaatgagccaagccagcctccactcttgccccaggcctgccctctgctgggagccgggacactgagctcctgccacatgagcaggttgacctgcagggggcctccaagcaggtgccaaggcagaatcggatgtgaccaggagaacacccttgaaggataaagcgaatgtgcgaccaccatgcaggtctggcccatggaagggagggaagggggccccggcggggccacagtaaaggagtggaggggccccacaggcagggatggcccagctggccccctggggctgtgaatctgcaggtgcagtgcagcctcttgcctctctcagcccagcccttgcatctgcctcttggtgtgtctgtgaagacaaagtcaccgtggtccctgcagcacctggcttgaagcaggtgtgcagtccgtgtgaaagccttccctttagctattaggtattgagtc

SEQ ID NO: 237594 - DNA, 470 bp, Homo Sapiens
gagagatttaaaacatttagcatataatagcagttgaaaattaaagaaaatttttagagttttttgtggtttggaaaactttcagtaatacttttatgttacatggcattttaatatatcaatttagctataactttggaaactaaaattttaagtttttgctctggaaggagcagtatcgtttctttccagaaattctggtgggtaacttgataatttgacactagaaataatgggacaagaaaaacagcctggtttgacagagaggcccattttaacttttgttggtattcactagggtttctcacataagtacatgtgataacttttaaaatgtccaatactggaaaaagcagttttgagagctttaaagtgttagctctcacttaaatatcctgaaatatcctcctgagatggcttgctaattcctagagtagttccctgcctcacactctgtcaatttgggaaat

SEQ ID NO: 237595 - DNA, 469 bp, Homo Sapiens
caacccctgcccttgcccaatgactgtgcaaccgctggcaccgagtgccacgtctcaggctggggcatcccaaccaccccggaacccattcccggatctgctccagtgcctcaacctctccatcgtctcccatgccacctgccatggtgtgtatcccgggagaatcacgagcaacatggtgtgtgcaggcggcgtcccggggcaggatgcctgccagggtgattctgggggccccctggtgtgtgggggagtccttcaaggtctggtgtcctgggggtctgtggggccctgtggacaagatggcatccctggagtctacacctatatttgcaactccactcttgttggcctgggaacttcttggaactttaactcctgccagcccttttaagacccacgagcggggtgagagaagtgtgcaatagtctggaataaatataaatgaaggaggggcaaaaaaaaaaaaaaa

SEQ ID NO: 237596 - DNA, 457 bp, Homo Sapiens
ttttcctttctatacgtgtggtgatgtccaccatctctacatatcaaatctgtaaatcagaaattcagtcaacaagtattcagaatttccagatgtgctgagttttagtaatttaaaatataataaaggcttctgagtttttaatgaattttcgttgtttctaagacaaatgatatttccttcatattttttgaagttttgaatttttatctatttttttcaggtgtttaaacacaggtatgagatatacaggatctcagaaattacttttgaagttcattaaactatttgattgtactttttttcttttgagacagggcctagctttgtcttccagactggagtgtggtggtgtgatcatggctcattgcaacctcgacctcctgaactcaagcaatcctccctcctcagtctcctgaatagctgggactataggcgcaccctatcatgcccagct

SEQ ID NO: 237597 - DNA, 569 bp, Homo Sapiens
gctgaccacgccacgccgattgcaccgcccatccagcctgtcctttggccaccccacccctccgagcatggtcaccgccatgggttagagccctgctcgatgctcacagggcccccagcgagagtccctgcagtccctttcgacttgcatttttgcaggagcagtatcatgaagcctaaacgcgatggatatatgtttttgaaggcagaaagcaaaattatgtttgccactttgcaaaggagctcactgtggtgtctgtgttccaaccactgaatctggaccccatctgtgaataagccattctgactcatatcccctatttaacagggtctctagtgctgtgaaaaaaaaaaaatgctgaacattgcatataacttatattgtaagaaatactgtacaatgactttattgcatctgggtagctgtaaggcatgaaggatgccaagaagtttaaggaatatgggagaaatagtgtggaaattaagaagaaactaggtctgatattcaaatggacaaactgccagttttgtttcctttcactggccacagttgtttgatgcattaaaaga

SEQ ID NO: 237598 - DNA, 484 bp, Homo Sapiens
cagaaaatagaagaatgtgtgtacagttggaaggtctcagagaaaaggagtctgttggacagaatgaccagtctgtgactactgccatttttcatgaccatatatcaacccacattacagatgtaacttagtgagagaaaacatctccctgttttccttcatatattatgaaatatttactttttctagtattttgtctatcttacgtcaaagatttaaatatctttgacctcctgtactaaataccacgccacatcagttttagttgcctttcttttttccttaggctagttttttggtataccatttctaaaccaatggtaggaacattttaaggcatcttttgtctggaatatgttttagcatgtacagcatgaaagttttatatgtttattaatttttgtttataattgttaatgaatattaattttgttaatgaatatatattaaaccaattaataaacagtcacaaagctgcaaaaaa

SEQ ID NO: 237599 - DNA, 500 bp, Homo Sapiens
caaaatgttataatgcatgttttgcaagtgctttatgcaaatgcttagagcaatcagtgtggttttcttacccctgtcaaccacctctggttttctttcctcttttactgttttcttataaaagagaccttgagtatgcttctctcttctgaattgtattttgggtcttttatctccatataactctttatagtttgtattttgctgagaactttgatgtctggaacctacagttgatccttttttgtggagagcaagaaaaatctggatgtgctggtcaaggaatcctctgagaattatggacactgggggaggaaagtgtatgtcagggaggagaactagaaggagaatgtattattcacaggaagcctaagatgaaaaatattggcaaaagagattgggaaataggtagttatggaattcctaataactagggaatctgacctaagacctttgtttttttcatgagtgtagtggaatttaaactgtgcatgttatac

SEQ ID NO: 237600 - DNA, 782 bp, Homo Sapiens
  misc_feature (36)..(36): n is a, c, g, or t
  misc_feature (66)..(66): n is a, c, g, or t
  misc_feature (162)..(162): n is a, c, g, or t
gggcacccgctgtgcatggagccagagtgcagagcnccagatccttagtaatgcttcccctggtcntgcaacaggcccggtcacctcggccgggcccggggctgaggtcagcctcactgcctgcttattgcctctttctcagaatcctctttcctccccatntggccctgggctcaggggaccaggtggggcgggtggggagctgtccggtgctaccacaccgtgccctcagtggactaaccacagcagcagccagggatgggccctggaggttcccggccggagagtgcctctcccctctgccatccacgtcaggtctttggtggggggaccccaaagccattctgggaagggctccagaagaaggtccagcctaggccccctgcaaggctggcagcccccacccccaccccccaggccgccttgagaagcacagtttaactcactgcgggctcctgagcctgcttctgcctgctttccacctccccagtccctttctctggccctgtccatgtgactttggcccttggttttctttccagattggaggtttccaagaggccccccaccgtggaagtaaccaagggcgcttccttgtgggcagctgcaggccccatgcctctcctccctctctggcagggccccatcctgggcagaggggcctggggctgggcccagagtccagccgtccagctgctcctttcccagtttgatttcaataaatctgtccactccccttttgtgggggtgaacgttttaacagcaaaaaataaaaaaaaaaa

SEQ ID NO: 237601 - DNA, 787 bp, Homo Sapiens
tacagagcgccccagctgcatgcttcacctgccagttgcagagctgtggacccccagccccccagaagttgccgcgtccaggattgcattctgtgccaggagaactgcgtgcgctcctgtgcgacggcactcctgtggtctacatcttccagctggacgcccgcagacagcagttggtgtacaggcagcagctggcgttccagcaccaagtgtgggacgtggctttcgaggagacccaggggctgtgggtgctccaggactgccaggaagcccccctggtgctctacaggcctgtgggcgaccagtggcagtctgttcctgagagcaccgtgttaaagaaagtctctggtgttcttcgtgggaactgggccatgctggaaggctctgccggcgcagacgccagcttcagcagtctctacaaggccacgttcgacaacgtgacctcctacctgaagaagaaagaggagagactgcagcagcagctagagaagaagcagcggcgccggagtcccccgcctgggcccgacgggcatgccaagaagatgagaccgggggaggcgacgctaagttgctgatcgtggcggtctgtttctgtcgactgtggaccacttatgtgcgatccgtggaccacttgcgtgcgatctgtcggccgacgatgagcttgttcggatgtagctccatcgtaagtcgaggagcatctgtgatttgtcctctgcttatgggatatgtttttccgctactgagtctgtgtagtaaatttttgactaggaaaaaaaaaaaaaaaaaa

SEQ ID NO: 237602 - DNA, 762 bp, Homo Sapiens
aaatgcagctgcaagccattcgaataattcaagagagaaatgtgtatttacctgactgcttaaccgatggctctgatgtggtcagtgaccttgaacacgaagagatgaaaatcctgagggaagttcttagaaaatcaaaagaggaatatgaccaggaagaagaaaggaagaggaaaaaacagttatcagaggctaaaacagaagagcccacagtgcattccagtgaagctgcaataatgaataattcccaaggggatggtgaacattttgcacacccaccctcagaagttaaaatgcattttgctaatcagtcaatagaacctttgggaagaaaagtggaaaggtctgaaacttcctccctcccacaaaaaggcctgaagattcctggcttagagcatgcgagcattgaaggaccaatagcaaacttatcagtacttggaacagaagaacttcggcaacgagaacactatctcaagcagaagagagataagttgatgtccatgagaaaggatatgaggactaaacagatacaaaatatggagcagaaaggaaaacccactggggaggtagaggaaatgacagagaaaccagaaatgacagcagaggagaagcaaacattactaaagaggagattgcttgcagagaaactcaaagaagaagttattaataagtaataattaagaacaatttaacaaaatggaagttcaaattgtcttaaaaataaattatttagtccttacactgaaaaaaaaaaaaaaaaaa

SEQ ID NO: 237603 - DNA, 678 bp, Homo Sapiens
aagagaagagctgatgacacatctggagatcgatcaatctggacagatactccagctgatagggaaaggaaagctaaggaaacacaagaagcaaggaagtcatccagtaagaaagatgaagaacatatattatcaggaagagataagagactggctgagcaggtatcttcatacaatgaatcaaaaagatcagaatctcttatggacatacatcataaaaagttaaagagtaaggctgctgaagacaaaaataagcctcaagagagaataccatttgaccgtgataaagatctcaaggttaatcggtttgatgaagctcagaaaaaagccctaataaaaaaatctagagaactaaacaccagattttcacacggcaaaggcaatatgtttttataagtaagtatatttcagtgaggtatattttaatactgatcaatgtgaacttttctaaatactctattgtctttaataattgtgctgaaatctatttccttttataatagattaaaaattttatatttttataagtaaacagtgatttttgaaaagtcagccttgtgggatgaaaaatatgtcttactggaaaaatccctcataataacctaatagggcattgctattaaaaatgctaaaataaaaattcagcttatgagaaatggcaaaaaaaaaaaaaaaaaa

SEQ ID NO: 237604 - DNA, 680 bp, Homo Sapiens
tgtctacatgtgtgacctgcacaccaagataccattcatcaactggccctggagtgatttcttccgaaccctcatagcggcaatcctctacctgatcacctccattgttgtccttgttgagagaggaaaccactccaaaatcgtcgcaggggtactgggcctaatcgctacgtgcctctttggctatgatgcctatgtcaccttccccgttcggcagccaagacatacagcagcccccactgaccccgcagatggcccggtgtaggcgaacttccctcatttctctctgcaatctgcaaataactcctccattgaaataactcctccccaccccaacaacaacattcccagcagaccaactcccaccccctctttgaggtaaaagtgcctttattgggagacttttgtcttccagcctgccaatcaaccctcctgggtgtggccaccatatgtgtgtgcctaggtcctccttctgcacgatccaataggagacaccagttctgactgaaccatgcccccacctaagtcacaaaatgagggaagtggggagttagatttcagagtccaggccctaggttgggacccactccaaataatctcctcggtgtgggtggtggttctatagagggataaatgaataataaacattgttaaaatatacgaaaaaaaaaaaaaaaaaa

SEQ ID NO: 237605 - DNA, 709 bp, Homo Sapiens
  misc_feature (37)..(37): n is a, c, g, or t
tgaagcctgaccgacctccagcagcactcagacgtcnccggaccagccctcagtctcggtccacgctgctttcttcccaaaggacatgtatatttgcagagctccacatacagaaacacattattttgcagaaataggtgtttttaagaagttttactacaggaatgtctacttttgtaagtgacaggtgttaaaggcccaggtgtgctgtgccaaagagctcagcagaggctcacgtggcccaggctggtgcgcccgctgtctcggtaaggggcgggttggtgtgttttccccttgtgtaccagagcacattccttaggggacggctttgggggtcccacgagacatggactaggagtttaagcaggacagtgtgcgtgcacgagctccgagcccagcacagacatgcctggaacccccgccgcctgctgctccctcctagggaacccatttccggggaacgccgtgactgtcgggcagcctggagcttcctgcagcctcctacgcagggtccacgccacgtggcctgggctgccatcctgccgtcctcccactggcatcctggcaagggggcgttgcttttcctgggcggccttttatgtcttggagacacctgatgtaaagtttctgtaaatctatttcatatctgacccacccaaacagatttctctttaataaaaatcctttttgtaaaaaaaaaaaaaaaaaa

SEQ ID NO: 237606 - DNA, 518 bp, Homo Sapiens
ttccccccaccccacaaaggggggctacgcagtcactgacttcctcacctacaactgcctcacgaatgacacagacctgtacagcgactgtctccgaaccttctggacctgcccccactgtggcctgcatgcgcccctcacgcccctggagcgcatcgcccatgagaacacctgcccccaggccccacaggatgggcccccaggggctgaggaagctgccctcgaaaccctccagaagacatctgtcctgcagaggccctaccactgcgaggcctgcgggaaggacttcctctttacacccacagaggtgctgcgccaccggaagcagcacgtgtgagctgggccaggagccctgcccacctccgtgcagctgacctgccctccagcccaggactaggggcaggactcttgcctgaacccccagcctgggcttagccctgtggtcctgtcccagtgcagagggcctggagcacggattgtgaataaagcctcacatgctgataaaaaaaaaaaaaaaa

SEQ ID NO: 237607 - DNA, 735 bp, Homo Sapiens
  misc_feature (67)..(67): n is a, c, g, or t
acgcagagaagtgccatgaaatctcaaggaccccaaccgcccccggttcaccctgcaggagctgcgngacgtgctgcacgagaggaacgagctcaagtccaaggtgttcttgctgcaggaggagctggcttactataagagtgaagaaatggaagaggaaaaccgaataccccaaacccccacccatcgcccacccgaggacgtccccccagccggagtcgggcatcaagcgactgtttagcttcttctcccgagataagaagcgcctggccaacacacagagaaacgtgcacatccaggagtcctttggacagtgggcaaacacccaccgcgatgacggttacacagagcaaggacaggaagccctgcagcatctgtgaccttggcccatctccaccctccaacctggactgcccgccaccagcgcctgcaaccgaactgcagcccaggggtcattgctgcctcaagcctctcggtgcagatgcaccctgaaaactgacccctcaaacagactgtctgatttgaggatggacattgaaaaactgacgccaaactctaaagaaatgtttatttatacccagggctatcactgtttctaatagatgactctgatcccgtaggatatatatttaataatcccacaaacggaggccagacttctgcgttaacttcagtaacacaagcttctttaagccaaatacatcacttgccactaccaaaaaaaaaaaaaaaaaa

SEQ ID NO: 237608 - DNA, 668 bp, Homo Sapiens
  misc_feature (28)..(28): n is a, c, g, or t
  misc_feature (47)..(47): n is a, c, g, or t
ctttctgatttctgtgcactagcacttnaaaccttgcaaatgtcgcntacctaacagtcactgtcaaggagtacctggctaaagaatctccagctagacaaagtagaagtgtctgtgctctggcagttgaatatattgtatcaggctcaacagcacctttcaccaaaggatgagacttcacaaccattagatcttcttttattttgtttttattaaaaaaaaaaattttaacacaccattgctaacttgaagccattagatcttcttacccccaataccacaaaagtttagtggaatcaggggtataccaaggcaggtggagtaggggagctgggagtggtcagcccccagggcaggcaatgagggattgtgaatctgtgaagaattttaaagcaatgatacagctctaaatgcaatgtactatcctggacttagccctggaaaagaaaaaagatattagtggaaaaactggtaaaattcaaataatgtctgtagtttggttaatagtattataccaatgttaatttctgtgttttgataaatgtaccatggttatgtaagctggatgaaagatatgtgggaaatctctctactatttctgcaactctcctgtaaacctaaaaatgtttcaaaataaaagatttaatgctaaaaaaaaaaaaaaaaaa

SEQ ID NO: 237609 - DNA, 705 bp, Homo Sapiens
  misc_feature (15)..(15): n is a, c, g, or t
  misc_feature (29)..(29): n is a, c, g, or t
cacaggcatgatctntgtgctggggcagnccgagggaatactcatcatgctggcaatgacggcactgactgtgcgacgctcggagccgtccttgtccacctgccagcagggggaggatccacttgactggacagtgtctctgctgctgatggccggcctgtgcaccttcttcagctgcatcctggcggtcttcttccacaccccataccggcgcctgcaggccgagtctggggagcccccctccacccgtaacgccgtgggcggcgcagactcagggccgggtgtggaccgagggggagcaggaagggctggggtcctggggcccagcacggcgactccggagtgcacggcgaggggggcctcgctagaggaccccagagggcccgggagcccccacccagcctgccaccgagcgactccccgtgcgcaaggcccagcagccaccgacgcgccctcccgccccggcagactcgcaggcagggtccaagcgtccaggtttattgacccggctgggtctcactcctccttctcctccccgtgggtgatcacgtagctgagcgccttgtagtccaggttgcccgccacatcgatggaggcgaactggaacatctggtccacctgcgggcgggggcgaaagggctccttgcgggctccgggagcgaattacaagcgcgcacctgcagcggcaaaaaaaaaaaaaaaaaa

SEQ ID NO: 237610 - DNA, 613 bp, Homo Sapiens
  misc_feature (12)..(12): n is a, c, g, or t
  misc_feature (21)..(21): n is a, c, g, or t
  misc_feature (165)..(165): n is a, c, g, or t
tcttccctgtantctgcttantagagagaagtttgtgtggtgggacagattttttaaacacactcatacacacacacacatacacacccagtatatatggggcgatgcacaggtaggagctggcagtgcagggaagaggagacactggtctgcagcaacagcttntactaccagcccttggggcactcacccctgtgatcaagcaatcattgtcaatgacaaagtgactattgaagttataattgtattaaattaatgctaataatttggatattttattttatttttggctgctcgggtaactttagcccttaaccaagcatatgtgggtttttttggttgtttttttgtttttgttttttttttctttttcctttttgggtacagctgtaaaatatttggatataggaaatgttgtgttattcttgcagccttgatattcagggtggattgtaaaatataaatttttgtgagatttcaaagattaagattattttgataacattatttacagatttaaaagatgtggttatcacaagtctcgagggggaaactactgcataaaataactaacttggaataaatattttgcatcaaaaaaaaaaaaaaaaaa

SEQ ID NO: 237611 - DNA, 686 bp, Homo Sapiens
ctctgggtctgagtgcctgatcccctgccccccaaaaaagcagaggtagtgttgcaggcccagggcaggggtgcctgccccaggagagtcccaggcagtggttctcgtgccagtggcacccaggggcaaggacagccaacccccacccttgccacgtgtggggccacgtgggcatgtggggtgtgtgtttttaccttggtgaatctcacctgccaacgatttctcgtgagtgccgaccaccttctccgaccatgttacgcccgggcggcagcagcccccggccactgcaaacccatgccctgggtccctcggctcccccagggaggcatccccgtgccaatgtcccccagtggtggcagcagatcctgtggccggcctggcggacgggacccagtgatacttgtatattacacagtcctgatttcagacaatttcaaccttaatctatttaaaaaagaatattctatacaagctgtttttaagccttttaccatttgaaatgcatgtgttgtgcgcgttggggatgggaggaggggctgaggagcggctcagtgtcacctcccacagccaccggccctgacccttaatccagacaccgatggaagtcgacttttcatatctttctcctgaaatgaactctgttttaaattggaataaattttgttcctaaaaaaaaaaaaaaaaaa

SEQ ID NO: 237612 - DNA, 781 bp, Homo Sapiens
  misc_feature (21)..(21): n is a, c, g, or t
tagtcaagtcccaaatgtagntaaagtaatcctttctatgcactaaatctagaaaggagcagaggtgttgcacagtaataaataagtacaacccaagatgtatatatggtggttaaaaaaaaaataaaaccacccacccaaatttaaccctgtgtaaaagccttgagtaaagggattcagcaagactgtggagaaacttgggagaagaaaaaagagctttggaagaggaagaactgagaaatctccagagaaacgtccagagaaatctgtgaagtccacaagtgtggaagggaaagggaagtgtgattaggctgggatacagaaggctaacagtacactttatatgagaagagcttagaggtcaggagagcacaatgctgaggggtttgtttggttttattttcccctctggaaacttggagaaaggaggacaggaaaagatgataagagggcaccattgtttggttttaaaggtccctccccaaccccccacaacaagaaagctcattttaatgagatgagagaaggggagaaagctccctccgttctgatgcttttgagcttatcagggacaccctgcagcagaaattccagctgatccttcagccttcagagttgatgaggtggggctcacacacatctggatttgaagaagaatcgtgggtttcaagaactctgtggtctcttaagcattggtattccacagctacacttccctgatactttgcactcagtaatgacaaaataaatatttgtagaattgaaaaaaaaaaaaaaaaaa

SEQ ID NO: 237613 - DNA, 679 bp, Homo Sapiens
cttgcctgtaagtgggatggataagcctgtgtttacagacccaccggttaagacaaaatttggatatcatattattatggtcgaaggaagaaaataaaatcatatgaaagactgaataagttttatacattttgtttctttaaaaggtattacatattcttttgagctggagctgcaaggaaatacaaaaatttttaaaaagaaaagatattggatgctccttgtattctgtgaaagctctaagtatgggtttgtaggtgtaagagagggtggggctaagtgaatgtcaactgtagtaggtattcagtcagtctttctcaaagagaagtcaagcagactccctttaacctgtattctctttcctcccagaactatatctgactctcagtctgtcccataaattaattcagaaaccatcttcaggggaagcagatatcaactcacactattcacacaactgaaaatattgggcatcaaatagattagtgtgtgagaatcataaaataagttcctagacaacatttgttttacatgttagtcaactctgatcttccaggacaggtggtattagctccactgtcttaacatagtacgtggcacgttatgcctttcagtgttaactcctttctttttaaataaatgtttattggaggaaaaaagcaaaaaaaaaaaaaaaaaa

SEQ ID NO: 237614 - DNA, 708 bp, Homo Sapiens
  misc_feature (108)..(108): n is a, c, g, or t
agttgaccatctggtctatcttaataaaatggtaaaaagcacaccaagacaatgatgggggcaggaggatgtttttgaaaacagcgcttctcaaccagtgctcgattntgccccccaggagacatttggcaatgcaatggcaacttttggttgtcgcagccggggaagggaagctaccagcatctagtgcgtagaggtcatggacgccgttaaacatcctacagtgcaagcgcagcccccgaccacgaagagttgtcttgctcaaatatcaacagtgctgcagtgtagaaacttgatcgttggttttcttttaatgcaaaactctcataaaaacctttcacttttcctgtcattgattatatgcttgatacacccaaaaagaaaaggggaggggcaccaattcacctacactccagtggctccatcacctttaaaaatatttataaaatagttccaaaaatctgatatctgaaaagcaatccaagcctgtgtaaatgggaatcactgataagtatcatcatctgtatcagcttggcttggacatgaaaaattgattctctttatgtcactccttgcacctggacaaattcaatccccggtacttaagtcacactgccaagccctcggccctgactattgtcttgattgctgttcctttctggttcaaaataaaatcatttttgtggcaccaagaaaaaaaaaaaaaaa

SEQ ID NO: 237615 - DNA, 750 bp, Homo Sapiens
  misc_feature (31)..(31): n is a, c, g, or t
  misc_feature (99)..(99): n is a, c, g, or t
cgacagtaattaaagtgcaaaacatgccctntactgtgtctattgatgagattttagatttcttttatggctatcaagtaatcccaggctcagtgtgtntaaaatacaatgaaaaaggtatgcccacaggtgaagccatggtggcctttgagtctcgggatgaagccacagctgctgtcattgacttaaatgacaggcctataggttcaagaaaagtaaaacttgtattagggtagccattcacatcattttttatagggtagatcttcatattgctgtgattaatgcatccagattgttttcctagtatttccaggttagaacctgtggattgtttcaattgcatatagcttggtttccataacatagagcattggttgactgtttacagaagactcactcaccaggataaacattgctgtatgttacagtaaagctatctggagagaacacataaatgattttggcataccattagagaaaccatttgtaaaactcaaatgaccacataaagcttatcaaggagtctagattggttttgttttataccatatgggatgaagaaaatagaaatgtcagtagaactcattgagggtgctcttgccagctgctgaaaatagaagttggctactctcagaatttggtttaaagctggacagatttgctttgttatagggtaaagctttgtctaaagtcctcattttcttttaaaattgaataaaatttctgtatacaaaaaaaaaaaaaaaa

SEQ ID NO: 237616 - DNA, 702 bp, Homo Sapiens
  misc_feature (16)..(16): n is a, c, g, or t
gatgggctgtcagtcntgaagagaaaaaatacactaggaatccattcttcctccaccattctccctggcagagggaagtgactacacccctatggtgtggacatactgacgctcctccatgaagcagcaaagttctgttgtttcaggagactgtgggccttgaggatgtggtagtgacctcaccagaggagttggcaattcctaagtgctgcctggaggcctctacagagacataatgttggagaacttctgccacatggcagtgctgggtaagacccctctgtccccaccagtgcccttgaggttatgggtgttggtaggtctgtggcctccatctccatgacgatggtgttaaggactgcatgtttgtgtccccccccaaagtttatatgttgaaaccctgacccccaggagggtggtattaggaggtggggcctttgggaggtgactaggcttaggtgagatcgtgagggtggggctcgccgatgagatcgagtccttataagaaaaggaaggaactagagcgaggtcactttgtgctgtgtgagcatacaagaaaactgccatcttcaagctgggtgcagtggctcacgcctgtaatcccagcactggaaggccaaggcattaggattgcatgagtccaggagttcgagaccagcctaggcatgataagaccttattgctaaaaaaaaaaaaaaaaaa

SEQ ID NO: 237617 - DNA, 736 bp, Homo Sapiens
  misc_feature (84)..(84): n is a, c, g, or t
gcgcggacctggcgtccggccctccaggacgcccgcacccgaccccggctcgccgcgtaccccgccgcccacgatgttcaactntgacgccttctaccaggcccactatggggaacaactggagcgggaacggcgcctgagggcccggcgggaggcccttcgcaaacggcaggagtatcggtccatgaaaggcctccgctgggaggatacccgagacacggctgccattttcctcatcttttcaatcttcatcatcatcggcttttatatttaatcggagagagaagggaaggggagtgtccccagccaaccccccagaaacggccttttttcctgcctctgaacccttggccattgatagtctacctttgctgggatccgaaggaactgtactccccctgccctccccgacccgcccagcttagccgatgacctgcacatcgctccactgtggtccagaaaaggaggcctttcgatgtctgagaaagaggccccacgctgtagagtcccgaaagcccaggagtgaagggggttcctggagtctctagggtgcttcttccagagtctgtcttcttgcttccagatgtggtcaacttctggaacactcgctgtagctttattgtttagccccaagcaagatttatctcctcctgccccgcatgtgtatggtgggcctctgtaaccttgaaatgtgcaatgtgaccaattgttgactaccaaaaaaaaaaaaaaaaaa

SEQ ID NO: 237618 - DNA, 773 bp, Homo Sapiens
  misc_feature (16)..(16): n is a, c, g, or t
  misc_feature (23)..(23): n is a, c, g, or t
  misc_feature (88)..(88): n is a, c, g, or t
  misc_feature (177)..(177): n is a, c, g, or t
ctcacggtgtaccagntgcatgncctgcagcccaactccaccaagaactcccgcccagctgggggcgcggtgctgcatagccctgggnccatgttcgagtggggctctcagcgcctggaggtgagccacgtgcacaaagtggagtgcgtgatcccctggctcaacgacgccctggtntacttcaccgtctccctgcagctctgccagcagctcaaggacaagatctccgtgttctccagctactggagctacagacccttctgatcacagcacccaggagcttgtctccaggaaggcggccccgtcccctactcatacccaccacagagcaccagccagtgccaacgccaggctgctatttatctccctatcccaccccctaccccacctaacacatttgcactgccgggaatggacactggaagtgccaggaggaaggaaggctggtttggtggggtagtggggaggtcagggaggcggggccaagggtgtcccacattcccaacaccgccctctgatcaccatgggaatctttggactcaggacagggccaggcgcagggctctccctcctctccccttcgctgtcccctccccctggagggcatggtgtcggggggtggcactgagctatgagtcccggggatggtgaggaacgccacagacagagccaccctaggagtgagtatagtgctggtgactgtgtttcatagccccagtccagggctgtctaagaaataaagatcatcagactccaaaaaaaaaaaaaaaaaa

SEQ ID NO: 237619 - DNA, 720 bp, Homo Sapiens
ctctctgtaccgagctcagcagatcatccagctcaacatccaagcttcccctaaagtacgactgagcttggcaaacgaagctctgctgcccaccctcatctgcgacattgctggctattaccctctggatgtggtggtgacgtggacccgagaggagctgggtggatccccagcccaagtctctggtgcctccttctccagcctcaggcaaagcgtggcaggcacctacagcatctcctcctctctcaccgcagaacctggctctgcaggtgccacttacacctgccaggtcacacacatctctctggaggagccccttggggccagcacccaggttgtcccaccagagcggagaacagccttgggagtcatctttgccagcagtctcttccttcttgcactgatgttcctggggcttcagagacggcaagcacctacaggacttgggctgcttcaggctgaacgctgggagaccacttcctgtgctgacacacagagctcccatctccatgaagaccgcacagcgcgtgtaagccagcccagctgacctaaagcgacatgagactactagaaagaaacgacacccttccccaagcccccacagctactccaacccaaacaacaaccaagccagtttaatggtaggaatttgtattttttgcctttgttcagaatacatgacattggtaaatatgccacatgaaaaaaaaaaaaaaaaaa

SEQ ID NO: 237620 - DNA, 711 bp, Homo Sapiens
  misc_feature (34)..(34): n is a, c, g, or t
aaactactcttgtctacttaggtctctctcttcntgctggctgtgactcctccctgactagtggccaaggtcttttcttcctcccaggcccagtgggtggaatctgtccccacctggcactgaggagaatggtagagaggagaggagagagagagagaatgtgatttttggccttgtggcagcacatcctcacacccaaagaagtttgtaaatgttccagaacaacctagagaacacctgagtactaagcagcagttttgcaaggatgggagactgggatagcttcccatcacagaactgtgttccatcaaaaagacactaagggatttccttctgggcctcagttctatttgtaagatggagaataatcctctctgtgaactccttgcaaagatgatatgaggctaagagaatatcaagtccccaggtctggaagaaaagtagaaaagagtagtactattgtccaatgtcatgaaagtggtaaaagtgggaaccagtgtgctttgaaaccaaattagaaacacattccttgggaaggcaaagttttctgggacttgatcatacattttatatggttgggacttctctcttcgggagatgatatcttgtttaaggagacctcttttcagttcatcaagttcatcagatatttgagtgcccactctgtgcccaaataaatatgagctggggattaaaaaaaaaaaaaaaaaa

SEQ ID NO: 237621 - DNA, 670 bp, Homo Sapiens
gaggagctggcccagctcgccggggtgcccttcttaggctccgtgcccctggaccctgcgctcatgaggaccctggaggagggccacgacttcatccaggagttccccgggagccccgccttcgctgcactcacctccatagcccagaagattctggacgcgacgcccgcgtgcctcccctgactaaggccaccttgcagccgctttccagggccaccaagggctctgctccagcctctcagagaaacagaggcctgggctcggttcccgggccctgcaggggcaggcccaggcagcgtcagcgggagagcttctccccgaccagcccagccccaggatgtgtcgcaccagcagctctgcctggttggcctgcagtgccgtggtctgcgtgctctgcagctgtgagacgggggcggcctgggctctcttcccatccatgttgcctacctgtgcccctggcagccgcgtgtccacacagttagcggagcgcaggacttctgcagtcctcaggtgaccccgggcctccagcaccctgggtcgctgtcatctgtgtttagctcggggagtgccccctaagggggcgaactgacctcaggcatgtcttgtaactgtagaggcgcctgccattaaacgtgtccgctgctgtggcgacagaaaaaaaaaaaaaaaa

SEQ ID NO: 237622 - DNA, 550 bp, Homo Sapiens
tagtatgacccatcggtggtagctaatgactgagaaaaacatggtgattattttcaaaaatgagtatgaaaatctaaagtatccaaacttaaaaaaaattatttaaatgttttcccagaatgaatctctatctctcttttagaaacatcccattttgtaagaccaaggtatgaaagtattcatctgagtttcaaatgattgcctaatcttacctgtaatcattattgagaaccaaacacccattaatggtgtggtctaaggacaaggtcctgaagagatgagactggcgcatattaaagatgcctgctatgatgatgtggctgtcatggctacattatcatgagggatttggaatctggggttccagagagcacgtttttagccactatctctgactattaaatcacttacaacagctttggataataaaattctctgtttctctcttggtttggttccatattagaatctgcaagtgcaaaggcaaaacagtcagcaaaacagcagacttaaatagaaaaaagccccaaaaggaaaggaaaacaattga

SEQ ID NO: 237623 - DNA, 587 bp, Homo Sapiens
  misc_feature (85)..(85): n is a, c, g, or t
ttgtggggactgtcctctgcattgtaggatatttaacagcatgcctcagcagcatcccctcgtgagattctacccatcaccaccntgagtcatgacaatcaaaacgtgtctccagacattgccacacctcctttacaagacaaaatcgtcctgtgttgagaaccactgcgctagaccatgagacctaggcttctcaaactggaaggctgccttcccttcaggtgcccgtgtctattaagtgaggcttcaggaaggaatattggattttctttctactaaattgttttcactcaagactcagcaagagaagaaccgtttatagtgtacattgaatatttgacacatgaatatttcataaggcaaccgcctgttagcactcagagtgaaaatgactgtgtaggaatagaaagagtaggcgggcctttgtctgcagatgtggaggaaaccgttgaaaatctggccctttccctctgcccctccctgtgtccccttttccaatgttggtttacagaatcttgcttttgcctttaacgttattgttattttacaaagaaatggacgtattcgatttctaagtggttttcacc

SEQ ID NO: 237624 - DNA, 412 bp, Homo Sapiens
cctgcttgcacctcaagacatgagggtattctacgcgcacactgccagagctcagcttcctttctggaacaactggacccaaagaggtaacaggaccaatgttcagatgtctatctttcctcatcaagatcagtttcattcttacaggaatagtacagaaattaacatattatttagaacatgcacactatctggtttttcttattcctgttatagaaagtcacgtgatgaaaacagcattttaaaagcttctgataacatactcaatacgtttgtttccattttgtcacatctgtttcacagatgatatgtcataaatattatttcattaccagcatattgtatagtggtttagttgctatgaaggctctgtttcctttaagttaaaattaaatgtttttcctccttcatg

SEQ ID NO: 237625 - DNA, 485 bp, Homo Sapiens
  misc_feature (100)..(100): n is a, c, g, or t
caatgcatttttacctgttagggtatgtgatttctggctggtaagctacaccgaatcttggctagcacagttgaattccatgtcagatttgtaaacgcanatttgctctctgcatttaaatatattagatatatttaggtaactacatttaaatgtattgagacatttaaataaatttgccgtctgtatctaaatatctgaagtggaccaggtgcggtggctcacgcctgtgatcccatcgctttgggaggccaaggcaagtggatcatgaggtcaggagttcacgaccagcctggccaacatggtgaaatcccatttctactaaaaatgcaaaaattagctgggcgtggtggcgggcgcctgtggtcctagctacttgggaggctgaggcgggagaatcgctggaacccaggagacggaggttgcagtgagctgagattgcaccactgcagtctagcctgggtgacacagcaagactccatctc

SEQ ID NO: 237626 - DNA, 465 bp, Homo Sapiens
atgtttttttttttttgaagggggtggtgtgggagtggccctttaactctatttggctatctgaggatgtacaaaattctcatttaattttctggtcagcaagttccccacacagaaatcactctgaggtttacagaagaactgtaatattattttaaaatgcgattttctgtcattagttctagatatgtacttcatggttaaattctaaatctgaaaatgctagtgggagatatcaagaaattttctttttgattactagtacctgtattctaacagagagtttgaattttttgcccgtgttatcagaatgatggaaattgatcattttcagttgttcattgtgtattcaatccagcgaactgctgtatgtatagaggagctgaggtgctgtctaatgggaaatgtgatttgattgatttatttgcttagagtaataaaagcattttgtgcattcaatcttaa

SEQ ID NO: 237627 - DNA, 833 bp, Homo Sapiens
  misc_feature (12)..(12): n is a, c, g, or t
  misc_feature (23)..(23): n is a, c, g, or t
  misc_feature (58)..(58): n is a, c, g, or t
  misc_feature (71)..(71): n is a, c, g, or t
  misc_feature (74)..(74): n is a, c, g, or t
  misc_feature (90)..(90): n is a, c, g, or t
  misc_feature (128)..(128): n is a, c, g, or t
  misc_feature (193)..(193): n is a, c, g, or t
  misc_feature (223)..(224): n is a, c, g, or t
  misc_feature (248)..(248): n is a, c, g, or t
ctgtcggaaagnacgcatccagnacgagagcgcgctgagggcccggatcgccagctgnagagagctgatgnagnagcagggcacatgagnggccatgagcgacggggtccgcaaagctacacacaggnccgagcagctcagcactgagctggccacagagcgcagcacggcctagaagaatgagagtgcccgncagcagctcgagcgcagacaaaagagctcnnggagcaagctccacgagatggagngggccgtcaagtccaagttcaagtccaccatcgcggcgctggaggccaagattgcacagctggaggagcaggtcgagcaggaggccagagagaaacaggcggccaccaagtcgctgaagcagaaagacaagaagctgaaggaaatcttgctgcaggtggaggacgagcgcaagatggccgagcagtacaaggagcaggcagagaaaggcaatgccagggtcaagcagctcaagaggcagctggaggaggcagaggaggagtcccagcgcatcaacgccaaccgcaggaagctgcagcgggagctggatgaggccacggagagcaacgaggccatgggccgcgaggtgaacgcactaagagcaagctcagagggccccccccacaggaaacttcgcagtgatgcaccaggcgaggaaacgagacctctttcgttccttctagaaggtctggaggacgtagagttattgaaaatgcagatggttctgaggaggaaacggacactcgagacgcagacttcaatggaaccaaggccagtgaataagcaactttctacagttttgcaccacggcaagaaaaccaaaaacc

SEQ ID NO: 237628 - DNA, 517 bp, Homo Sapiens
caatgtctcagactttctgtggttatttttgctttattccaatacctagctgcataatacatctaaaatctatgggagtagcttccagacatgagtatttttcgggaactcttcagatgcctgcacacccggtaagaaactctactctagagaatttatgggtcgactgttccagaagcctcaggagtacagttctgccttttccttgatgctgtttgtagaaagaattggaaaaaaaaaaaaaaagaaaagaaaagaaaaagcaaacagaaagaatcccaatctgccaaatgccttttatgtcaaacgcatttttttcttatctgagaagttttgaaaaagtatagcaattaattattaatatttgccaatgactcacctttactgagattaaaattaatatgaatttattttagaaaactccctatgagtggctatcaaaatattctatgggttatcaaagaaggcaatatcaacaatagtggataggctttaatgacatttttttaaaagtaaa

SEQ ID NO: 237629 - DNA, 421 bp, Homo Sapiens
  misc_feature (63)..(63): n is a, c, g, or t
  misc_feature (85)..(85): n is a, c, g, or t
tggagatatcaccaaagccagacccttcagcagcaagtggagctgtttgacttgaagaataanccaaagtacgtgtcagcggagngggcttgggaccggttgctgatgacggctatggtgtgtcgtacatccttgtgggagagaacctcatcaatttccacatttcttccaagttctcttgccctgagacggggattataagtcaaggaccaagttcagatacttgagacaaagtggaaagtctcagcatatggaaacaaggccttggaggagaccatggacatcaccaagttcatgtgctgggctggaaagaaaagcctgttgattttcacttgctgtgcatttattcatccattccattgcctcaatgctgagaacagtgcctgacacataaaagatgctcaataaatatgttaaaagt

SEQ ID NO: 237630 - DNA, 436 bp, Homo Sapiens; identical to SEQ ID NO: 95442

SEQ ID NO: 237631 - DNA, 476 bp, Homo Sapiens
  misc_feature (49)..(49): n is a, c, g, or t
cagagcaagactctgtctcttaaaaaaaagaaaaacgaaagtagttgtnctgtggttccctaaaaatagcttcaaaacgcttggagttttctgtgtgatgggaatggttttgttttactgattagatgactcactgtgggccattagatagctttaggatgggaactgccctccaaaaagaccaggaataggattagaggggttagaactttcagccacttgccctctagggcgggaaagtttggagattgagttcagttatgtgaccaatgatttaatcaatcatgcctaagtaataaaactccaataaaaactctgctcatggagacttgggggagcttcctggccggagaatacatcaatgtgccgagagcgtgtcatagcctgactgtattgggagaagctcttgtcctggactctcccagactttgccctatgtgtatcctttaaaataaaactgtaataataagtatagc

SEQ ID NO: 237632 - DNA, 500 bp, Homo Sapiens
atagctgtatcacatttcatgttatcgccaatagcagtaaaacaacaataaatgaacaaacaaacaaataaaaaacagtgcctgacaaataatctcctggggacacaaatatgtgtccagtgagcagcttggttcaacagcgcatgcttttcctccaccagatttaggacacaacattaaagttttagaatggccagagaggtcactctttgctgaattccaatatctgaaaaacaattgcttgagcagattgtaagcacttgtccttattcttaaaaaaaaaagggcggggtggggggagaaaaaatacacatacacacaacccaaaagcgctgaagttaagcattaatacgccagattcatgatttatgatcagtatccaaaactccaactacaaacaatgcaaagtagtgctcctcagtattatttttgcaattgttagtaatgttaagcatcaaggaaaataaaacacatcattgcacattacagccgcaaaaaaa

SEQ ID NO: 237633 - DNA, 416 bp, Homo Sapiens
  misc_feature (23)..(23): n is a, c, g, or t
ctgtcaactgaatgaaggcttanatttcatggtcttgggtgggagaactttttcatattctttccccatatggaataacaatctgccctgaaaacagggagtattttggcatgatctctttttgcttatttgccttccattttccataaagcaacttttgccaagcaccatacttaagactcaacttttttgcaaaaatatcagacaaagcactgtctttaagaacacagagaacacactagatcccttcttctgaaaatcactgttctatgttgtttgtggatatttttttagcattcactgcatgcctggaatgaataggctgtgtttctccccaaaagagcacaaattaatatacaaggtcaggttaaatagttaagtctgctttcctatcccttatacagaagctatccatt

SEQ ID NO: 237634 - DNA, 557 bp, Homo Sapiens
  misc_feature (23)..(23): n is a, c, g, or t
cagatgagttgcaccttgttttnttttacttggtctctttggcatttttccattttttaatgtatctagacaactacatttttaatgcttacatagtatatttccgttatattaaggaatcataatttatttgaatcacttataaatggatttttttctataaaattggctgtaagccagagtatatcaggtactataaatacatcactaatttgaaacaaataatggctcaggcaatcccgtctggaatatttccagtggtggaatgggttttgctttgggttgcgtgcacgcgcacgcacgtgtgtgtcttcgctttactgtttttctgttctaattttgaggaagaaagattcccagaaataacctgtccagttcagttaaaatatttcattcatgtgagaatgcacacattttagagtgtttagaggtatatctttcaaagtgctttctattatgtttgtgggttaatcgattttaggaatgggttgatttttttgtttgtaattttaaaaaattatttcaaaaacaactacttgtaattaaattattttttc

SEQ ID NO: 237635 - DNA, 476 bp, Homo Sapiens
gagctggagggtttatgcgggactggccagccccttcagctgagtgggacagcaacacagtgggtggtaaggggcttcataagatgtacaagatgagggagaggcccctccagccaaccctgtgtctaaagagtcaggtaacgaagaactttccagagacagctgtgagtccgtctggcttaaggggttgtacaggtgtctgagaatggggcctgaaggtgcagggcctgcaggctgccctgtttggaaggttcctgtccttctgtcttggtagaaaatggcagctagccttgtaaagggcctccttgtgtagcgagatagaccatgtagccccagatgcccccatggcttcacttccctcttgggggtctctcagtatatgtctagtgccaccactattggtggagagtttccttctggaataaccttggggtggtggatgggttttattttaataaaagaagaatgtctcattc

SEQ ID NO: 237636 - DNA, 399 bp, Homo Sapiens
  misc_feature (20)..(20): n is a, c, g, or t
tagtctgacgtactgctatngttgtacccggatggcctctttctcagtctttaggagtacttgtcttcaggcggactctcttcctccttctgctgtcttgctggcgcaagttgctgccccaagttgcaccttggaactgggcctgagaagagaggagttattcatctccttaagctttcaggccccggggagaatcttacaagcacttcatagctaaataatgctatggtgatttattcatgtgctgacattgtatagcttctttattgtattttttaaaaaactgaattgcatgagaccttagtagttaacgttttatgggaggaagctattgtgtttgtttctattataccaggaaggttgaatcactgaggaacttggtatgatgaattcagttag

SEQ ID NO: 237637 - DNA, 566 bp, Homo Sapiens
  misc_feature (7)..(7): n is a, c, g, or t
tgagtcntgaaacatacccgtgtttaaagatctgggaggtgcagaggaattatcaaaggaggctgagaaggagcagccagtgaggtgtgtagaaaaacaagataagcaaaaagaaaagcaagagatatggaactgaacttccctttggcaaaaaatttagaaaatgataatgagtctctagacccccttcgtggatggtatcagatgatttcagtccaaccttccattgcattctctgactgagccaacacagctggattctcagccaactatgaagtttaaattgactccgctttctgtctctctgaagataacgttaagctgcagctccgtatctgtgaaaacccatttcacagcatctgcatccctggattgctaaatacccttgtctagttacccaaatattaatggatcccatggaataaggtggcatgatttaggcacaagcaattaccaaaggattttgaaaagcagtaactccaaattatcttgtaaagttgagaataatctgagaagagctattgtaagactgggaatcaagtaacaaaataaagatatgaaccgtc

SEQ ID NO: 237638 - DNA, 539 bp, Homo Sapiens
gttgacacacaggttgaacgtgcagagtttaaatgtcaccataattggccagaaccacaggcagttcatcttatggatgctaccaagttacctgccactctgaagaaggaaacactgcctatatcttcaggaagatgaccctatttaaccaagagaaaaatgaaagtcgtccactcactcagatccagtacatagcctggcctgaccatggagtccctgatgattcgagtgactttctagattttgtttgtcatgtacgaaacaagagggctggcaaggaagaacccgttgttgtccattgcagtgctggaatcggaagaactggggttcttattactatggaaacagccatgtgtctcattgaatgcaatcagccagtttatccactagatattgtaagaacaatgagagatcagcgagccatgatgatccaaacacctagtcaatacagatttgtatgtgaagctattttgaaagtttatgaagaaggctttgttaaacccttaacaacatcaacaaataaataagaaagcaaaaag

SEQ ID NO: 237639 - DNA, 499 bp, Homo Sapiens
cagtttgcaaattgtgttacagctacggatttttttttacagtgttcagcatcttaacgtgtattaaagctatggatttttttttaaagtcttcagcatcctaattcaccctttctaacttaagaaaaacatgacttaagacactgcttctaagtttggttgttctttatagtgtggatacccagttatctgtgagcgtatgggggtgggctgagggtcaggtgaggaaggagtgtgtgtgtgtgtgtgtgtgtgtgtgtgtgtgtgtgatttgcatgtgtatgatgtgtgtgcgtcggaccgcttctaggctactaagtgtcaatggaaaagaaaatgtattcaaaatacttaaatcaaaactagaagatggggaaaaaaagatttattctatacaaagccttgtctggaccactttagagagacttctatttttttaacccttctataaatatttgatggcacttgaaatattcctgcaataaaatgtgatttgtgt

SEQ ID NO: 237640 - DNA, 441 bp, Homo Sapiens
  misc_feature (17)..(17): n is a, c, g, or t
agcaccatgctttaganagtttataagtttttactgagttatcttcttattaactcttgtctgagggttacttggtaaaattttcttatcctattaatacaaactgtataaaacttagtttctaaacttctttctttattaggccactccatgtccaaaagaaccaaataaagagatgataaatgatggcgcttcctggacaatcattagcacagataaggcagagtatacattttatgagggaatgggccctgtccttgccccagtcactcctgtgcctgtggtagagagccttcaggtgagaacgcctagtccaagttggccttcagctctttgcagctactctcagctgtgacctggcatcatttcatttcatgggagttttgatttttctccaatcgtctgattaggggatttttatatacaccatttgttgattta

SEQ ID NO: 237641 - DNA, 560 bp, Homo Sapiens
  misc_feature (243)..(243): n is a, c, g, or t
cttatgactcagctgcgcagggtccttgagtcccggctgcagcggcccctgcctgaggacctgcccgaggctctggccagtggggtcatcctgtgccagctggccaaccagctacggccgcgctccgtgcccttcatccatgtgccctcccctgctgtgccaaaactcagtgccctcaaggctcggaagaatgtggagagttttctagaagcctgtcgaaaaatgggggtgcctgaggagtcnctgtgccagccccaccacatcctggaagaggagggggccccgggaaggggccctcccctacatcgctgctgtcgtccacgccctgctggaccggccttaggggtgaaggtgggggcacagggcccaccccgcccgggaccccgggagcagaagacgcgcctgggctccgcgctctcagagaagcacgtggtgagggtggcctgggcctgggcacccttggcctgccggcctggctgcctctggggtcgagggtctgggtggaaggaccgcgggtgtcgcaggtgtcgtgtcagccgcaataaacagaagccagaaaa

SEQ ID NO: 237642 - DNA, 538 bp, Homo Sapiens
cttcccagaaagaagaggaaatgactgagtcccagggaacagtaacattcaaagatgtggctatcgacttcactcaggaggagtggaagagattggatcctgctcagagaaaactgtaccggaatgtgatgctagaaaactataacaacttaatcacagtaggctatccgttcaccaaacctgatgtgattttcaaattggagcaagaagaagaaccatgggtgatggaggaagaagtattaaggagacactggcaaggagaaatatggggagttgatgagcatcagaaaaaccaggacagacttttgagacaagttgaagttaaattccagaaaacactgactgaagaaaaaggcaatgaatgtcaaaagaaatttgcaaatgtatttcctctgaactctgattttttcccttccagacacaatctctatgagtatgacttatttggaaagtgtttagaacataattttgactgtcataataatgtgaaatgccttatgagaaaggagcattgtgaatataatgaacctgtgaaatc

SEQ ID NO: 237643 - DNA, 508 bp, Homo Sapiens
cacctggaattttagctctgtgtacattgatattgggccccaaatgggtttctgtgggatgcaaccccagaaagggtactctgatagtactggagaaggtttactgcttgtcctgtcatcgtagttcatgtttttttccccaaggccaaagattgggctgggattggggtggtagtgtatttgaatgatgctggagataaccaaagccaacagtctttgccagagctgggctggtggtatttaactgtctttgagttaaatgtaaagtttttaataaatacccagaatccattaactgctggaggggtaaagtgaagctctgttgtaaaataaagctgattcccattatgcatggtcctgtatacacaggctgtgggtgaccattatggaaccaaaaaatacttatttgttattttgtgctatagaataggaacttcaggggtggatacctatgctgtcaggaatgcttgttataagaattaattaaaacactttgcttaattattaa

SEQ ID NO: 237644 - DNA, 484 bp, Homo Sapiens
  misc_feature (57)..(57): n is a, c, g, or t
agctaccctgtcctcgttagtcattgctattcaatcattccagtcccaagttatttntgtgccacttggaatatgagtatttctattggtaactacaaactctatcctgtgtttgtaagaggagctgtgtaagatttttttcatttaaagggacaatttacttcattatttatctttcttttgttatagcgttgtaattcttctcagtttttctttgcacatttcaatatgcatggtttaaaaaccattaacttctctaccttttgtacagtaaggtttcattttcacactgtatagtttcattttattgttttgctttgtcagttatatacagtataaagttgctatgcacagagctttttgtaaagacagcttttttgtttactgtttttaatggtcttacttaaagaatatcttgtttgtaaaatgaatatgtctacttcagttttaaactttaaattatcctaacaaaaaaataaaattt

SEQ ID NO: 237645 - DNA, 526 bp, Homo Sapiens
  misc_feature (18)..(18): n is a, c, g, or t
  misc_feature (29)..(29): n is a, c, g, or t
  misc_feature (218)..(218): n is a, c, g, or t
cattctgatgttggaganagctagtggcncagtgatagcccactgctgctgcctcaggtctttggaagaaatcaacttatgtttaaagcagcagctactgaactggaattgagaacaaaagagcagttattgaaaaagtaatattacaatcttttaaaatagggaatatacttgtgtgctaatgggagaagtcattagtaaatatttaactagcccanatagctcacttaatataattccacaaaaaaatgaattactttattgtagaagcctgtaaggctaaattataggtagtgttacaagtttccgttagctagtcaaaaactggcattaattttacatttcctaagaatgagaactttcaagtcataaaaatacgaaactcctagagcctgtaaaataatccacttaatacaactgatgacgtgctaaatattaaactactaggttctgaatgtaaaccattatcttcctgcttttaaaaaaactaacccaagttttgctgcacttaagcattaagtcttct

SEQ ID NO: 237646 - DNA, 504 bp, Homo Sapiens
agagctagtgacattgatgcagaatcaataacctctggggttgaactcctgggacccttggacagaggggatatgctaaatgaagcatttattggcctgtctttagcacctcaaggagaagactcatttccagataacctccctccctcttgcccaacccacagacatattttacaacaaagaatactgaatggctcttctaacagacaaataattgacagaaggaatgaacttgaaaaagacatctgttctggatttttgatgactaatacctgtaatgcagaagacggagaactgagagaagacggcagagaacaggaaatcagagatggtggttctctcaaaatgattcactttggtctggtgtaaacattaagaaaaaaagaaaactgccttctttatatctaaacttttcatggcctgatacagacttaaaatcccccgtgtggatttttaacaagagacagtatgaatcatataaattagttaagagttttgagttga

SEQ ID NO: 237647 - DNA, 1000 bp, Homo Sapiens
  misc_feature (39)..(39): n is a, c, g, or t
  misc_feature (314)..(314): n is a, c, g, or t
  misc_feature (436)..(436): n is a, c, g, or t
  misc_feature (525)..(525): n is a, c, g, or t
  misc_feature (529)..(529): n is a, c, g, or t
attttggccccgttgagaaccccgtagaaacccgccacncagcgggaatgaaggaagagggccataaaccctcccccgttgtatatatggggccgtttcccggaaggcgagggcccactatagtgttccccttagcccccgcttactttttccggcctagggtgggatgggcgaaacatccccaagaacattacagtttccattaatggcccctagggattggcccggcccaaattggccaagaaacacaaagtgaagaaactaccttataaggtcagaaaggaccctggtcgggcctcaagggacaggttaanaaatacccaacggatgtcaggatttattcagaaaaagcctccagctttaggcatgtttgattagcaaatttaaaggtaaggtcatgaggctaagacttaagaagctatcagacacagaagcntgggcacatagctattccctaaactgcagtttaggatttattgacagagttgatacctgggaagtaaaagaaagttcagacctgtttanacgnaattcgacttgatctcctatttttacatgaagattttgttagcaataatgatgaagttgcggagaataatgaacatgatgtcacttctactgaattagatccctttctgacaaacttatctgaaagtgagatgtttgcttctgagttaagtagaagcctaacagaagagcaacaacaaagaattgagagaaataaacaactggccttggaaagaaggcaggcaaagctgctgagtaatagtcagaccctaggaaatgatatgttaatgaatacacccagggcacacacggttgaagaggttaatactgatgaggatcaaaaggaggagtcaaatggattaaacgaagacattctggacaatccatgtaatgatgctattgccaatactttaaatgaagaggaaacactgctggaccagtcttttaaaaatgtgcaacagcaacttgatgctacatccagaaatattactga

SEQ ID NO: 237648 - DNA, 582 bp, Homo Sapiens
cagtgccttgcacatagtaggcattcagtaaatacttacatgcatgaatgaataatgtattttcagtgtaacaaatttattataaaagtgtagttcgactcttcttggtcttggagtttgagagtacagaattacagggaatgaagagaggtataagtagatattttaatggaaatgaagtataaattaataacttgacttacccctccataagttactgctaactggagatacccttgtatgcccaacctgtaaaggaaaaagttctatttctatatttataggacattcttctcagtcaaggaacagtaagaaatatgtaggtttcaatcagttgctctcaaccctgactgcattttagaatcatttggagagtttttaaaaatatccatgcctgaatcttgattcccattttcatgtaatttgagacaagacctggtcatcagtattttttttaaagttctccaggtaatttgaatgtgcaggaaggattcagaatcactggtttaatttgttattgaaaacagtaccagtattaaatgtgtttcctcttccttcttttctgtaaaaaaaaaaaaaaaa

SEQ ID NO: 237649 - DNA, 486 bp, Homo Sapiens
tgtgcaacctcggcgccatgcgcaacctctatgcgatgcaccggcggctgcagcggcacccgcgctcctgcaccagggactgtgccgagccgcgcgcggacgggagggaagcgtcccctcagcccctggaggagctggatcacctcctgctgctggcgctgatgaccgtgctcttcactatgtgttctctgcccgtaatttatcgcgcttactatggagcatttaaggatgtcaaggagaaaaacaggacctctgaagaagcagaagacctccgagccttgcgatttctatctgtgatttcaattgtggacccttggatttttatcattttcagatctccagtatttcggatattttttcacaagattttcattagacctcttaggtacaggagccggtgcagcaattccactaacatggaatccagtctgtgacagtgtttttcactctgtggtaagctgaggaatatgtcacattttcagcggc

SEQ ID NO: 237650 - DNA, 468 bp, Homo Sapiens
tagatggcgctgtcaacttggacagcatatataacatctagaaatttcgattctgttataatggaagttatggaattgtccgtagggttattgtggggagcaaatgaaataatccccataaagcagtgattttaagacttcttaaaatgtttacctatagtaagaaataaattttatatgggacatatgtgtacatataaactataagtttcactgaagaatttttattctactaaatgtaataaactctgctttctattctgttgcattttcataagcctctaggtcatgactgtttgcgacattgagaatactaagttatgaagcatgtgttgttctgcataatatgcctactatgtgtcagtgcctcctactatgtgttaagcatactaggtgctaggcatgcagtaaggaacaagacaaagttcctatccccatggagcttctggattagttggggagaaaaac

SEQ ID NO: 237651 - DNA, 496 bp, Homo Sapiens
ctactttctctaataaatctgcctttcttgacctaaactgtcatggtaaattcttcttactcctatgtcaccagccacagacagtcgccacaagccatgacaagtctgcgatttcatggtctttttttattttgatgatatttccccagtgtttgggggacagaagaatgcccacaatctataggtcttagtcacatggatggggacagaatatctgagagagagagaaggaacaagatctactggggctccttaaaattcttcttgaagaactcctttctcaccttggagtagggaagactttctgattatgactcaaaatttagaagctaagaaagaaaatacctttaaatctgaaaacataaaactcaaaaacttctgggtgtttttttgggggggttgtttttttttaaacagcacaagcaactcaaagggcaagtgacaaactggggagagaagaaaaagatgtgactcatatcacagtttcccatctact

SEQ ID NO: 237652 - DNA, 425 bp, Homo Sapiens
cttcgtcctgttaaagataaattaaaaaaaaaaaaaaaaaaccaaagggaacaaaacttactctgcaaaagtaatatatgatttacctgctgttgtcataagaattccaaatagacaaactcggtatgcttgggatttgctttacattctaagtggatttggagaagagacaataaagaataagcagtcaattctataatatatttagaaggagaaaagtgccaaggaggaatgaaaaagtagagcaaggcaaatgtggatatatgtttataactgcacaaatgaattctgaagggacgcataagacattggtattggttgcctatggggaatataattgatatgggggagacttggttttccttgtatgctcttctatatggtttaaaaaattatttatgaaaattaaatatatactaaaaaaa

SEQ ID NO: 237653 - DNA, 596 bp, Homo Sapiens
  misc_feature (37)..(37): n is a, c, g, or t
  misc_feature (49)..(49): n is a, c, g, or t
  misc_feature (58)..(58): n is a, c, g, or t
  misc_feature (121)..(121): n is a, c, g, or t
  misc_feature (236)..(236): n is a, c, g, or t
  misc_feature (259)..(259): n is a, c, g, or t
  misc_feature (320)..(320): n is a, c, g, or t
  misc_feature (345)..(345): n is a, c, g, or t
  misc_feature (359)..(359): n is a, c, g, or t
  misc_feature (411)..(411): n is a, c, g, or t
  misc_feature (521)..(521): n is a, c, g, or t
  misc_feature (579)..(579): n is a, c, g, or t
aattttccttctgactgttcctttctccttcctcacncaattaaaatgntaggtttcntgtaatcgcaatcttcagggaatttttcactcaagcccagaaaataaactccagataatgatnctgagaaatttattggttggaaaactgctatctacaggccttccactacctatttcttagtagattttacattttttaaagggttgtagaacaccaaaccaatatatgacagatnctgtgtttgggccttaaagcctnccctttatataaaaagtttgttgactcctaggctctcatttgcaagtagacaaatgagaancagcaaatatttaaggaaaagagcnacatgaaaaatacncagcaaacttaacaagcagaaagaattcctggggaaacaattcagggggaancaatgaccaagtataattagtattatatggaataataattactactacttataatagtttcatatgtaatcctcatcatattatatgtcataatcttcaaatattttagnggttattgtactaattttaaaaatgcaagttgctataaagaagtatacttggaaatanccagttgtgaaaataaa

SEQ ID NO: 237654 - DNA, 599 bp, Homo Sapiens
aaaacagaaattttgctcacgagttagttcaaatacatttatgtagctcccttatatactatcaaaggagctccaaccatctggtatgtctggaagacacttcagtgagtagaaattagaagccagcatttgaaattttctatcacagggacatgaaagcctaaaccggccttaaagggataagaggattttacatttttaaaaaataaatcaattaacattcattgtcaaataacctacaagaaagttccactagcattctgcaattgtatagaataagagaatatttgttgctaatgattacattccagaaagcaatatgtttagcagctgtttttcaaaagacttgtcaagttttactattgttatttaatccaggcataaatgtgtaaccttaaacaaaaactgtgcattattcaaccagctagtgacaaattatcttaacaaagtagattatcttttgcttttctgtacatgaattttttctttattaggcattttgtattccaatttttgttttagaatttagtgcacacgtagaaaggggaagaaacgcttttggatgttggtaattatgtacatcaaataatgtcatatat

SEQ ID NO: 237655 - DNA, 677 bp, Homo Sapiens
gcaagaaaatactactgtagaataaggaatttagatttcactgcaaataaagccatatttgatattaaagacacatgttcctattttcacatcagtcatttattaacaccaaacattatactttaacttttccccattacacggtacaataagcctgtcaagatttccaggaagtaatcatcagtacctactgtgcttccagcagccaaagctaagctggctgggtaccagaaatcaacaccttcaggagaatggcatcacaagattgcatggactcatattaactattacaaggggcactggaaaaaaaggtcatttgctcatttacaaaatcctaattgaactaaagctctgtaattatagccatggtatcagaccagctttttcgcacatcctatcacatcgctgcctgctgatgttttacactgcctataaagtctcataattttaaaagggaatgaaacagaatgccacaggtgaccgacctctgctcctgctacttgggagtcacgttgtcttggcttcgtcctggctcaaggttactagtctcttgctgctttgggccaaatctcttatctctttacatttcctcctctcaggctgagtcaaaagtaagtcacatgtataacaaaactgtcttaaaataccactgtttttcagccaagagaattacggat

SEQ ID NO: 237656 - DNA, 677 bp, Homo Sapiens
aaaacccttcttctctgggcgggtgtggtggctccggcattatcccagcaccttgggaggccgagatgggaggattgtgtgagcccgggagtttgagaccggcctgggtaacgtggcaagaccctgtctccgcaaaaaagtagaaaattaactgggcacggtggtgctcacgcctgtagtcccggcacttggggaggccgaggcgggtggatcacgaggtcaagagatcgagaccatcctggccaacatggtgaagccccgtctgtactaaaaatacaaaaattagccaggcgtgatagcaggcgcctgtggttccagctatgggaggctgaggcgggagaatcagatgaacctgggagacggaggttgcagtgggctgggatcgcgccactgcactccagcctggtgacggagtgacactccgtctcaaaaaaaaaaagaaacgatcacatccagatgtcctgttactggaagggcaccatagtttatcctgcacctaacactaatacacctactctgggaattcttctacctacaactatttatttatctgatcccatctggtattaaagttctaaaagttaacagaattcttaaaggttcccaatgcctcccagaaaccccatcatctcaaaatcactagctattaaaagaagcaaaaaaaaaaaaaaaaaaaa

SEQ ID NO: 237657 - DNA, 451 bp, Homo Sapiens
aatgaatcagtgctgctgaacactactatccagatgcccagcccttgctcacaacacaatgctttttcaagaattaaatgtgtctaagagcacaaacataattctcccaaaattaattttgagagttgaaaaggtggtctatgggaaatcattttagatgaataattttggttaggtataatactgaaattcaggaccgagtaagcttaaaaatggtatatggttgtgtgtgtggtttaccccctttttgtttttatttatttgttaaaccctgtcatgttattggtaaattatgaggaaatcatgttttaagaaaaattcaaaaatatatttgctttaaagtttgggaatctgttaggcattttactgccttagtattatttcactggagggaatgttttgaattttcagaatgtcttttcaaaataaaaagaaatcaaaatgaaaaacc

SEQ ID NO: 237658 - DNA, 472 bp, Homo Sapiens
attatttggaattcttctgcacgggagatttatctcttctctctcatttattcaaccatttatttctatcaatatggactcgtgggcatttattttaatactttggtttataatacaataccacgtttttctgttgctttgttctagcttcagcttttgagggctatctacttgattcatatgtccctctgatatatccttatttatgtgggttttttttttcagggggagcaggcgcttttttattttccggcactataatatattctaggcttatcttgtgtattttctgccccagtcctagaatcaggcatttctccaaggaacattatttttatggagaatgaaagaaaccaagatccgagtgctttccctctttttaattgctccaaaaggtatctgactatgtaaggcaaaaatagtaactgtattttgtttctgtagcacatgtaaaaataaaatatatgacaac

SEQ ID NO: 237659 - DNA, 473 bp, Homo Sapiens
acaccaagtagtgggatacagagtcccttgacacctcagcctggcaatggaaatatgtttcctgcacagtcattccataaagaactgtttacaaaacagccacccagtacccctacgtttacatcttcagatgatgtgtttgtaaagccacaagctccacctcctcctccagccccatccgggattcccatccaggatagtttttttcaggctcagacttttcagccaccctcaccgcaagtgttttcacctgggtcctttaactcccgacccccatttccaatggatccatatgcaaaaatggttggtacccctcgaccccctcctgtgggccatagtttttccaaaaaaaattttgctgccccagtggaaaactgtacacctttatcatcggtatttaggcccctccaactcatgagacccccaacaaatagccctttttaacgctaatgaaaaaaaaaaaaaaaaaaaaa

SEQ ID NO: 237660 - DNA, 711 bp, Homo Sapiens
  misc_feature (69)..(69): n is a, c, g, or t
gtggttccattcgtcaagtatgagttaatatgcagaaagtgcaggatgatgtttactgataaggacgcnccagtaaatcatcaaaagtctttctgtatttcggtcagccttgattgaccacaagagacagtgcttcgtgtcccagtcagcaaatatcagtgtcttgcctgtgatgtggctatcagtgggaatgaagcacttagccaacacctccagtcaagcttgcacaaagagaaaacaatcaaacaagcaatgagaaatgccaaagagcatgttagattattacctcactcagtctgctcccctaatcctaacaccacatctacctcgcagtctgcagcttcttctaataacacctatcctcatctttcttgcttctccatgaagtcctggcctaatatccttttccaagcgtctgccaggagagctgcttctcccccttcttctcctccttccctttccttgccttcaacggttacctcaagtttgtgcagcacctcaggggttcaaacctcactacccacagaaagttgttcagatgagtctgacagtgagctgagccagaagctagaagacttagataattctttggaagtgaaggctaagcctgcttctggcctagatggtaatttcaatagcatccgaatggatatgttcagtgtgtaggagtgaagacaggatcccgtgcttaaaaaaataaaaaataaaaaa

SEQ ID NO: 237661 - DNA, 562 bp, Homo Sapiens
  misc_feature (7)..(7): n is a, c, g, or t
agtagtntgtaagctgtaaagcaccagttcatgtaagaacttattatagcatttccatgatattcatcatctggaaatatgttgttcactgtaaattgaagcaaggataaagaggcatcatattcaaatcagctgtttcaaaattagtatttatgctagaaaaagaaatgttttaatttaaaagatgcttaaatgttccgtattttaaattattggacggctacttctggataagaaaaatttgttttggtttctcacgactggctgttgttcatcatgtgacttgtttaggcacacgattacaacactctgtctagaggtttgctgccagaaacctatagctgactcttcctgggaatcaatttttgatttccctgttattgatctgataacactctccccaaaatataaagtaaaacaaaatgtattctgaagcataatatgtgtttagtttagtattgttttaattttagatgctatttactttgttgttatttgaagatatgcaagccttctaattgaaatcagcaattgatataattgaataaaaatgttaccaaat

SEQ ID NO: 237662 - DNA, 369 bp, Homo Sapiens
caggttttctcctgtgttatatatgcattatgtgcaggtatgatattttcttcactactttttctatcttaatatagtgtggaattttattgtattattcttccattcttaatactgtaccacattcctgctcagaaactgctcacttccttaaattgtcttttttcccccagcgtgaaatgtatccatttataactgcctattgcctgttctattagcatccaaaaatgtggaaggcctcccaaccaccatttctgctgtgtccttaggatgtgcagtaaaaaatatagacctaacagtttatgttatagaatggctttatttactttggtgactgtttatagtttttaaataaaagactgaacattt

SEQ ID NO: 237663 - DNA, 522 bp, Homo Sapiens
ttttcggtggtggttcatggagcttccctacaccaacttggaaatggcattcattttattggcttttgttatcttttccttatttaccctggcttccatctacactactccggatgacagtaatgaagaggaagaacatgaaaaaaagggaagggaaaagaaaaggaaaaagtctgaaaagaagaaaaattgctcagaggaagagcacagaattgaagctgttgagctatgatctcatagccaccgatatttctcgctaagaagacagaggaagcaatccatgggaactacttatccacagttaaacaagaggaggggataatgaagaaagttaaaatcacttactgattaaacacgatgataataacctttaatgaactcaatactcgggaaaggcttcacatttctgggactcagcattatccaaaatatctattaagagccatacaccattctagctgcaattgattatacaaaaaaaaaagaccaaagtggttacaataataaaatagaacacagaga

SEQ ID NO: 237664 - DNA, 444 bp, Homo Sapiens
aagtccatacaggctggggccttagatcaacaacttagaaagggtgcccacactcttgttctttagaagaaagggacggcaggagtctgatcatctgtccgatgcccacacagtggctgtgctgagtgacgtgttgttttgaggatgtccctaccccctggtcttgccgtcggtctccagtacccagcgaagcaagctgtgggctctgaggagctcacaccagggaggagctgccctggagtggagcaacagcatgtcctctcccctgtgtgactgcagtgctataataataataacagaaagctggcatttcttgagctcttactgtgtgccagagacaccgctctaagtgcttacacatatgtattcgttttctgtagttgctgtaacaaattatcacaaactttaaacattgaacttatggcataaagcaacacaaatgta

SEQ ID NO: 237665 - DNA, 469 bp, Homo Sapiens
  misc_feature (3)..(3): n is a, c, g, or t
ccntagtgtacagtggtgcagccaatgagtgacctgaagtctatgagcaacactcattgtcccaatgtgggacgagtgaccgaagctgaacccacaacagccttcctgtgatattccacgtggtggttaaagaatattagaaaaatattatgaaaatagttgaagagaaatgttatgaaaatagttgaagctgtacttactgcacaaggagaccaagaaaaactcccacaaaatcagctgcaagtaaatccctctggatggtgccgccacatgttcctacaagtccagaacaacccttgccaaaccaaagacacttggcagaaccctgttcctttctagagacagagctgtatacctgttccaaaacaccacatctcactcagtgacttatttctcattatgctaattgttttgctgtaaagtgccaatgtttctgtgaattaagacatacgaataaatttctgaagtt

SEQ ID NO: 237666 - DNA, 481 bp, Homo Sapiens
acaaacaaaccagatacacgtgaaacgtcagccaacagggtggtagattaatctcactggtttgggcctgggtcctgtgccatgtactcacgttttgatttttggcaagtcacataatctccttggccctcgtttttgttagtgaaaagtggagataagatctgtcccggctacttgactgagctatggaggaatcatgtgcaatttggaagtgctctggaaagtatactctggtcatcttacaggtatagagcaccgtcatctttatggtttcctctgcagagccgcttcccaaagagttgttcaagcaccgccttttcagaacactctcagctcgtgctcttctgggtagtgctgggtcaggagcctctcatactttcacaaaggactttttctgcctggaggtcaggtttatgagtgcagcacatgaaacatgagctggcccaggtttctccatttcagttagatgtacatctaaaga

SEQ ID NO: 237667 - DNA, 449 bp, Homo Sapiens
ttttgtgggagaacagtttctcccatagtgtttcctgtggaatgctagtgtctcataaagtcttctaaaaaaaagaaaaaaaaaaatcaaatgtttggaagccattttgtgttactgtgtgactttcttttactcaaaaacagcaccataaaatttctgacaagtactataggtaaagaaatccctttatacttaacctagtattttctacctttccccatctaaaataaaatttttataccactttctaattatgttgtgtgtgcccactttccccatacctactgctaccatcttagagtaggcaattttctcaagaggattattccaagaacaccctaatgttttcctgcttccagtcttctttcctcaaatttattccacactcttaagaattgaagatgtaaatctgtcactcgcctgaataaagcttcagtggcctctgactt

SEQ ID NO: 237668 - DNA, 401 bp, Homo Sapiens
tcacccacatactcttttgcttttttccaagagaaatggcacattttctggatgtgagagttggtcaaaagatcacaaaaaaagtcaaaaaataattctactctgtgaatgaaaaatggatattttggtacttaccctcataagcattaaaagaaaataatgcatgaaattccatagaaatgtgcctatcatgttatactgactcaaaccagaagacctagagtatgatattgctaatataatacatgtggtgggtatgagtggaagtatgtgtgtgagatttatcattgccatagtgtaaaagagttgaattagcttccacttgactagatgagagctcttagttcttattttgaaagcaatcaattgagcatggttaattaggatatcaccaagtagtt

SEQ ID NO: 237669 - DNA, 450 bp, Homo Sapiens
tatgtgggtcttttgtgttcaattatgttatgacaaatgtgctctctttcttgtaaatagacatgagtggcccaaagcaacaaattaatacacttttaaaagtcaaaattgattatattttaaagataaccaggatattatctaatggtgaattgtagaattttgatcttcttattcactgagtttcttgcacggtttctttattgctttttttccccgcctgttcttttgtaaggtatttactattttctgtggaggatattgagatgtactacaggataactgtagtgaatgatgtgtcatcattttgagctttggactcaatatctttagtgtttccctaaatcagatttgtaggtcatgttaagcttcttgcacattaatatgattatggaaggaaaggcagtgaagcataactaataaacatcataatacttaaaaaaaaaaaaa

SEQ ID NO: 237670 - DNA, 416 bp, Homo Sapiens
agttatcttctgcccataatgtacccataaagtgtacccataatgacagaacaatttgggcaaatgtgcttgtactccaggagtcctgaaggcatagttcaatgtgaccctttgagaaatctatgattctttgcagtcttcatttttatcttaagaattcatgcagattttgcatctgctactccataatgtttattttagtataaaaatatttaaatttttaaaattaacatcacttatccccactgctgtataccttgatttggaaagtaaggtggtatgcacaatcacattgaattcatagtaagtgctgagcagattggtatcttatgtttgtcgaatgtttgagttgcacacacaaattaggcttctagaacctatacaggaaaatcatcacttggtcttggacattaaaa

SEQ ID NO: 237671 - DNA, 686 bp, Homo Sapiens
gtctcgatttccctgaccttggggtctggcctgcctgggcctcccaaaagggctgggataacaagggtgaagccattgggcccgaccaatttaataccccctattaaattttttctcggtaattaagtgcctttaccgaaagatgccattctctcttccccaacctgtgtgtttcagaacttctgcaaaaggcatcacttctccagtgttacagtttctttaaaaaagaaattagtggctggacatggtggctcatgcctctaattccagcacattgtgaagctgaggtgggaggatagctttaacccaggagttcgagaccggctgggcaatgtggcgagaccccatctctacagaaaatagaaaaattagctgggtgtggtggtggcatgcacctgtggtcttagctacttgggaggctgaggcaggaggattgtttgagcccaggaggttgaggctgcagtcagctgtgttcacaccactgcacttgcacttcagcctgggtgacagagtgagacactttaaaaaaataaaaagaaattaaggtaatttcaaattggcatgcaaaggaagtcaagatttattccttttttaccatgtcaaacattatttcattcccaaattataaaatattgctgcttttcctagagggagcagtcatgattactactggatccacagataca

SEQ ID NO: 237672 - DNA, 474 bp, Homo Sapiens
acccctggtcagttaaatcacagtctctggaaaatggagtccaagcttcaggttgtttgattttgaaaaggctcccctggtgattctgatgcgaagtctacacaggctctggccttttcctcctcctctgaacttatcacccacactctatccttctccgtttctgttccagccacaccaatttccttactcttccttaaacatggcaagcatccacataagatgttcctgagagaaacactgctgaaacaagaaaaagcagtgacagcaagatgattcttgccatcatactgatgcgttttagttgaattttaaaacatatacaatgttaaaaaataaatcagctttgaaatgtatgcctttttgtcttgatttaaaagcagtatgctatttttcctagttttatatgtgacagtctatgcttagtcattgtttaacaaaagatccaggtactagactttcttcaatatgtta

SEQ ID NO: 237673 - DNA, 452 bp, Homo Sapiens
tttttccttccatcttctctcaggtaagtgctttagctccaagttggacagactttatgtttaaatcccagttctgctggtccccagctgtgtgactccagatgaattatctgacttcactgtgcctctgcttcctttcctgtaaaacaggattaataacaggacccacctaataggcttgtttggagctgtagaggaggtaacagccaagtagtagctcttgtcccataacccctgcttttttttttcccacctcgtcttccctgcccttttgggccctcacagtcaagatgaactgatttttggttggtcaaaatattgcattagggccaaatgggtgcggtggctcatgcctgtaatcaaagcactttggaaggccaaggcagaaagattgtttgaggccaggagtttgagaccagcctgggtgacatagtaaaactccatctctacca

SEQ ID NO: 237674 - DNA, 601 bp, Homo Sapiens
  misc_feature (1)..(1): n is a, c, g, or t
  misc_feature (5)..(5): n is a, c, g, or t
  misc_feature (7)..(7): n is a, c, g, or t
  misc_feature (9)..(9): n is a, c, g, or t
  misc_feature (13)..(13): n is a, c, g, or t
  misc_feature (16)..(18): n is a, c, g, or t
  misc_feature (23)..(26): n is a, c, g, or t
  misc_feature (32)..(33): n is a, c, g, or t
  misc_feature (38)..(38): n is a, c, g, or t
  misc_feature (42)..(42): n is a, c, g, or t
  misc_feature (44)..(46): n is a, c, g, or t
  misc_feature (48)..(50): n is a, c, g, or t
  misc_feature (55)..(55): n is a, c, g, or t
  misc_feature (66)..(69): n is a, c, g, or t
  misc_feature (84)..(85): n is a, c, g, or t
  misc_feature (93)..(93): n is a, c, g, or t
  misc_feature (96)..(96): n is a, c, g, or t
  misc_feature (105)..(105): n is a, c, g, or t
  misc_feature (117)..(117): n is a, c, g, or t
  misc_feature (122)..(122): n is a, c, g, or t
  misc_feature (127)..(127): n is a, c, g, or t
  misc_feature (132)..(132): n is a, c, g, or t
  misc_feature (136)..(137): n is a, c, g, or t
  misc_feature (144)..(144): n is a, c, g, or t
  misc_feature (149)..(150): n is a, c, g, or t
  misc_feature (167)..(167): n is a, c, g, or t
  misc_feature (174)..(174): n is a, c, g, or t
  misc_feature (179)..(179): n is a, c, g, or t
  misc_feature (189)..(189): n is a, c, g, or t
  misc_feature (195)..(195): n is a, c, g, or t
  misc_feature (202)..(202): n is a, c, g, or t
  misc_feature (204)..(204): n is a, c, g, or t
  misc_feature (210)..(210): n is a, c, g, or t
  misc_feature (213)..(213): n is a, c, g, or t
  misc_feature (234)..(234): n is a, c, g, or t
  misc_feature (238)..(238): n is a, c, g, or t
  misc_feature (251)..(251): n is a, c, g, or t
  misc_feature (268)..(268): n is a, c, g, or t
  misc_feature (273)..(273): n is a, c, g, or t
  misc_feature (334)..(334): n is a, c, g, or t
  misc_feature (368)..(368): n is a, c, g, or t
  misc_feature (381)..(381): n is a, c, g, or t
  misc_feature (391)..(391): n is a, c, g, or t
  misc_feature (442)..(442): n is a, c, g, or t
  misc_feature (450)..(450): n is a, c, g, or t
  misc_feature (453)..(453): n is a, c, g, or t
  misc_feature (467)..(468): n is a, c, g, or t
  misc_feature (470)..(474): n is a, c, g, or t
naatntnangggnaannnggggnnnnaattgnngggantggngnnnannnggggnaaaaaaaccannnnaagggtgaaaatggnnagaagaanaanttcagctgnaaaaaaaatttnccaantaatncccangganntggaccnaaacnntttggattgaaaagaanaatgccncctgnaaacattgcntaaatnttttgcncntgaagnaanaaaaagtttttgttgaaagcnctantgaatattgcaancaaaatagtgtattggntggcntcttttgtcaccctgaactcctatgttaccaatgtgtatcgtctccctctccctaaagtgnacttaatctttgctttcttttgcacaatgtcttnggttgcaagtcanaagcctgagncaaataaaattccagtaatttcgaagaatgtggtgttggtgctttcctaanaaagaaanaanttagcttgaccccnnannnnnaaaaaaaaaaaaaaaaaaaaaactctctctctctctctctctctctctctctctctctctctctctctctctctctctctctctctctctctctcctcgtgccgaattcctgcagcccgggggatcc

SEQ ID NO: 237675 - DNA, 485 bp, Homo Sapiens
ttttatttccttgtgtttctgatgctaaaaatggagaggaagtcaaactagacaagagggaagtctccatgaagtgtggaaacaagctccttgattgtggatgtgcagagctgcctgttgagtctgaggagtctggcatgtgacacactgcagacctgagacaagaagccttgttgctatgggtgacttttagtgacctataaattttgcaggcgcgccacggcactctattattgctttctttctctgagtcactaattagatcctgatgatttccatgtgaaaccatgaggactgggagatgcaaaatggttttgctgtgtagattcatgaatgctggactgttggaggatatctgagtgtgctttgcatacttggcttaatttgtttttttttaactaaaagtagttgtaggtgaaatgattacttaggtaattgttttggtaaatggcttgaagttgaaccacagcagttttgctatttgg

SEQ ID NO: 237676 - DNA, 398 bp, Homo Sapiens
caatggaattttttttttaagcaggaagggcaggagagtggagacagaaataaaccttttaaatcttctttacgtgaaccccacaaggacataagcatttagcagattagagagcgtttggatttatagatactatcctctacagtagtggtcttcaatgtgtgatccagggaccccctgcggggccccaaggccctctcagaagctccaagagataaaaaccagttccataacaatactgaggcattgtttcccctttttactacggtgaccatttgtattaatggtgcaaagcattggtgggtaaaactgctggcaccttagcaggaagcaggacggtaatgccaagctgtaccagcagtcatggtattcttcattactgtgcagttgctgttaaa

SEQ ID NO: 237677 - DNA, 404 bp, Homo Sapiens
cagtttaatgttaccgtctagccacaaatcaagcagcaaaagctattttgatgatgaaagggggtccccgttgagctggccatctagtgcagtgtgctctcagattccatgtttgttgattgtgtgtcttcacaagcccctctctggtgctgaattggatttgaattcttggtgagaggcctcagcatctccttgggctggtctgggccagtaaaaatagctgcctgacatgtttatatattatcatggtcagtagttcaatgaaatttgtacatttttggtaacattggtatacatgatgcccctgcagttccttttctgtttggtagtttgtgactctaagatttccactgttatgtgtgttaatttatgaaaataaatttttttgaaaacctttcaaaaaa

SEQ ID NO: 237678 - DNA, 487 bp, Homo Sapiens
gtgtaggctggtgctaaaacatgacacaggtctagaaagacaccaatccacccctaactcctttcctcgtctgccactccttatccccaggattacttgttcttttatgactgcttttctccttcaaagcttctcattgctagtttttatcagatttcaggtgattaaaaaagaagggcatactatgattgctgtgttcctcaggtacattcctgtgtttctctgaccttttggatcccctaacctaactgacttggtgaacaggttctgtgatggggaagggagatggacacccttctctaggagggctggcaaaaatacaccaatcacaaatagtcatctttgttgtgctttttgtttaagattgttttcctcttttgctatggtgggtgttgttcttcggatttttttttttttttggttgatagtattttaaaaccagtctacataacaactaaaaaatgtgggaaaatagctgtagttgaaa

SEQ ID NO: 237679 - DNA, 463 bp, Homo Sapiens
  misc_feature (138)..(138): n is a, c, g, or t
ccccaccaagctgtttgtgatggcatcagtctcctcatttaagactgacatttaagctgataatttagatcctgtctgcttggaggcattattattattttactgggaggctcggctaagaaggtaaaaggacacaangccctgtagccttctcctgggagcatggattattttttcagattccctaagtgctgggagatggatgagtacattttaagggcacttggaagtaggatagaaggagtgaggtgggatctattctcctaagtaccaaggctgtagaaccataagttagggacagaggagaccactccagaacagagcattaaaaaggaacaagaggaggaatagcaaagaaaaaaatgtctcctttctgaattttgctaaatgctggccccagccccaagtggaaaaagcatgatattcttttaataaatcagctttgaaatgacttcccaaatgg

SEQ ID NO: 237680 - DNA, 644 bp, Homo Sapiens
gcacatgctagcttcccactcaagtctggcagcgctggggcatcagcacacctcttgccacccacactgataccagaggggaaggctgtgaggtggctgggggttgagacttgaggtttctaactttcctctgcacacctgtggctacctggtgtttgtctcttgattccctccacctgcctcacaccctgcctccgtcgggattttccacctacaccattcaaaaggaacataggagagggcatgaaggggctaggctgaagcactctgatgactggggccaatttgtggctgaaaatgaatacattttttgaaatttatggtcattttcaagtgatttagaaggttgatccttagcctcatacagtgatgaaataatctgtgtgttcagagccaagcaggactttagcaagagtctgattgtattgtcactatctcgggaaaaaaaaaatacaaatacatttctctgatctctgatggcaatgaagtttgacttgtaatttctctggctgaggcttcttaattgctttctgggcagaatgtagattttggattcctgtccatgatgcctaatgttgatctcactttccttgtttctctcagttgctcattaatgtgtatttattaaaaaaaaaaaaaaaggg

SEQ ID NO: 237681 - DNA, 583 bp, Homo Sapiens
tccctcgcgcctgtgagtggctccggcccaggaccctcccctgctcgatcctctccagtaaatagaccttcctcagccaccaataaggcactatctccagtcacttcccggaccccaggggtggtggcatctgcccccaccaaaccacagagtcctgctcagaatgccacctcgtcccaagacagttctcaggatacgctgacagaacaaataactctggagaaccaggtgcatcagcgcattgcggagctgaggaaagcaggtctgtggtcccagaggcgtctgccaaagctgcaggaggccccacgccccaagtcccactgggactatctgctggaggagatgcagtggatggccacagactttgcccaggagaggaggtggaaggtggctgctgcgaagaagctcgttagaactgtggtgcgccatcacgaggagaagcagctccgtgaagaaagggggaagaaggaagagcagagcagactgaggcggatagccgcctccacggcccgggagatagagtgcttttggtcgaatattgaacaggttgtggaaataaaactacgagtagaattaaaaaaaa

SEQ ID NO: 237682 - DNA, 603 bp, Homo Sapiens
ttactaagcactttcagtatagataaatgaaatacaggctaatctttaggtgtcttaggaatttttgctttttgaaaaagaaaagctaatagcctaactgcagaggaactgagtggatggggtagctgctgtatagatttttagatgagatgatacagtgtggattacactgtaccttgggcgggagagtttgttcttgatatggaattcatatgcttttgaattgcactaataactcagcattaacaagtatattactccttaaattatacatgcattttcaatattcctaaccaaatagtttatagcttattgagaagaagtctgttcttggagagatgttgaaattagatgtttattaaactttaaaatataatgccttaagctgtggcactttaaaaacatctttatatataaattgctaaaaggactgttaatgcttttctcagacacattggcattttacaattttgcacatggtttatttgaaatcaaaaaataactatactttgttttataagtctacctaatatctcatttttgattctcatcgttagcacagttttgttgcttttattaaactattttaactgaaaaaaaaaa

SEQ ID NO: 237683 - DNA, 636 bp, Homo Sapiens
gcaggtatcttcatacaatgaatcaaaaagatcagaatctcttatggacatacatcataaaaagttaaagagtaaggctgctgaagacaaaaataagcctcaagagagaataccatttgaccgtgataaagatctcaaggttaatcggtttgatgaagctcagaaaaaagccctaataaaaaaatctagagaactaaacaccagattttcacacggcaaaggcaatatgtttttataatgataggtattattagaaaaaagttatttcttgagttacacctaagaggaagaagtaacatgatggaaagtggttggagatagcacccaattaacatcgacagccaagtcttctatttcagaatattgatttatttcgctttggcttttgatgccatcatgagatttaagtctgcagtttcaaaagctcatgctacttagaagagatgatttttgcagcttaaaaaattgcttgtgactgcagtatgtacacagttaaaaagctgttcactgcccctttcaaccttttcattttgagctttactaagagaatgcttttaggaacagaattcctaaagtgtaattttttatgtataaataaagttttatctatatctgaaaaaaaaaaaaaaaaaaggg

SEQ ID NO: 237684 - DNA, 597 bp, Homo Sapiens
atgatgaatcaaggcaataatttctcaaatgttcttttatttctttgtttttatctcgactttttattttccattttttctagtacgcaaatagtgtaaaattgttttaatgcctggactttgaaacaagtaacaagtgtttgaaagtatataatctacgagcgaatttgccctccttggactaaccacatacaaatatgaatctggctgcaagaacaggatatccaggtaactagagagtgggcattgataaaaatatctggtggagaagcctaggatttcaactttttgtcagaggattcctgttgggacagctttaccagaaaagaataatagcggatatgttcatccaaactaagaactttcatgcatcttgcattgttacatagcctgtggaatgaattcattttttctcccttgagtccaggaatgacttccctggaaaaactcaatctatatacagctgtgccaaaatgaaggatacctgcctctccgaaactttcactgctgcttctgtcattgttcacttgtcagataaaattttattatctcaggatgcaaatttaaaataaagtgtaaatctatgttaaaaaaaaa

SEQ ID NO: 237685 - DNA, 629 bp, Homo Sapiens
taaaagagctgtggaatcagcagtgtttttggttggcaacaaacgagatctttgtcatgtgcgagaggttggctgggaagaagggcaaaagctggcactggaaaaccgatgccaattctgtgaactgtctgcagcagagcagtctctggaggtggaaatgatgtttatcagaattatcaaggacatcctgataaacttcaaactcaaagaaaagagacgtcccagtggatctaaatcaatggccaaattgatcaataatgtatttggaaagagaaggaaatctgtttagtagacaggtaatcctgggagatttcctatatcagagagtttcaaacattcacatgataattaaactaacctttgtatgcaatttttttttggtaaaaagaattctcttggagatatgaaatgattgagtatgaaccacagctgtgttttcaaatatgtagtttgcctttttggttgttgtaccctgctcactctccttcacacagaacctttcatttattgtacaacatcacactcaccctaacctactggcggacagcgatcccagtttgccttgccaaataaactctgtttatgtgaatttattaaacgaccatgccataaaaaaaaaaaaaaaaggg

SEQ ID NO: 237686 - DNA, 618 bp, Homo Sapiens
tatattgaaaagtaatggcattcttgctcatgatttgcatttgttagtgaggtctcaccatagtattttaatgtagcttcttattaaaattttattcataaatagtttagcagtcacagaggtgaaaaaaaaaaagatttgcaccatcatatccgagtctttactaataaaatgaggctgcttaagtacccaagtggagcaagggaagagttactacagttactgtaagtctgagttagaaaaaatacagagcatctagttattgagcaaagcccccttttacctgttcgcttattcaaagagaaacaatagaatttgcttctcagtacatgtttttaaaattgagaatctctgatgtgacaaaatcaatttttacaaaagttgaattaaaaacttttaaaaattgcttgtctttgggggtatgtctacatattcgtttaaatttagaaattcccacatgtttaagatatatgcccatcccctttttagagtaatcaaaatttctatcacagttcacatactggaatacatagtaaaattgagatgtgtccaagagattttcaatgttaattagctcattctaaatagccaatataaggtaacttctgtttaaaaaaa

SEQ ID NO: 237687 - DNA, 596 bp, Homo Sapiens
aaatagatgttttgtttctgttttttactgtgttcccaaaattaaataaatgttaaccaagtcacagtgtttttggttttgtttttctgaaatcttggtttgatcaaatctttttttttttctcttgagatggagtcttactctgtcgcccaggctggactgcagtggtgcgatctcggctcactgcaacctccacctcacaggttcaagcgattctcgtggctcagcctccctagtagctgggattacaggcacacaccaccatacctggctaatttttgtatttttggtagagatggggtttcaccaagttggctagactagtcttgaactcctgacctcaggtgatccacccgccttggcctcccaaagtgctgggattacaggtgtgagccactatacccgaccagatcaaatctttttttgacatttttgcaaaaaaattttcctaatgttcttgatttaattgtatagaatttgtataattaggtgtattttatttgcctctagctttgaggtatcataatttatgtatcttatgtgaattttttgctgtaataccaataaagttttttttctccacatgttaaaaaaaa

SEQ ID NO: 237688 - DNA, 627 bp, Homo Sapiens
aatatgttggaagttaccaagaagttcatgacagatctatttcaaattctggtgaagaaggaagaattggcccttgaaagaatcagtgttttacaataattttgaaagagggtagcgacagaaggaagaaaacattatcaggagggaattcagataaaggacaaaccatattttgactgctactgacttgttgaactggcagtcggggtcaacttgggaagacagctgtgaccataaatattaaagaagacaaaaggattctttgtgacactgagaccttctgcagtaccacagtggaggaaatgccagtgtacacaactggcctcatttaattcctgggaggagatagtttgggatgcagtgcttgttgttgctgagcaggcgatcacagcatgcactgtgtttctttctttgagaatatttgaatcctgcctgaatactcgtaacagatgagagacgcaggttttgatagcatagatttacgctgtcattagtcatgagctcttgggacgaaagtaattggttttatcctctttagagttagaccctgtggttgggtatgaaagatgagtgtctgtaaaaatccttcttagaaatgtatttcctcaagactctgtctcaaaaaaa

SEQ ID NO: 237689 - DNA, 617 bp, Homo Sapiens
tgaggccaaggtgggcggatcacctgagctcagaagtttgagtccagcctggctaacatggtgaaaccccatctctaaaagagtacacggtcctagagcagtggtgtgcgcctgtagtcctagctacctgggaggctgaaccaggagaattgcttgagcctgggaggcagaggttgcagtgagccaagatcgcaccattacactccagcctgggtgacagagagagaccctgtgcccctcaaaaaaatgttttttttaaacaagaatctctcaggcatactgaaatgttgaagaggaaattatattaatatctgggacttgtttccaaatttggaattggggcagggtgtaaattgttggcaatatcaaagaaacgaggagttggaatgataattgtagaagctgcatgatagatacacattctttatacttctgtatatgttgaaattttttatcaaattataattgtgtataatgactaattatgctttcattgtctattctgtgtggttatgttacttgctgaaattaatacataaagagtcttcaacttaaatgacttatcaagcataaatattaaaatactggatgttactacaaaaaaaaaaaaaaaaggg

SEQ ID NO: 237690 - DNA, 615 bp, Homo Sapiens
ttggtagccaccagtgggtgtgtggggcagtggctgtgggggtgtaagaatgactgcaacaggcacttcccaacaatggcctgctgttcacatggaccctgagcaaggaaggagggagggaggggcagagtggagtgtcattccagcattcctctcagaagggagagaggttttcaggctggtgccatgcgattggaataaagcaggaggctcatgggtggttgctgaatgaagaacagaatcttggtgctttgtggctcaccacagccatctgtggggcaggcacacacacctcccgccagctccaattttgcactttttccctgcttgattccaagagtaggtgctgcctagcagcccttcgtggccactctttactcaggagggccttgcagagtcctgcaccaggcctgggtgagtggatgcgcctcttaccatatgacacgtgtcaagatgcccttccgccccctctgaaagtggggcccggccagcactgctcgttactgtctgccttcagtggtctgaggtcccagtatgaactgccgtgaagtcaaaactcttatgtgttcattaagggctcaataaatgttagctgaatgaaaaaaaaaaaaaaaa

SEQ ID NO: 237691 - DNA, 630 bp, Homo Sapiens
tgcatgggtttttaaaacttctcaagtattaaaactaaaagctttaggtgctttgcttatcaagaaatcctacactgtccactggagacatccatgtttttacttggctctgcccctttagtggtccctgtgaaccttacctcaaaccatgcatctggggcagagatccttacttgcttggtggttacaaatgcaaatacagtgaagaatgtcatctttgtgattgttcctgaaatagttcacgagaaatccatgaccgtaaagtactgtgatagtgatgtctaccactgtgagcttccagtactaggtgattggtctgcattcacagtgaccaaaatcagctatgtggccaggtaattcactgctgagggctttggattttcctttatgaactactgaaatgaggtcaacttgactattactaagggacattttgctacaaagaatgttagttttgccaattccctttccaaatctaaaatttattttaaccaggattttagatgtaaacatcaagtagttttggttgtttcaatgaagtaacatgtttaagctcacattatttgaagtacttcagttcctattgccatgaaaattgtatccagcagctaaaaaaaaaaaaaaaaaaaa

SEQ ID NO: 237692 - DNA, 603 bp, Homo Sapiens
cagcctccagagtagctgggactacaggcatgtgatatgatgctcggctgatttttgtttactttttagagagatggggtcttgccatatttgccaggctggtttgaactcctacaactcaagcattcctcccaccttggtctcccaaaatgttgggaccacgggtgtgagccaccgcgcccagctagctcctgtgttttgtttttgttttgtaactttggttgatgttaaggccctccattttggaaagcaggaaaacaggatttttttttttttatcttgttccctggaggatccagggatgaggatagagtggcctgagagcagtgcttggattcagcctcctgctgggtccttctgctggatacaggcaccaagaggcgggggtggagcagggagctgcgccttcctggggtgcccggtggtgtgtagagaaaagctgcttgtttactccttaagtcaatgtattggtgactgttgatttgttgaacaattcaggaatcaagggctgtggagaaactccctcatgttgttggcaacaggtgaatgaacctagagcggtgacatgaaaataaagctcactgttactcgcaaaaaaaaaaa

SEQ ID NO: 237693 - DNA, 533 bp, Homo Sapiens
aggcatgagccactgcacccggccaggttttgtttctttaaggattagcacaaatggcaccgttgggtttttcttcatacaatttccaaaataaattctgtactcaggttgttatatgattttctgagctgaataagttcaggagcagattattaagatctgccattctgaaacgctggtctttttctccttcctatagtgcaccataaaattctgtttgatcagattatattacatacattttgggggagtggagggacatgagttaagtagcccttcatgtatttataatctcttttctactgaatcaaatgacttagccatgaccctgaatggaccttgttttacttcaagttgagatgtctgccttttatgaatttgtatatgtgaatagagtttgggggttgccaaaaattgcatacattgtatgtaagtaaaattttttatgaagtagtctgtcaaattgtatcataaagtttatttttcttttatacgtaaatcattaaaaataatcacatattttttcaaaaaaa

SEQ ID NO: 237694 - DNA, 585 bp, Homo Sapiens
attcctctaagtttcatttcagacgcaccaggatgttgccggttagtggcgcattccacacccgcctcatggagccagccgtggagcccctgacgcaagctttaaaggcagtcgacattaagaagcctctggtttctgtctactccaacgtccacgggcatagatacaggcatcccgggcacatccacaagctgctggcccagcagctggtctccccagtgaagtgggagcagacgatgcatgccatatacgaaaggaaaaagggcagggggttcccccaaactttcgaagtaggccctggcaggcagctgggagccatcctgaagagctgtaacatgcaggcctggaagtcctacagcgccgtggatgtgctgcagaccctcgaacatgtggacctggaccctcaggagcccccgagatgactgcagggggctcaaatgcaatgaccccctctgtcctcctgaggagaggctgtaggctgtgcctgtcgccccctaccttcctaatggctcctcctctgaggagtgaaagggatttgtttgcaacgtgctttgaaggccacataaaaagccctaaaaatgaaaa

SEQ ID NO: 237695 - DNA, 547 bp, Homo Sapiens
aaattgctttaaattgagcatatttatgtatattggataaaaatgtactacagagcaaatttcaaatttttcattatatcagtctttttgaaaggatcaacttggataaaataaatatataatgctctatttgttagagctctattaaaaaggaaacagattccatagatctaagtcaatgtttctccagaagcatgattttgtctgccaaaagaaaatagctctctttggccaaaatgcaaaattacattgctataagaaaagttacaagggaaagtttgaagacacaaatgatttaattttggctcaaaaactgaatttgcttaacactgctacataatttgggtgaagtttccttctgcccgtttttcttgacctagataaatacactttgagaaatccagatctaataaatgtcaaccaacattgacattgtaattgggtgattacaataaaaggtgagcagtttgttgtttattaataattagcttttgcaggtaatgaaatagcagggaagtaacatgctgctttaggactaaaaaaaaaa

SEQ ID NO: 237696 - DNA, 558 bp, Homo Sapiens
gcctctctccttccttagatggggaacaggatccctttttgggacaatcaagaaaaaaactcatgtaaacagtaatcttattacttgtatttgtgactaactccagggaaaagggtagaatatttaggccacttcaggcactaccatggagtgaactgaattcatacggatggcttgggctgacacagtttcttcccagtggaccaataaatcagactcacccgaacccctggggttttggtagaattggacctactctaggactgtggggaactaaaggagcatttggctcactgtagctcttctatcatgagccttgaccgtcaggccgcaatcagaccttactgatgggatctctgcagtttattacgtaggcctcccgttaccctggtacccaaatacgtcccccacctctagctccctagcctcacattgaatgtctcttcaacagcagattgtggtggaagttatagccgtgtgcctctatttattctctgaattgtactgtagaaaaaggtgtttataaagaataaagaaatcaccagaactgccaaaaaa

SEQ ID NO: 237697 - DNA, 559 bp, Homo Sapiens
cagccccagccccaggcccagctgcctttggctttgatctcaagtcaggctgaaggcagcgaagcctcggggcccaagcccctccccagccccctctcccggacagacgccttgcccagggtgtgtttgctgagtgtcttgactaccgtgacaccacgcatggccagagctagcgtccctactgcctcccgactcctcagtggaggaggagctgcggtccctctggtgtctgccatccccctccctccctgggcccggccctggacccgtcaggtgcctgtccccagccccaaccccactcatgccccgtcgtcctcccagacaaatgaaaccacgctgcgcttccgatgcccccgcttgccgtgtaatggttcagctaatcccatggcgagatgggggctcactccggaggaggagccaggcagcagggccttcctgaccaacagccagctctgtccttccccccaggaaacacatgttcatttgtgtgatcatgtatagacctcagaacggaagataggactgtatataattgtaataaataccagttgccactaaa

SEQ ID NO: 237698 - DNA, 544 bp, Homo Sapiens
cctctaaacagatccctcctcttctcggagacctccctttccaagcctgcctggacggctgttctgtgacttgacagtggctcccccagccccaaagccagcccccttcatctgtgacttaatctgttgtagtggtgagctgatacattcaggtgtgaccgttggtgaaaacttgtgccccttctgtggtatgcccttgccctgttctataaatatctataaatactcatatatatacacacctacacatggccaaccgcctcgcctctagcgctgggaatcagtcactgtgctatccttgtggagtcttgtggcccaactaccagagaacgctgtcccccgacatcccactccaaagtgtgccacctccagtgagcctccttgtcatgcccggcctgtggacagccagcccccgccatccctcccaccccctaccaagcatgggggtgctgtgcaggcagccgtgtggcctgacagtttctaccagtcctgctgtccctcggctgagaataaaacccatttctggatgatggaaaaaaaaaaa

SEQ ID NO: 237699 - DNA, 586 bp, Homo Sapiens
tatgagtgtaaggaatgtgggaaggccttcagacagcacgcacagctcacacgacatcagagagtccatactggcgacagaccctatgaatgtaaggactgcgggaaggcatttagtcgtagctcatacctcattcaacatcaaagaattcatacaggtgacaaaccctacgaatgtaaggaatgtgggaaggcctttattcgtgtttcacaactgactcatcatcagcgaattcacacttgtgagaaaccctatgaatgcagggagtgtggaatggcctttattcgtagttcacaacttaccgaacatcagagaattcatcctggtatcaaaccttacgaatgtagagagtgtgggcaggcatttattcttggctcacaactcattgaacactacagaattcatactggttagaaagccttgagtgtaagggataaagataagcctttatgtggagttcacatctggctcagtactaggtaatttttaatgtagtgtaattaatgtcagaaaacacctgtcacttccatcatagaacatcagaaaactcacacccaaagaaaattaaataaatgtgggaattaaa

SEQ ID NO: 237700 - DNA, 572 bp, Homo Sapiens
caggaataatttgaaatgtgtgaggtgactccccggagggccttgggcttgggcatttgggaaaagaatgatgtctggaagggcttaagggacacagtggacgaggggagagtcctcatctgctggcattttgtggggtgttagtgccaaacttgaataggggctggggtgctgtcttccactgacacccaaatccagaatccctggtcttgagtccccagaactttgcctcttgactgtcccttctcttcctacctccatccatggaaaattagttattttctgatcctttcccctgcctggtctagctcctctccaaacagccatgccctccaaatgctagagacctgggccctgaaccctgtagacagatgccctcagaattggggcatgggaggggggctgggggaccccatgattcagccacggactccaatgcccagctcctctccccaaaacaatcccgacaatcccttatccctaccccaaccctttgcggctctgtacacatttttaaacctggcaaaagatgaagagaatattgtaaatataaaagtttaactgttaaaaaa

SEQ ID NO: 237701 - DNA, 561 bp, Homo Sapiens
catgttggccaggctggcctcaaactcctgacctcaggtgatccacctgccttggccttccagagtgctgggattacaggcgtgagccactgtgcctggcttccatcctcttctatcatttttttaaatctcttctcctatcataaaattaatttctcattttttggtcaggtagaattgggaaagtcccacactgtcctcctattaccttaacatcccaagcttcctttccttttttggtctttatgaatatatttatatggacagaattaagataaacaaaattgattgccccattctctcacttccccatcttgtcttcctagaccccacagagttaaaacttgggattcccctggcccccccagaacacttgtatattgtttgtttgaggttcgtgccgcagtaacagacacagtatttaattgcacatacagatgtttgctgggtatattcactgtaaattttatttaatctgtttttttgtttgtttgggggttatttggggggaggttggttttgtttttaaatataaaaaaaaaaatctgtccctggaaaaaa

SEQ ID NO: 237702 - DNA, 589 bp, Homo Sapiens
ttaaaaaagagttttctttagtatagccacaaatgccttgaactgttgtctgggattgttttgtggggggagggaagggagtgttccgaagatgctgtagtaactgcctcagtgtttcacgtaagactttttggtttgatcatctttgttgaggtaggactatcagttccctctaaatgtatatgttgatttatgagtaattgttatttattctttatttatttatattaattatgaagattatgatattatttgattgcagatttttttggcgcgctgccccctccccaccctgccactcttgacattccactgtgcgttttagaagagagcctttttctaaagggatctgcttaaagttttaacttttatacctatctgagtgaattacagacaacctatcatttattctgcttcgagggtccccagggcccttgtacaaccgacagctcttacttttaaatgcaatctcttttctacatacattattttcttaattgttagctatttatagaaagcttcaatagaactgtttcaactgtataactatttactattcaaataaaatattttcaaagtcaaaaaaaaa

SEQ ID NO: 237703 - DNA, 577 bp, Homo Sapiens
aaatgtaaaagtgtatctagaaatatctatatctctatatatttttaactgactctttggaatcccctggggtggggtgaggggtaagtttaggctttcgcggaggggaggagacatggagcctgggaactccttgttctcccctctgctgcctctccccaccccttaaagcagttggtagaaggaatggtatttgtatggggggagggaggctggaatggagaatctggattctctcctcttccccattctccagagggagggaggtggtgaggaagaggaagggaggggcaggatgggccatggaggtgccccacccccacacctgacaatcacccacactcctggggctcttcctgggtcctggggcagggcgagtccaagtgtgaggctgttgatttgttttcaatatttcttttcgtgctgtatggtgatgctttcttagtattctacacaataagaaaagacaaagtcctcgagattcttatgagttttgtttgaaaactctttcactatatttgttgtaaagaggtttactattaaaagaaaaagaatacacgtttctgataaaaaacaa

SEQ ID NO: 237704 - DNA, 593 bp, Homo Sapiens
tggacattaacccctgaggctccaccacccaccctttcatttcccccccagaagcctaaggcctaatagctgaatgaaatacctgtctgctcagtagaaccttgcaggtgctgtagcaggcgcaagaccgtagatctcaggcctctaacacttccaactccagccaccactttcctgtgcattttcactcctgagaagtgctcccctaactcagatcccctaacttagatttggcccccaactccatttcctgtctgtcttagacagcccttccaactgtgtcatctcttctctggaggtcaatggtggagggagatgcctgggtcctgttcttcctacataaaatgcaagaaaacagcatggccagtaaactgagcaagggccttggaatccttgagaatcacatttatgtgcttatgattacgggcaagctaattaaccttgttgaatctcagattccccatttgcaacattaggttaagaccagtactgcaggattgttgcactaaatgaaatactgtatgtgaagtgcctggcacagtgtctggtacatttgtgtttaataaaagctaactccatgttcataaaaaaaa

SEQ ID NO: 237705 - DNA, 591 bp, Homo Sapiens
agggtttcaggggacatggcgaagtttacagactgagatctcagtctccatggttggtacagtaagtctttgaccacattttctgaaggtcatgtttagtggagaaacgggcttttctctagctggtttaggctggaagctgtgtccgggtcgatgggatggcatattgttaaagaatctccattgtcgtcactgtcctgtggatgttaaacctcgtttttttccccacacgatattaaaacttaaagcaccagaaccagtcatggagaccagccagtttagatggtaagtcatatttctggtggtacacagcagaggaaccccttcactctatctttaggtagaaatatttggaggatgtgacagcctctgagaaacataatgttactatgtggattttaaaaaatataatacttgcatgtaattgctataatgttcatatttgaggcagttgtgaaactggtttatgattgttggtgtactctgttgtaaattcaaagagagcttgttgaacattttttttttttacctattgttttcagagtgtctattttgaattaaaatttgttacaccgctgcaaaaaaaaaaaa

SEQ ID NO: 237706 - DNA, 577 bp, Homo Sapiens
caaatcaattttattaaaaatccaaagataagtctttaggtatattttgtcccaaattaaattagaagacaaaaattgtgctttcatagttgctacaaaggtaaataatggagagatttggtacaaaacaacaaaatatatatatattctcatatatatatatatagctgataaaattacctgaggagtgtaatgcttatttttttgtgtatatctttgcaatctattttatatatattgacaaaagagactgtgaaatacttagccatgcagaatatgtgaccagaccagagcatgtgtaggaagactttacagtaatcattaactctaccccgaaatgatggactacaagttataatgtgtgttacctacacttcaatcagtaatattagcaaatctccaaatgttagtcacattggtttgtctcccttgtacattctttattcatgatattacagtgctgtaactgggtggtcctttttaaacaaaacattatttgcaaaacagagggtattatttgtttttaaagcttttgtaaataaaggcttcaaaatgttttcttatggaaaaaaaaaaa

SEQ ID NO: 237707 - DNA, 605 bp, Homo Sapiens
aattgacaagcacttttactgacaaatggtgaggctcagtcagaacctccaccctcccccacaccaaagacaggggcagcgtagtattcaaaccagtattgtggtggggaataattgtatacatgtaaattatcaagccctatgagtggaagaattttttcaaattatttttgtctctctatatattgatttatattatgtataactatctctttatataaactatatataattatatatatataactatataattatatatatataactatatatataactatatatatgtatcccctagtattggatcatgaagagctcttcatgcattctttgcaaaggaggttataaagttacgccctcagaacatttataactataagaatgtgccagttaaagtgctcaacaggaaatatgacagtttaaaagcattgtaaaactcacatagcttacttctctctctaaagtgcaacaaggatgaatagaatgggccaaggtatgacaattaatggttctgcatgacctagccactgctgggggttttcttctataacgttgtccttgtgaaaacttttgtgaaattaaaaaaaaaggagttacaaatt

SEQ ID NO: 237708 - DNA, 615 bp, Homo Sapiens
tatacatatacccatatgtatatacagaaaattatttttaatactttcctactgataatgaaatttaaaattggaaattttgtgagtgtttttcttgtccaatagagcctaattgtttccttttttagtgatttaacaatctcttgagggctgcacctttaaattcccagattgtcaatagacatgtacagtatatgggataaggtggacacaagtgcacatataaataaaatcttcttaagacttttaactattcatttacagtaggagagtatgtagaaatcatcatccacaagtcataattaggttgtgtgcctactgtagttttttccatttctgtattatataaacatttgcatattaaaatttgatttttcccagagacaagtattatatactgtatctatatttaaatcaaactgtggtaatatatttctcagaaaataatgttggggactatagcctgaacatgtggacttgaagcgacatggaggaggaggttgatcccattgtgtataagttaatatgtgataactattgaatcttgtacaaaaacaaaaattgaaaaaaaaaaagaaaagcaaaaatacagtttttattttgaaataaaaaaaa

SEQ ID NO: 237709 - DNA, 586 bp, Homo Sapiens
atatgagaagataacttcagtgtccctatgatggtaagttcttgaatgtgagggcaagatggctgtgatagccatgactccccgctttgcctggttggacagaacccccttccccaaatgctcacagtcccccccttgagctgtgtctcactcagagaccctaaattttgcagacgaacaagggcatctttgcgttgcttcatctctgctcctcctctagaactatcccacaggctttctagacttagaatatctgacctgatgcaaatcgctatgtggccagtatgccacagaatgtcctaaacccttgctgcctcttatcaaaaccatgttgcacatctcatcatatagtacagctaacccttgaacagtgggggggttagggacactgacccccgactgctgtgcagtcgaaaatccacataaaacttctgactccttcaaaacttaagcactaatagcctactattcatgggaagccttacccatcacagttgattaacacgttttgtatggtctgtatattatatgctatattcttacaataaacttgagaaaatgttaagaaaataaaaaaaaaaaaaaa

SEQ ID NO: 237710 - DNA, 576 bp, Homo Sapiens
tggctgcctgttagcccatcgactattcccgtcacggtagtccttacctctgtcggcagctcagagcctccacatttttatatttaattctcatgataaattagccaccataatcccatggaattaggtcttgttaaaatctagtccgggcgcagtggctcacgcctgtaatcccagcactttgggaggccaaggcgggctgatcacgaggtcaggagatcgagaccatcctggccaacatggtgaaaccctgtctctactaaaaatacaaaaattagctgggtgtggtggtgcatgcctgtggtcccagctacttgggaggctgaggtaggagaattgcttgaacctgggaggcggaggttgcggtgagctgagatcacgccactacactccagcctggtgacagagcaagactccatctcaaaaaaaaaaaatctaagcaaactatctttgagtcaaaaaaagttggataactcatctatatttgaaataatgctgtctgaatggccaacatcccaagaatgtattaaaaacagcaacctgcctaccgttttgatgacctttttccatattaaa

SEQ ID NO: 237711 - DNA, 609 bp, Homo Sapiens
  misc_feature (134)..(134): n is a, c, g, or t
gcagatcacctttgtagatttcctcgcctatgatgtccttgacctccaccgtatatttgagcccaactgcttggacgccttcccaaatctgaaggacttcatctcccgctttgaggtttcctgtggcataatgngatggtcaattttctgcatcaacttgactgggctaagggatgctcagatggcaggtaaaatcattgtgcttgtgagggtgtttccagaagagatttgcctttgaatcagaagacagcaaagatttccttcagcaatgaaggaggcatccaccaaactgtcagggcccagagagaagaaaaagacaggaagggtgaatttgacctctctgactgggacatccatctctgcctatcctgggacctccacactcctggttctctggccttcagacttgatcagggactaacaccatcgcctcccacccccacctttgttctgaggcctttagcctctgaatgataccactggctttcctgcttctctatcctgcagtcggcagatcatgggacttcttcactccaaaattgtgtgagccaattcccataacagatagataaatttataaataaacacacaaatttcctacagccttaa

SEQ ID NO: 237712 - DNA, 589 bp, Homo Sapiens
tgcaggcgtaggaatatggacatctggttgctttggcctgctgccctctttcaggggtcctaagcccacaatcatgcctccctaagaccttggcatccttccctctaagccgttggcacctctgtgccacctctcacactggctccagacacacagcctgtgcttttggagctgagatcactcgcttcaccctcctcatctttgttctccaagtaaagccacgaggtcggggcgagggcagaggtgatcacctgcgtgtcccatctacagacctgcagcttcataaaacttctgatttctcttcagctttgaaaagggttaccctgggcactggcctagagcctcacctcctaatagacttagccccatgagtttgccatgttgagcaggactatttctggcacttgcaagtcccatgatttcttcggtaattctgagggtggggggagggacatgaaatcatcttagcttagctttctgtctgtgaatgtctatatagtgtattgtgtgttttaacaaatgatttacactgactgttgctgtaaaagtgaatttggaaataaagttattactctgattaaaaaaaaaa

SEQ ID NO: 237713 - DNA, 591 bp, Homo Sapiens
agcagtcaggcctgttgactctaagcagcagacatcctgaagaaatggtaagggtggagccaaatctctagaaataagtagtgaggccgttaattggccatcactgatggcccttagggaaagactggacctctgtgccaagcagtatccctgttcagcccaccttaaaggtgtaggcacccactgggtctaccagtatgcaggttgggatactgaaaatttccagatgagctcttctttcctacaagttttcataattagggaatgccagggtttagggtaggggttaatctgttgggggttgatgtgtttagcaagaagctactcctagcttttgctaaaatatggttggcactgcctcttgtggcacaggccataattgttccatagacccctctctagccctgtgactgtagttagttactttgataattttctttggccattgtttgtttatatttcacaaactccacctactgcccccccccctcttttttttaagaatggcctgatcatggctatctcagccacattgttggcaatttaatttatttacttccttttttttttttaagaaaggaaaaaaaaaaa

SEQ ID NO: 237714 - DNA, 614 bp, Homo Sapiens
ctaagaagttacaattacaaaaagtaagcattttctacattcttacttctaagtaatgaccttctcattaatctttccttggcttaaaatgacaaataagaatccaaagtttttccactcctcctgtgggagataggaatagttgtgaagagtctgatggaataaaatgactccagagatttacacagccaccatttgatcccagcctttgtccttgtgttatttaaacaatggcttcctgctttctcaggggtcaggaaaatgatttaaaaatttgtcttcttgacaaggcctgaaaacgaagggaggtgtcgtggagaaatggtgatttttctggttacatcacttgattcaagcactccctggagctttcaaagccttttttatctgctcagagttgacacccaactcagagtcagaactcaccagaagatgaggaacacccccgaaatcaatgtttcctttctccatgggatttttttcaatcttggtacagctgcatatctcccaaactcggatgctcttgtgaaatgacagccacatcagtgtggttactccccacaaataacactagggggaaatgaccttttttatttaaaaaaaaaaaaaaaggg

SEQ ID NO: 237715 - DNA, 634 bp, Homo Sapiens
cttcctctctcttctcctactctgggtcttctatcctggtgttccttgaatgcctatcttccttttgtgcctcggaacctctcacgcctgccacaagttactcttttccttggtagttctgaactttaaataaggtaatgcctgtaagaatgccataaatgctcaataattgtcatctgttattattttcatcagtaacatcatctgaatcatcagtattgtctgcttttaacagctgcatttttcattgtccaaatatagtcacatacatttgaccattttataattattgaataataaattcgttctgctattttacaatgaaaaataatgctgcagagagcatttttgcacatgtatcgtggcagatgtaggccagaggctcttcttttatccatcctatggccaacctatgaatgtatacacgtttaatgagattttgccagcaatcaaagccttcagggaaaatgtccctagctctttactacatcagatcaaggactctggataattggcataacatcctggaatagctgaaacagagatattattctctgctgtcctctgttgtctttgtcttttcacgtcttaataaaagtgctggtgacaagagtgtaaaaaaaaaaaaaaaggg

SEQ ID NO: 237716 - DNA, 615 bp, Homo Sapiens
aaaaccttgttccttggcaatttcactaagcagctggatgtaatctgtatttggaatactaaggaggcttcttttcagtaagttgatcttttcaccaggagaattcctcaaggaatgccaagtacatcctaaagaatgtcctactacatttgtctgaaaaacagagatgaagatttagactcttgactaggactgggttccaacacccgtaccagtatcattaaaagtacttattaagcactcacatttaatatgttataaagcatgtttaaatggataacatttggttaattttccaatttaaacaagacaacattaaaaagtacacatttaacaatactatatgtttttaagaagcacttgcaataatatactgaaagcattttgtattttgtatagtacaaatgtttctcagtcaagttttctgatggtcacattaagaggtacaagatatctggaagcaccataagtaaatccacaaataattaaatctgcctaatggagcaatttgcagattaaaatatagaacaattttcatatctttggttttttttgtattaaataccaatcactataactgacagctatcaaacaggaaaaaaaaaaaaaaaaaaa

SEQ ID NO: 237717 - DNA, 588 bp, Homo Sapiens
cccatcctagagcctggctagctggaagacgcggtatggcagggacaggagggcggcaggaagggctttgtggccctgctggggccaaaggcagttttctgtgctccctttagccccagcctggctggccaggtctcctgtacttcaggggaccatggggccgcccaagccagtcaccttccccttccaagctctccccccatgactgttgatttctggcgcgtggaggcagagttgtgaatccacaaatgctgtagcccatatctcgtaatgtgtctgtgtccacttagagcctcacgacctggctgtgtgtgtgcatgtgtgtgtagtatagtttgtagttgacaatatgtgtatataatagctggtgtatttatatgtgagtgcagaattagtgcccgtggcggttttctgtattttaaacccattgaattggttagttttattttagggaagtgggaaaggcggagtggggggaagtataggaagaaggattcttagcaaaatcattctctaggactattagtcgcgatctcccagtgagccatcacgatgcccttttcaaataaatgttaatgttgtcaccaa

SEQ ID NO: 237718 - DNA, 560 bp, Homo Sapiens
gcagggtcactcatggaggcctaggggaacagcgagatgccccaccacctcctggcgagtccttcctgttcagctccctgtgcgaccctccagggatgcaggggatccaggattctctgccctgtcacacggcgagtcagaagggaggggcctttccctcggacccatggccccaggcagagttttgcaccagcaggacccctttgagggccttcaaggctctcccaggagtccccctctgccggccccccaatgccccagctccctcttgggtcctgtgccaagtccgccccagggcctggggctgttgggagccaagggccccctggtactcagttccctcacgattcccgatcacgggcacacctgccccctggttatttgtaaatatttctattggacccaattctcctcggaattggctggcacctctggctgccgcagctcagtgatgacgtgggggaggtgggagaggccgagggctttgcctaggggtgggttgccctgtatacatgatccagtctgtgactaccagccaacctgaataaagcggttttaaa

SEQ ID NO: 237719 - DNA, 602 bp, Homo Sapiens
gcttcgatcacttcctatctgacagtagcagtggaagtgctataaccagccgacagcgggcacgagggggggtactaaggatgaaactgggcttcctgagagggagaagtggagcacgcacccagggacgcttcctgcccagcccgatgacatgtgaccaggggccgctaaggaaactgttccctgaatgccgagatgagagaataatggggtcccaccatccatgggaaatgaggggggatctgcagaggctggaggtgcagcctaagaggactgactcaaattcagctgttaaagattccccaaagcatctgagacaccatctggggtgcagcacaacagaagacgtttaagatgggaccagaaagaagaatgtatagctcttctctaaataaacgaatggtctgccccaagccttcaggaaggagaatggtctatggtgactggggaaagttctctttgcaggctaagagatctggccagcatgtttataactgagaaggctggggagctggagggcaatggagtggttcctgcaagagtcaccagggaggcttatgcaagttatacagcagtaaggggttgctggagaaggcaggatc

SEQ ID NO: 237720 - DNA, 588 bp, Homo Sapiens
aagatcagagaagagagacagcaaattcaaatacctttcaagaagtttggtggtgaaggaaagcagagaatccaagtgatagcttaaggatcaaggctggtttgaaaaaaaagataattggtgctttatttttcctctaggttaggacaggcttgagcacacttgtagctagagaggagagttgccagaaggacctgaagactgaaagaatggagattatttccggtcccataaaagtcaagagtgtatatgggatctacagcacagctagaaaggtttgacccaacagggagtagagacatttctttctctgtgacagaagggtaaggaaggagtaaagagaaagacgttgaagaatattatcaaatactgcagagattaatcgtacatttgcagtagacctgggatcccatgtagttctttagttacataatcaaggtagattttaagtatttgagtcaaatgaaccaggtttgtatgtaatcttaaaagttttttgcaaaatcatcaggacagtttcaataaaatattaatgaaaatgttataaaagcgttgactctgatttgggtaagaaaagtaaaaaaaaaa

SEQ ID NO: 237721 - DNA, 606 bp, Homo Sapiens
aagcagaactctagctatatggggtagaaataaaatctctgagatgaaacaaaggaatcaacatgataaaatttaggcgaagtagttaagaaatggcccttttgaatgttgaagataggaaagaaagccatatattcaaatatgtaattttcctcatttagttataatgacatctttaccaattgggcttcataaatgtgtttctttcttaatagtatcctagttccagcatatattcaacatgaattttatcattctcctcctaatggaatgtcttccttatagaaatgttcacgacaaattcatttgtgttttttacatgtcaataatgtatgctaaattaaaatgttttccagttattctgatagatgtcattatggcatccttaatttttcttctccttctgtatatagggtaagggactgttctgaagaacctttccatttagtgatcaagatatggaagctgatttctgaaaatgctcagtgtgtactctaattatttatggtaccatttgaattgtaacttgcattttagcagtgcatgtttctaattgacttactgggaaactgaataaaatatgcctcttattatcaaaaaaaaaaa

SEQ ID NO: 237722 - DNA, 602 bp, Homo Sapiens
atcttggctcgctgcaacatccgcctcccgggttcgggtgattctcctgcctcagcctccctcgcaagtggctgggattacaggcgcctgccaccatgcctagcaaatttttgtatttttagtagagacaggattttgccatgttggccaggctggtctcgaactcctgacctcaagtgatctgccctcctcagcctcgtaaagtgctgggattacaggggtgagccgctgtgcctggctggccctgtgatatttctgtgaaataaattgggccagggtgggagcagggaaagaaaaggaaaatagtagcaagagctgcaaagcaggcaggaagggaggaggagagccaggtgagcagtggagagaaggggggccctgcacaaggaaacagggaagagccatcgaagtttcagtcggtgagccttgggcacctcacccatgtcacatcctgtctcctgcaattggaattccaccttgtccagccctccccagttaaagtggggaagacagactttaggatcacgtgtgtgactaatacagaaaggaaacatggcgtcggggagagggataaaacctgaatgccatattttaagttaaaaaaa

SEQ ID NO: 237723 - DNA, 572 bp, Homo Sapiens
taaataaaaataaaacaaaataagtgtatctgggccaggcacggtggcccatgcctgtaatcccagcactttgggaggccgaggagttcgagaccagcctggccaacatggcaaaaccctgtctctacaaaaattagccaggtgtggtggcacatgcctgtaatcccagctactcgggaggttgaggcaggagaattgcttgaacccgggagacagaggttgcagtgagccgagattgcaccactgcactccagcctgggtgacagagcaagacttcgactcaaaaaataaaataagcgtatctggatttttcttttgaattcttgactgataagtttgagaatgtatgtttttggaattttacagttgactcaagtgtgaaagtatacacaagtaatttttcttttctagctatgtgaatgtaaaatacttgcagataatgtatatattgtgtaatatatgtatatttggtcataaaagcagataattggaaacattgtaaaattaagcactttaattcctattaaatattaaacatttgtatcttgtaaataaacacatccttaaattaa

SEQ ID NO: 237724 - DNA, 591 bp, Homo Sapiens
agttttactagagatggggtttcaccatggccaggctgatctcgaaatcctgacctcaagtgatccgcctgcctcggcctcccaaagtgctaggaacacaggcgtgaaccactgcaccaggcctgcagtcttacttttaatcttacacaggcctactttttctcatggttctcttctcatctctgaaataggaatcactacctggcacataatggactggtacttaacaagcagaccatgtgtagaccacccatcctgaaccaagattcctgggcaaggctcttaattcatctgttactgaacaaaagcaaaactgctccacacatgggccacataatatagccacttgtttatttaaatttttgacctatgtgataaatcctgatgctcagttgtctaaaaatgtctttgtaagcatctgaatatacctaatactgaaataagagtttaaaaagctgacaacacaatccaagttttacatttatttactcataattaactcaataaacatactagattttacatttaatatatgttaaaatgtctgaacaaaaatatttagcgtaattttcttttttttggagatggagt

SEQ ID NO: 237725 - DNA, 592 bp, Homo Sapiens
tgcaacaggggacatgtccaacgtgcagactccacgttttgctaccagaagaattccctggtcaccccagccggcagttgcccaagatctgatacaaggtcggggtgtctatgcaaaggaagctcagttttcttttattatgagctgcttgtttgagtgctgtaaaactatgtgctcttcaatatagtgctaaagaagccagctaattttatcaaagcagcagccaaagaagtcaggacaaatcttcaggacttgtgaaatgaactgaaagagcttgaagcagatggaattttaatagttacactatatatgctcttagtaggtttttttcttgtagtggaaacataactgttagcatatttcttaggatgttttttcttgtctttttaaattcttatttcactcatcctttactctcccctcaagtattctacactttaatttcctgaaataaatttaaggaaaagggaaatagtaaagaagtaggaatgggtgcagcacaccagcatggcacatgaatacacatgtaactaacctgcacattgtgcacatgtaccctaaaacttaaagtataataataataaaaaaaaaa

SEQ ID NO: 237726 - DNA, 594 bp, Homo Sapiens
ctgttttagaaagagctctctagccgcagcaaggaggattaactggaggcccaaggagtagtctggactttggggcagtaactttaggggggccctgagggagagctggtcgcgaggacagggacagcaggcagaggttgtggcccacagggcaatcgcaggagaggttgtgaataattcccaggtgatgagtgtgcagctttgaggaatttcaaagggttgcttggcgtcttttcctgaagacacttctataaggtatttagaaatctatcaggagtgagaatcagtccagtcagaaaattttaggcatttgggcaactgcattcagaaaacagctatttatttggaatgcataataaaagccatgagactgaatctccatgcctctttgccccctagtagccttcaagaagtctctaaaacagggttaccacagatttagccaggatgatgtgtagcagcttttcttggaacaggttgatggattaaaataactttttttcagctctaatgtttttttcttgaatttgccagtcacatgataattttcttcaaaaataaaactttataattgtaaaaaaaaaaaaaaaaaaa

SEQ ID NO: 237727 - DNA, 613 bp, Homo Sapiens
agaatgtgacacggacaaggatagttttggctgatgtgaaagttcacatccttggctccttccaaaatatcaagatggcaagaactgccatttgcaacctaatcttgggaaatcctccttccaaggtttatggcaatattcgagctgtggctagcagatcagcagatcgattctgatttcaagtcagagactttttatcttgcctttggactctggtgaaaaatactttacagtggtcggtcacaagaaaccatctgaacaatttcagtcatttgaagcctccgtcccttcttccattctcagccagaagcataaacagaaaagaaagatttaagaggattcacactcaacaggttttaggataatttaaatatcaaaaattgattgttatacttacacattaggtataatttatcatttatctgaaatcacatgtagcagattgcatagtctgtaatcctctcagagggaaacttcttgtttaaacagctctatatggatttatacttttatatttataaatttataacttcatacaaatttataaacatttctttataaattgtaatttaatagattatctcagaaaaaaaaaaaaaaaaagggcggccgc

SEQ ID NO: 237728 - DNA, 580 bp, Homo Sapiens
aacacagtcatcgctgcactgagccgggacacgattaacaggtggtccgcaggcctgaccagcagccaggtggacctgtacattccaaaggtcaccatctctggagtctatgaccttggagatgtgctggaggaaatgggcattgcagacttgttcaccaaccaggcaaatttctcacgcatcacccaggacgcccagctgaagtcatcaaaggtggtccataaagctgtgctgcaactcaatgaggagggtgtggacacagctggctccactggggtcaccctaaacctgacgtccaagcctatcatcttgcgtttcaaccagcccttcatcatcatgatcttcgaccacttcacctggagcagccttttcctggcgagggttatgaacccagtgtaagagaccacccacccagagcctcagcactgtctgactttgggaaccagggatcccacagaaatgttttggagagcgggaggtttcccccaatctcctccaagttcttctccctccaaccagagttgtgtctaactttaggcatcttttaataaatgtcattgcgactctgaaaaaaaaaaaa

SEQ ID NO: 237729 - DNA, 595 bp, Homo Sapiens
ccagttattacagatttggtcaaaggcttgctaccaagattgaccgaaaaagttgatcttctggtgtttaatcccccctatgtagtgactccacctcaagaggtaggaagtcacggaatagaggcagcttgggctggtggcagaaatggtcgggaagtcatggacaggttttttcccctggttccagatctcctttcaccaagaggattattctatttagttaccattaaagaaaacaacccagaagaaattttgaaaataatgaagacaaaaggtctgcaaggaaccactgcactttccagacaagcaggccaagaaactctttcagtcctcaagttcaccaagtcttagcatacagtgtgtgcccagaactactggaaactgaatgcatttagcatattttgaaactgaagtcattcattaggtaacaaggaattttatcagaaatttgtcattaaaaaaaggtagaaaggtggaacattccctttcagtcaggcctatagaattatttgcacaagtacaagtaaatatgtgtattatatttatagtttgcattttaaatataaaaattatgtatgaaataaaaaaaaaaaaa

SEQ ID NO: 237730 - DNA, 565 bp, Homo Sapiens
aacaccaaaaatgcctcactaacatatccctgctgtaaaaccaaagaccagaagtcagatataaataaagaccctgcacaaagcttcagccctgtgaaaacatccaaaagtctattgactgtattcaatttacaccacagttaaaggaacacccacatgcagagatgagaaagagccaatgcaagaactctggcaactcaaatggccagagtgacttccatcctcgaaacgatcactccttgttttccaacaagggctcttaacgaggctgagtcggcaggaatgacagaaatagaattcagaatatggatagaaacaaagattattgaggttcaggagaatggcaaaactcaatccaaggaaactaagaatgacaataaaaggatacaggagcagacagatgaaatagacagtgtaaaaaagaacctaactgacctggtagagataaaaattacactacaagaatttcacaatgcgatcacaagtattaacagcagaatagaccaagccgaggaaagaatctcagaacttaaagactgactgtctgaaataagacagtcagaca

SEQ ID NO: 237731 - DNA, 564 bp, Homo Sapiens
ctctgttcctctcccctcttttttaatcatgttcttaagacttcttttctgtgccaaaatcagtaaagttacactctgaagggatatcatcctttcaaacgggccatctaaggcagctaattatgcattgcattggggtctctactgagaaaaattctgtgacttgaactaaatatttttaaatgtggattttttttgaaactaatatttaatattgcttctcctgcatggcaaaactgcctattctgctatttaaaaaccctcaatgactttattttctactgccgcctttttcatgtgcaaccaaaatgaaaatgtttaaattaactgtgttgtacaaatggtacccaacacaaactttttttaaattagtaatacttttgtttaaagttttaagtttgcattttgactttttttgtaaggatgtatgttgtgtgtttaacctttattaactaacgttaaaagctgtgatgtgtgcgtagaatattacgtatgcatgttcatgtctaaagaatggctgttgatgataaaataaaaatcagctttcatttttctaaaaaaaaa

SEQ ID NO: 237732 - DNA, 612 bp, Homo Sapiens
cgggccccccctcgacccacgcgtccgttgcagtgagccgagatcatgccactgcgctccagcctgggtgacagagtgagactgtgtctcaaaaaaaaaaaaaaaaaaaaatgcctcagttttgttaagaggaaaaagcaaatcctaagttacagtggaacttatgaacaccctagcctagagatttaatttagtgatgaaaaggtacagagagagtctttcaagaaaggacctagtctgctcgcgttctctctctctctctctctatatatatatgtatatgtgtgtgtacatatggaccacttcaagctacacacacacacacacacacatatacacgtgtatgaatatatatatatggctataagtggtgcgacttgcaggtactccctttgttcacctttgtaaagatgttattgccagttcagtgtgtatttctatagtatatatgtaaacaatttgtcatccttttgttgctgcttttgaaactagttcatggcttcagtgggggagagatttaaataatatgggtttataatttctgcattattaaatgcagataacttgtgattaaagagtatgttattggaaaaaaaaaaaaaaaaaaaaggg

SEQ ID NO: 237733 - DNA, 604 bp, Homo Sapiens
gtaaaatgtaacaccattcagacatagctgtggaatagttcagtttactagtagctttaattaaagctgagccttttacagctacttggtaattaaacaaatttaaaactatgattaatgtatttgttaactaattagcttttggcctttgatagaaatgtgtaggtaatataaattttagaattggtcttgactactaaactattgctaaaattattaggctaaaagtttttgtctcatctgcaaaaggtgagattatcacctatttcatgggaagatttagattggtaataatgtagtctgggggccgggcgaggtggctcacgcctataatcccagcactttgggaggccaaggcaggtggatcacctgaggtcgggagttcaagaccagcctgaccaacatggagaaaccccatctctactaaaaatacaaaattagccgggcgtggtggtgcatgcctgtaatcccagctacttgggaggctgaggcaggagaatcactttaactcaggaggcggaggttgtggtgagccgagatggtgccattgcattccagcctagggaacaagagtgaaactccgtgtcataaaaaaataaaaaaa

SEQ ID NO: 237734 - DNA, 611 bp, Homo Sapiens
cctgtttctgctcttggtgcaggatctgcagctactgctgcatcagaagaaatgtatgtgccaagagttgtaacctctgcacaacagaaagcaggaagaactattacagcccggatcacaggaagatgtgattttgcttcaaaaaatagaattagcagcagtttagctataatgggagtttctcctcccatgagctcagttgttgtggaaaaacatcatccagtcacagtgcaaaccattcctcaagcaactgcagcaaaatatccccggaccattcatcctgaaagtagtacctcagcttccagatcacttggaaccagatcagctcacacccagtctctcacaagtgttcattccataaaagtggttgactaaagtgaatatgtccatagtggggtcttttaatccctctggtcttaccaagggttagaagtcttttggttttaacttttccatattgttagaacatcatggagacatcatgttcatctgttcaaaattacaagaggctttttcaagctctaccatgctttgtaactatatgtagaaattattttaatgttattttttatttaagcaattaagtaaaacttttttaaattaaaaaaaaa

SEQ ID NO: 237735 - DNA, 562 bp, Homo Sapiens
cagtgagttattacccacaatttaaagcaaattttgaatgaatctttaagttaggtatctaccttcccaccagccccccaaaaaacctctcagtagtttctttcagtgtacaaaatgatgagcatttttctatgatgaggttttaaccattattcagggtggtcttttgtttttaaatctttttttaactaataagatttacggtgtgtattttatacagaaatgcattataaatgtttttaattgtgttctgttttttgcagtctttaagtgccatgccaattgttcttatattctatagaagttcgctcaaaatactcaacaggggaataggcagcggacagtcagaatggttggaattttggctttctaagaaaaactttattttgcataagcatgtggtcagatcattttgtgcatatgcagcctggattggatgttaagtaaatgcttgttcagtgccggtacatttacttaaatctgtttttatttttgtcatgtagaatactactgtggtcatcataatgtaatctatttctgtaccttttttttttttttttac

SEQ ID NO: 237736 - DNA, 598 bp, Homo Sapiens
gcaacaagagactgctatcaggatgcaccaggcccttaggttttggacatataaattacccaagatggttgccatatacattccctttgaatggcagctactagcctgctattggactctaatttaaacagaacacttgaccactgaagcactgtatgtgaccttaagacctgagctgcccatctcatgcaggtattattaacgaaaaataaaaatggaagccccagtttagaaataccctaaggctgactacccgcaaccgtgtaaccaaaactaatcattctgattttcctgaaatgctgtctctgatcataaatgaaatgcaaaatgtaagctttacatccttgccagcatgattcactgaaattaaaccaatcagctatagaccaacaagcttaaacagctcaacttgccctaaaaagaatgtataacagccaattataaaaaaggtcaaaatattccccccctttatgcattataaactgtgttgtaactgctgtaagattaatttcttaccacttgatttgagtcttctagattgtggtctgtacttcttgtttgaacaataaacttttaaatttttctttaaaaaaaaaaa

SEQ ID NO: 237737 - DNA, 562 bp, Homo Sapiens
gaggtgggaagaggtacactgtatctctgcaataaaactttggccaggttctacctcctctgagcaaaggatacttttctatgtaggtgtagatggttctcctttactaatctgacatggtgcatctggagacaacatctgatgggatccaaagacaacttgaaacaaaggtggatgtcagctcttggtgtgttttcatttggttctcttttttaaatctcccttttgttatcgctcctgttgtagcgtgtccatcagtgtgtgaagggtgcgccctgttccaatgatactgcattgctgcatccagcctttcgtgggagcacggtaccaagcgtccggaattgattatcccaatcatttttgatatgtaactgaaaaatttggtctcatgcaataaaaatgtactggctgcattttagcaaggtttatttactcttgcaagtaaaaacgatcaaccgtgaagcgtaacaaattctgtatttagtttttttttctgttgtggtggtttttgttttgttttttgtttttgtaagattctaaataaattaaatacgagtcaaaa

SEQ ID NO: 237738 - DNA, 585 bp, Homo Sapiens
gaatcttcaactttaataccagctctttgttttccttgtatgatgaggggattgggggatacagttattttactagcaccttgtgaagtgtttccgtgttttgtgatgctgtaatttattaatgtttgtagctttttatatttgtacatttcttatgagctttgtttatatacccattacctggatgtttttgtccactgggagaggcagcttggtggaggccttatccactcccacttgtcctgtttggagggacgcagtccctagggcccgagactgggtgggagagggggagtctcacggggccccaggcttattcagaactggtgtttttaaagtttcctttaccctgcccttgttgaacatttatataatctaacctggacatcaagctgttctctctctctcttttttttaattttattattattattttggcaacatgtacatttctaacaaagtttatcgtggctattaaagtgttttatttcccaattcatattactcttgtatcgagtccatgaggtctaaggcaacttagatcaaagttttaaaaaagtaaaaatatttcaggttttgtacaaa

SEQ ID NO: 237739 - DNA, 588 bp, Homo Sapiens
ggtggtcctttggattcccagtggcagcagcaaccaacctggcccttagtagtttctaagttacaccatgttaatggataaaggaattactcagcttgaagggatctgtttcctttacactggcctgatgtgtggggagaaaggggccaaaaagtttaggatttggagttaacatcgtaatttctgctttgttggtcagggtttacagcattaatggacaggttcaccctgacctacaagtcggaacgtgacatggacaaactggcccatatcttcagttattacattagtgacatcgtggagcgtgagtgatcattgtagggtaacaaggtgtggtgctgggctcctgggggtttataaaagaagggggccagaagtactttaaaacaggtaccaaagggtcattcctttagcatcattcatctttggtttcttcaagttgccactgaaaagctagacctttgcctattatctgctaatctacccagtctcacattctattgactcattgttcaaagggggggcaggaggagctaatttcctttgcacatttgtattttatttcaaaataaagtattctcttctaac

SEQ ID NO: 237740 - DNA, 580 bp, Homo Sapiens
ccctggccccgctgggggatgcccaactggtcctgctccggccacggcggcttatgaacgccaacgggcgcagcgtggcccgggctgcggagctgtttgggctgactgccgaggaagtctacctggtgcatgatgagctggacaagcccctggggagactggctctgaagctggggggcagtgccaggggccacaatggagtccgttcctgcattagctgcctcaactccaatgcaatgccaaggctgcgggtgggtatcgggcgcccggcgcaccctgaggcggttcaggcccatgtgctgggctgcttctcccctgctgagcaggagctgctgcctctgttgctggatcgagccaccgacctgatcttggaccacatccgtgagcgaagccaggggccctcactggggccgtgacactagtggccatggctgcctgcctgactgtagtgcccaccaacccagccactgccacagagctgccacgccagccttggtatctactttttatacaaatctcctctagactgttccaggctgcctgcggattaaagtgggggtgactgtgaaaaaaaaaaaaa

SEQ ID NO: 237741 - DNA, 571 bp, Homo Sapiens
cccaggctggcagcacagataccaccatttcccttttctttgctcagggcatggcctgtttatctcgttgcaccagatgagggttggaaggatgatggtggtggttgtttcagatctactgacagcaatgagaaatcaatgacagttgacaggaagagaggacgcatacaacaggcaaaagaggaatgcccagcagtcttggtccttgcggtgcaatactggccttgaggccaagtcagcaggggattcgtagtcactaacttctaactgaggcagggaagtaacatgttctggagaaggtccaaagaaacaggaatagaggcagtgtagcaagaggcagatttttggtgccaaatagatttgaatcctggttctgcttcttcctttgtagagtatgatattggttctttcctcccaaagctattataaagactaaatatgtacacaaatctttgggatgtctgacatataaatgcttaacaataggtatttgctggtattattacaaatgaatttgcttatttttgagccacttctatgtctgtccattaaaccaaaatgtgttctgcaa

SEQ ID NO: 237742 - DNA, 544 bp, Homo Sapiens
tgggaggaccgcgagatgcccgtgctgaagcagctgggccccgcgcagcccaagaagcggcctgatcgcggcgccctgtccatctccgcgccgctcggcgacttccggcacacgctgcacgtggggcgcggcggcgacgccttcggggacacctcgttcctgagccgccacggcggcgggccgccccccgagccccgggcgccccccgcgggggccccgcgctccccgccgccgcccgccgtcccgcagtccgcagcgccctcgcctgccgacccgctgctgtccttccacctggatctggggccctccatgctggacgcggtgctgggcgtcatggacgcggcgcgcccggaggcggctgccgccaagcccgacgcggaaccccgccccgggacgcagcccccccaggcccgctgccgccccaacgcggacctcgagctgaacgacgtcatcggcctctaggttccctcattccccgcgcccttcccgcccggcaccccacttctgtatacataaacggccaaggtgtgaaaaaaaaaaaaaa

SEQ ID NO: 237743 - DNA, 583 bp, Homo Sapiens
ctagtaaagcgaagctgattatcctggaaaacactatttacctattttccaaggaaggaagtattgagattgacattccagtccccaaatacttatcttctgtgagctcacaagaaactcagggcggccccttagctcctatgactggaaccattgaaaaggtgtttgtcaaagctggagacaaagtgaaagcgggagattccctcatggttatgatcgccatgaagatggagcataccataaagtctccaaaggatggcacagtaaagaaagtgttctacagagaaggtgctcaggccaacagacacactcctttagtcgagtttgaggaggaagaatcagacaaaagggaatcggaataaactccagcaaggaaatggccagttaagtagtgtcttctctctccaccaaaaagaggaagtgcctccagcttttctgggggtctcataaagagcagttttactaaatgattgtatgcttatgctgaacacctttcatattggagaatcatgcatttgggtcactaattatctcaaaatatttcatactaataaagttgaattattttttattggaagccaaa

SEQ ID NO: 237744 - DNA, 578 bp, Homo Sapiens
tttctaaaaagtcagatgtttgagcagtggcctacaaatcagtaattttcggatgggagagtttctttacattgccgtggcatcttaaaagctatcttcatgtaaattgactgtactaggcctactggggatcagagttcccaagaaaggaaaccttttcttgtatctggattcaaatttatttccaatgtttcaagcgggaaacatgactctttattgtctgtaaatctaacattattacttttcctcttagaagaatattgtattgttagatgtttgttgagctggtaacatcgttgcaaccactgcaatatcttcgttagtaatctgtataatactttgtatacaagtactggtaagattgttattaaatgtagcttcagtcattaaattactatagcaaagtagtacttcttctgtaatatttacaatgtattaagcccacagtatattttatttcaatgtaattaaactgttaacttattcaaagagaaaacatctcatcatgtctattgtccaaagttacctggaatcaaataaaaattctagattaccatgaagaacataaaaaaaaaaaa

SEQ ID NO: 237745 - DNA, 562 bp, Homo Sapiens
ccacgcgtccgtgaatatttccttaagggtccccgagaaatgggagtgaggggaggggacacaatggctttttgagcttacttttaccttctgatactagtcaaggtccagaaccagccaccagccaaatttctatctgggtgcgggccactgaaaatccttgttaaaaaccagatcacaaatctggggctcttggtcccattggagaaggaaggaagagcctcaaaataagtgtgcacccatgcacatattcaggaacagcttgtttagtctttacactttgcctgaaagttgcttctcctcgtccctttgtgtgcctgggtggcctcggccctgtgcgttggcaacgcaggatcaaatgtgctgcagcttttgcagaaaacaactcagaaacacaaaaccccccaacagctcaattattattttttcaatgttttcctacaagagccaagtagcaccatgtacagaagacgcctttttttttggaatattgaaatcgttctgcatgtaaaatatgggataatgacctgtttatattaaaattctgattaaattatctgaa

SEQ ID NO: 237746 - DNA, 595 bp, Homo Sapiens
tggaaagatggggactgtcccttaggaaagccataaaagtgattcccaatactttgcaattgcttttgatttttagtcctttggaacagatgtgtgatgttatgtctgatgttgtgtttttagagctgtgaaaagtctgaaaaatttcaaggggtattatttaaatgatgattatctggctgaattatgtgtgagctagaatctagggtagctgtccacttctttttctgttgtcctgacagtaaagcaaatagtaagccatgtcttgaaagtgatttgcttgtttcatactgacatctaaagacatcagccttctctttggcaaccctggggatactcctctgcaccataacttattaatgtttttttagacaaggctaaacctgaatgactctacgtatctatagtttcactgctcatataccagctgctacaagaaaaaccatgacttgtaagtttgtctttactcctaattgctaaattaactgaaacccttcctgtctagggagaattgctgctagtaaggtcagtttgcaatgttcagctttagatatgtgtcgtaatgggggtctaaaaactgtaataaactgtattc

SEQ ID NO: 237747 - DNA, 531 bp, Homo Sapiens
gcctgtgacccacacagcttctgggctctgcctctgctctaagaagtgctgtgggggtagagaaccaggaaggacatgctgttgggaatgtacacctgggcagaggtggccctgttaagatgtgactgtagccacagccagggatgggatccctgggtctctggaatctgaaacctcaacaaataccagtcttgacccctagcagcagagataagaataaaggggttggtttgctattaagtcagatgggggctctctccttgtcatgctgtccctgtgggtaacagacagggattgaccatcttactgttgtacaggtagctggtggtgttggattatcccattgaagctgggacagctgttcctttctcatagtgataacttgggtctgttgtcctctaaggaacgtgaaacatacacttcttaagctgaaccacgtaaacttgaaattctgcgcactgggagaaatgtgtcctgtgtttcaaaggataaaactgttctaaaggcttccagggtcatgatgggattttt

SEQ ID NO: 237748 - DNA, 638 bp, Homo Sapiens
ctgtgtgtgttggccatcaacaacaacaagtcttttgaggacatccaccagtacagggagcagatcaaacgggtgaaggactcggatgacgtgcccatggtgctggtggggaacaagtgtgacctggctgcacgcactgtggaatctcggcaggctcaggacctcgcccgaagctacggcatcccctacatcgagacctcggccaagacccggcagggagtggaggatgccttctacacgttggtgcgtgagatccggcagcacaagctgcggaagctgaaccctcctgatgagagtggccccggctgcatgagctgcaagtgtgtgctctcctgacgcagcacaagctcaggacatggaggtgccggatgcaggaaggaggtgcagacggaaggaggaggaaggaaggacggaagcaaggaaggaaggaagggctgctggagcccagtcaccccgggaccgtgggccgaggtgactgcagaccctcccagggaggctgtgcacagactgtcttgaacatcccaaatgccaccggaaccccagcccttagctcccctcccaggcctctgtgggcccttgtcgggcacagatgggatcacagtaaattattggatggtcttgaaaaaaaaaaaaaaaaa

SEQ ID NO: 237749 - DNA, 592 bp, Homo Sapiens
gtctgcagttaaggccttacgtcctggagggatacttgtatactctacatgcacgctttccaaggcagaaaatcaagatgtgatcagtgaaattttaaactcccacggtaacatcatgcctatggacattaaaggaatagcaaggacttgctcccacgacttcacatttgctcccactggccaggaatgtgggctcttagtgattccagataagggcaaagcctggggcccaatgtatgtagccaaattgaagaaatcatggagcacaggaaaatggtgacatgaatttgtaaactgtgtttatgtgttattatatttatatttctgaactcagtacatgttaatatttaaataattatgcagtaactttctctgggtctgtttggaatcctatttagttaatactttagcatcttagaatctaggcttgagaattgttcaggtgtatttttttcctagaaatatatctgtaacaatgatttaaggtggtgcagatggtgtttgttctatattataaatctgctgtctttgcttggcattttatagttaaattaattagaatatgtggttttatgcataaaaaaaaaaaaaa

SEQ ID NO: 237750 - DNA, 611 bp, Homo Sapiens
cctcctctcacagcctctgtatctctgcaggccatactggttccattgttctgtataatactgaataaataaatttacttttacatgatcgtataagtttctagataagataaacaaattttgtttaaatttttttaataaaaatcttaaaacactttttttctaacctagactgagaaattcatgtttacttttctaggtgtatgatactttgtaaagttgatactttcctaagaatttaacatgtcatatttttgaaatagatttaagtgtgcttcttattgctaaaaatactaaatgtcatgggtcatagtatctgatatcaatatcgttgataacatatccacaggtaacaccatgatgtaggcataaatggaaaacaaaaaccctactatttcaaatatattgtacttttttatttctgtaagccaactgtgtgccattttcactggacttttaaatctagactttagtgatgtctacattgtaaatgatcttttgtggatatttgtcacttggtttcagaaagttcacaaatgtagcaacagctcacatgactgagtaggtagaaaatgtgaaataaatctcatatatatagttttgaaaaaaaa

SEQ ID NO: 237751 - DNA, 599 bp, Homo Sapiens
acggcatggtccgggtttggaagactgaggatgtgaagatgtctgttcctggacggccagcaggagaggagcccccggctcagcctccaagcccaagaggccacaagtgggagaagaacctggccttgagtcgagagctggacgttagcattgctttgacagggaagcccagcaaaaccagccccgcagtgactgctctggccgtgtccagaaaccacaccaaactcctggttggtgatgagagggggagaatattctgctggtctgcagatgggtaggaagagagaggcagcagaggctctggcacaacagtgccaggctgagggtggcagaggtgactggggcctgagctctgcctacagaagaaacccccagggcctccttccccacagttctcaaggaagggcctctggcaatcacagctctgcagcccaaccctctccatggccgatgggacttctatgaaaaggatgagcacacacactcggagggctgagcagcacgctggaaactgtgacttggtgatgcccagctgcacacgaaattacacatgactcaccttattaagggctattgcactgaaaaaaaaaaaaaaaggg

SEQ ID NO: 237752 - DNA, 595 bp, Homo Sapiens
gggtgcatgtgtatatgtatgggaaaatgatcagtgacaaggtattgggatagtcattcagggagagagagtcagtgagggtgttagaggtagctgaaggagtggaagggagttagctagttgaaggaacactggaggactgtcggggatttgggggattaagtaaaaggtttataaggagagggtggaaagagtggttgatggctgatattctggtcatttatactagctactcagtctctactttttctagaagtccccagtaaccaaagcccaacacatttggtatcgttgattccttccattgtttgctttgctttgggttgcctaaggctgtggttatctctgagccacctaaattctcaccctcagctgaaatcactactgtctcttcatggctctcagtatatttcaatccttcttcaggaactggagcttttgagaataaggcaactttaggattgaccctaggacagaagctctgctctcaggatccttgtatgctcctgaatatgaattccatagtatgatatttggagctccccagatccttgtaggcatatgtgtgtgtgtgtatttgaggccaaaaaaaaaa

SEQ ID NO: 237753 - DNA, 609 bp, Homo Sapiens
gcaataatttccttctgatttctctgtggaacgtgttcggtcccgagtgaggactgtgtgtctttttaccctgaagttagttgcatattcagaggtaaagttgtgtgctatcttggcagcatcttagagatggagacattaacaagctaatggtaattagaatcatttgaatttatttttttctaatatgtgaaacacagatttcaagtgttttatctttttttttttaaatttaaatgggaatataacacagttttcccttccatattcctctcttgagtttatgcacatctctataaatcattagttttctattttattacataaaattcttttagaaaatgcaaatagtgaactttgtgaatggatttttccatactcatctacaattcctccattttaaatgactacttttattttttaatttaaaaaatctacttcagtatcatgagtaggtcttacatcagtgatgggttctttttgtagtgagacatacaaatctgatgttaatgtttgctcttagaagtcatactccatggtcttcaaagaccaaaaaatgaggttttgcttttgtaatcaggaaaaaaaaaaattaatgaaccttaaaaa

SEQ ID NO: 237754 - DNA, 594 bp, Homo Sapiens
tcaggccggacttacgatctgtgcgtgctcgccgtgtatgaggacagcgccacggggctcacggccacgcggcctgtgggctgcgcccgcttctccaccgaacctgcgctgcggccatgcggggcgccgcacgctcccttcctgggcggcacgatgatcatcgcgctgggcggcgtcatcgtagcctcggtactggtcttcatcttcgtgctgctaatgcgctacaaggtgcacggcggccagccccccggcaaggccaagattcccgcgcctgttagcagcgtttgctcccagaccaacggcgccctgggccccacgcccacgcccgccccgcccgccccggagcccgcggcgctcagggcccacaccgtggtccagctggactgcgagccctgggggcccggccacgaacctgtgggaccctagccaggcgcccccccctctaagggtcctctggccccacggacagcaggacccggacaccctgtgggacctggcctcaaactcaccaaatcgctcatggtttttaaaactctgatggggagggtgtcggggacaccggggcaaaacaagaaagtcctatttttccaaaaa

SEQ ID NO: 237755 - DNA, 609 bp, Homo Sapiens
ttttaatataagaacactgaattttggcttgaaatattgtgactaaattgcacaatctctggctattagcactgttcactacattaacatgcaagagagagagaagccttgttacatttcctgctatttaacaaactgtccaattaggtcagcaagcctgttagggccttcactgctacgcccctggccccaaaacagagagcaagacagttgtccagagaatttagatatgagttaagagctgccagatttattttaaggcatgtagagaatctcataatctatgtgaaagtcacttgccaaaaaggttttggttatgaaagtgaatgttatatatttaatattaagtgaacctcccgtgccttttaaaaaataccaacattatgaaatttaaaagcttaaatatatttgcctagttgataaagaggctgtggaacaactgaaggagaactttcagaccctaaaacagttatattacttagatgttaaaattttctagtgggctgtgcaattgctgggttgtccccccaaacatattttaatatgttatttaaaatgattttacccaagcctaagtattaaagtatatgtgcaaaaaaaaaaaaaaaa

SEQ ID NO: 237756 - DNA, 636 bp, Homo Sapiens
ctgaaaaatggaatttctgttgttctggaaaatggggttacaatttctccccaagatgtcttaaaaaagcctattgttggaagaaaaatctgcatattgggtgactgctctggggttgtgggtgatggaggagtaaaactgtgctttgaagcagacctgttgatccacgaagcaaccctggatgatgcccagatggacaaagcaaaggagcatggccacagcacaccacagatggcagcaacatttgcaaagttgtgccgtgcaaagaggctggttctgactcacttcagtcagaggtacaaaccagttgccttggccagagaaggagaaacagatggcattgcagaactaaaaaagcaagctgaatcagtgttagatctccaagaagtgactctagcagaagattttatggtgataagcattccaatcaagaaatgaaaccagtgttcctgagtgcacactgacatgtctgtgaatatgttactgaacctatagtccagtttttttatttcttgttttagtctgaaattatttgggccctaataatcctaaaaagaatggagctgcattgatgaattggctcagtatttaaagggagcaaactttttgataataaatctttttaagagaaaaaaa

SEQ ID NO: 237757 - DNA, 625 bp, Homo Sapiens
gccactaaagcttcagactcaagtacccattctgttttcccccagcaacgcccctccaaacctccagcctccctgtctccagctgcctgggcccggaagggctttggttccttctctgggtctgattttctcactgaactccaccgaccaactgccctaagcccccagggcctccagggcccaggttcgagacccaaacccccaaaatccaaaacttctcttgaaaagttcagggaccgtccaggggagatggggaggagatatggagtgagtcacctgctccagaagatgccagcttctctctccagggtgcttagttggctttgcccacccctcactccccagggagctctggggacagcttcctcacacccctgtcccacccacacagctgccctagctgaccccgagaagtgctcttggctgacccctctggtgtgtggtgaggggctttctcttccccttcctgtttcagacccccccatttcccgcacatggtgtggggggctgggggaggtccaagcagagtgttttattattatcgctttatgtttttggttattggtttttttgtatagaccaaagcaaagaaaataaaaataacacagatgaaaaaaaaaaaaaa

SEQ ID NO: 237758 - DNA, 596 bp, Homo Sapiens
gtccagaatgatatgcaaaaactactttttagagaaacaaaacaactttgtagcaacaaattaaatatagtattagattgttacttacgtagattttatttttactatgccttaccaagtacatccttaaacaaagtagtatgtacatgaaattgcacttaaccaaaactattgtgtaaaacaaattttaattcctcagggttttaatttaaactagtatttttttagattatttgttttaggtgatttaatggtactttaataactactaagaaatattggctatttcaatgtaagttataaggtggtacattcctaagggtatttatagttgatgataacatgaaaactgaaataagataaaatacaacgtgctaaatcttttatgtattctaactttaaaagacaagtgcaacaaagttagactgacttctatatgtgctcttttactctgataatattaaattaggactaacttatgttttataatgattataatttacatgcttatttttaaaatagtatatgtggacacatatatatcattatattaaaataaattctaccattttaaattgaaaaaaaaaaaaaaaaaa

SEQ ID NO: 237759 - DNA, 585 bp, Homo Sapiens
ccagatgggatgtataaattagtcagggctagagacatagatttgaataatcagatttgaaacacccttgtaagggtagttcagactcaaaagtatataagatgccctaggaaaatatgtagagaaagaacaataggacaaggatgaaatcctggagaataccaattatcacagaggtggaaagagaaggaatatagagacatttgtgaaagagcaattataaatatatgatagagactgccagtgtccattaatattggtgtgcctctcttcttccataaaagtactgctaaactacatatctcagcctttgcagttaggtaaagccatttgaaaatattttgtccaaagatctatgggcagaagtaatatatgcacttctaggcctggtttctgaaacttcttccatgatcctctgtgctgtctcatttttcatggaagacttggaagccacaaactgaggaagccaagtctctgaatgtctctaaggagctgcacttaggacagacactgtagtaaatatcaatattttgtgtcagaggtctaaaccctgaaaaacctacatggtttgcaccacaaaaaaaa

SEQ ID NO: 237760 - DNA, 606 bp, Homo Sapiens
ctgcacgcacagtactaggtcaggtggtgctcccgggtgaggagctgctcctgccggaacaggaggacgcggaaggccctgggggtgcagtggagcgaccgttgagcctgaatgctagagcgtgctcgcgggtgcgcgttgtatgcggtccgggccttcggcgctgtggggaccgcctgctggtcaccaagtgcggccgcctccgtcacaaggagcccggcagtggcagcggcggcggtgtttactgggtggactctcagcagaagcggtatgttccagtaaaaggagaccatgtgattggcatagtgacagctaaatctggagatatattcaaagttgatgttggagggagtgagccagcttctttgtcttacttgtcatttgaaggtgcaactaaaagaaacagaccaaatgtgcaggttggagatctcatctatggccagtttgtggttgctaataaagacatggaaccagagatggtctgtattgacagctgtggacgagccaatggaatgggtgtcattggacaggatggtctgctttttaaagtgactctgggcttaattagaaagtaagtcctgaaaaaaaaaaaaaaaaaaaaaaaaa

SEQ ID NO: 237761 - DNA, 554 bp, Homo Sapiens
acagattttattttttaaaatttggatgtaagtagagactttcagtatttgttttctcttgattttgaagtcatttcttcttctcacgtctgtgacaaatggttgaaaaggagtcaacatggccccaactatagtgccggaaccttttcatcattctgaggctttgccccacacatggtcctcactcatatctgtcaccttctgaagcctagatcttgttaacccatcaggtgcagtgtcagtttcaaatcaaattatctaagaaaacaagaaaacaaaggcagcagactattggtacacattatagtccaaagtgcttagcgaagtaaaaaaaaaagctttttaaaatttctattgttgtctattggtaatgtttttgatcagaataaagagggtaaagggaaaaagttactacacatgctaggctttctcagtggggaaaaaaatggctggatagaactgggacaaacacagacccatctttaggggtctggattttgtaggtccgaatacacagcagtgttaactcatttctcatgccattagctctctac

SEQ ID NO: 237762 - DNA, 612 bp, Homo Sapiens
tgtggtaaatgatttaaaacactagtatagtgttgtgtagcttaatccttctgaagtctttttgtcatgtagctattaatctgtggctatgaaatgatcagaaatgctaagtgagatcaatatttgtttggaaaaaaaatcttgggaaacaacccaagggttttcgctgttgttgtttttctttttctatttttgtttacttagtcctttagctagtggatttaattttgttgtgcctgcttcattttgcaataacaatgcagtagaatttaaaacttggatgcttaagaggcctgcatatagataagaatttcaggcaaaactacatttattgttaataacagcttgttcataggctcttgtattttatgtaactgtgataaataatgaaacttagttatattgaggttattgtttgtcggtgaagtgttagtcacagtattttcaaaagtttgcacatattgttctgtgtaattgtgtaagccataattacagtgtttaattctcttttcctattacatcattcattgaaagtgatcactttaccattttgaaaagatatttcgtgttctttcactgcaaaataaaaagaataaaaatttcaaaaaaaaa

SEQ ID NO: 237763 - DNA, 542 bp, Homo Sapiens
tgccagtgacagacaggctcttagcagcttccagattgacgacaagtgctgaacagtggaggaagagggacagatgaatgccgtggattgcacgtggcctcttgagcagtggctggtccagggctagtgacttgtgtcccatgatccctgtgttgtctctagagcagggattaacctctgcactactgacatgtggggccaggtcaccctttgctgtgaggctgtcctgtacattgtgggatgttcagcactgtcccttgcctcaatgccagtaacgcgtcttcctgagtggtgccaaacaaaaaggttctcaggtgttgccaaatatgtcctggggtataaaactttcctcgcctgacaaccactggtctgtagggatttttggctacacacaaaccagtatcgctcatagatcagcaaaccggggcctactagagtctgaacagctgtaatctatgaattctaagtgaaattttaaaaattgttaatttttcctatattgcattaattggaaaaaataaatctgaggcaaataaaaaaaa

SEQ ID NO: 237764 - DNA, 611 bp, Homo Sapiens
caagtttcatagtgataattgtatattatttggctgctgaattctgttagagttttttattctgttgtacattgtattatacacataatcacaaattaatatgaaggtgaatatatgttacatatcaaaatttgtgaatttgaattatagtatgttttagtgctattgcaaaaaatgtttatttttatattatctgtgattttaatatagatgattgaactagatttctttttgagtgatagtgccattgaatgagcagtatggaaacagtgttacttgatattttgagctttctcaggtttatctaaatcagtggtagcttaacaaaacccagactaattgtgtgtaattgtatttttaataaaaggaaagtacatttcctataatagcatagtactgtttgcatgtaagagtatgcaaaaccttgtgtgtgtgtgtgtgtgtgtgtgtgtgtgtgtgtcttagtgtgtgtaaggcatggcagccaactttgtatctgctatttttagtacgagcagagcttcataattgtggtcactagaactgtacttaccatggacagttaaaactgaaaaagactcaataaaactatgaaacatgaaaaaaaaaaa

SEQ ID NO: 237765 - DNA, 601 bp, Homo Sapiens
ctggccccgggctgggcagagcctcctcctgccggggcccctgcccaccccctcctttgcctggagtgagggtgttcataccaaagacggaaccatttcgcctttaaagaaaatatatccagaagcagccgctgcctcggagccctggcccgtgggtccccctctcgcctggctggttcggtctaacgccccggagagtcagagctcccaggaccctggggaggaggcggattccgggcctggctgggcttcctcttcccacctgaggactgggtgcacagttgtctttgaggggggacgcttaaggtgctttggggttctcaggccaggatacatgctggcgctgaagtgcaggcagccttgaggtcacctgggatctcggggtagccaggctgctccaagacagtggatatcgaggcagtcgtgaggcccctactccacctgggagcaggggaaggacgtggttgcctggcctgggctgcgcccagcagcttccccccaatcctgccctcccagctgtcgacccagatgggatgttcggatcggtttgtaattaaacctgggaatggccacaagagcacaaaaaaaaaaaaaaaaaggg

SEQ ID NO: 237766 - DNA, 591 bp, Homo Sapiens
gacaagcctgcctggctgccagccttgccctggctctgaatggcgtctttaccaacacaataaaactgatcgtagggaggccacgcccagatttcttctaccgctgcttccctgatgggctagcccattctgacttgatgtgtacaggggataaggacgtggtgaatgagggccgaaagagcttccccagtggacattcttcctttgcatttgctggtctggcctttgcgtccttctacctggcagggaagttacactgcttcacaccacaaggccgtgggaaatcttggaggttctgtgcctttctgtcacctctactttttgcagctgtgattgcactgtcccgcacatgtgactacaagcatcactggcaaggaccctttaaatggtgaaaatgggcagatgaatagcaataagtggacctttgttactcttctgagttagaaaaattctaatttagtacactctgaacaaagcttattatacttacttaagatgtgttttgatttggtgttcagaaagcaacctgacaatgataatactgtaactatgataaaattgagaataaaaagattttatttagaaaaaaaa

SEQ ID NO: 237767 - DNA, 442 bp, Homo Sapiens
actcatggaatgttcaccgttttatagttttaaaaagtttactttggcggtctctacaaacctaccatttcactttctcaccagttcttttctcctaactctcttcctttgttggagctctgaaggcctaactgtgtgtacactttacctgcctgacagaattctccaaaacatgcataaaagtaaaatatgttcgtattttcaaataatttggaagagtcggctcaatgccatcaagtgtaaaatctattttgatatacttgctctccgtgtcttcccagggctgctttttgtgatgcaacatgtttagtccttaacttgcaaggtcatctaaaacttgaagtttcacaaagtgtggtttcatatgacttggaataatctgaaaaactattcagtggttacgaaagagcacagcacataaaaaccaaatttgattagttca

SEQ ID NO: 237768 - DNA, 471 bp, Homo Sapiens
ctccccagctccaccaggcaacccgttgttctgcagctgataaccggattaggcagcagaatggggcagatgagtaccctgaggggccctgcctgggaacaggggctccctggcctggcgtgagggctgccactgtcaacaccctaagccgctgcctcctgcagggcatttgcatgtgtgtgcgccctactgtacgcgcccaagagccagtgggaaatgccggcggtggcagttcacacggggcactgctgcacaaagccccaaggccaagcggcacggtggccctggctggcgaatgtcgcgcacccagtctctcgcagcagcgcctggcgcgacgactgctggaagccgggccaaacgcagtctttgcatgagtgtggccctggctgtgggagccgaagcacagccaccacgcgcgccggagcgcagggagagtcgcctgcatcgtccaaccctcctcttaaaaaaaaa

SEQ ID NO: 237769 - DNA, 519 bp, Homo Sapiens
atagagaaaaaataaattaccagtatttattattagaaaagatagaaagacagacaaatcagtggaggaattaaaacagagaaactggagtttataaaacagagcccaatccttgccttctctccctccactcaaatagaaaaggagaatggagaaagagaaagaaggtattaggctacagtttataagagagatgaggaaaaaaatacatttgggaatagagggaaagggtcaaaaggggtcacatttggagaaatatctgaaaatgagaaggagcagaatttttggaaacattttttaaagtctggcaacgctaattaagctgttgatctaaggatttgcaaattgagaggtgcaattattttccaaatgatttgtgacactcttattaattagaatatatattttgtgaatattgaaatctgagccaaaactagttagctttattaatatcttagggaaagaagagagaaagaaagagggagggagagagagaaagaaagaaagaaagaaagaaag

SEQ ID NO: 237770 - DNA, 461 bp, Homo Sapiens
gattgtgttttagattcactgaattcattattgttgtttttatccctggtctgtaacatgatatttggtaaataacaaggactccatacgttttgcaaagagtaaattctctccctccctactgaggccttggtctaggtctctccaggcctttccttcctggagccacagtgcttggagacaggtcactggggtcagcatttgagctcagctatgatcagaaaaaagcaccgttgaggttgcagtgagccgagatcacgccactgcactccagcctgggcgacagagagagactccatctcaaaacaaaaacaaacaaacaaacagaaagcaccgtcgagaaatggctccagcgctgactagcggccacctcatttccccccttgaccactgggccagttgggtggctaggttgcctcattttgcatccttctgtatccccaaatctgaaataaaagctg

SEQ ID NO: 237771 - DNA, 561 bp, Homo Sapiens
cggcgcgcgctggccgccatagtgcgcaggggctggcgctgcggctacctcgagtgctccgccaagtacaactggcacgtgctgcgtctcttccgcgagctgctgcgctgcgctctggtgcgcgcgcgccctgcacacccggccctgcgcctgcagggggcgctgcatcccgcgcgctgcagcctcatgtgacccgatcggacagtgccatccatgggccccaccttgtgactgggacaatcagggacctggattggacgggatcgcccaacttcactgggactggacagggaagtctccgccctgattggatgaggaaagctccaacccagtctcctaagcgactggcccccttttgaacctcattggacccaaccaggtcccaagctccattggagatgaccagtcctttctgggacctcaatgggtcacaatcccattggatggaaaggacttggctatgaacttgactggaaacacgcagcctgctcctggagcttcactggacatattctttatgccacacctaccacgggataataaaagggaaaataatttgaa

SEQ ID NO: 237772 - DNA, 578 bp, Homo Sapiens
  misc_feature (7)..(7): n is a, c, g, or t
acgcagnaggttcactggaagagagtgctctcctttgtgtctgccctggttgtctgctttccagaagcgcagcagctgcttgaagactgggtggcgcgtttgatggcccaggcattcgagagctgccagctggacagcatggtcactgcgttcctggttgtgcgccaggcagcactggagggcccctctgcgttcctgtcatatgcagactggttcaaggtaagtgacctgccaatcggctacctaatacctgatcttcccagaaggcctgggagtggggacaatgctgtccccacctgattctctgtcatgtgagtgagcaaccttgccgtcagctttgccgagtggccttggcagatcttcctctgcgtgtgccgaggagcctgggttctccctgtcggggcctcggcggatcttcctctgcatgttccgaggagcctgggttctccctgtcggggcctcagctccttcccctggtttccgtctcacttagttgacggagcctcctgctgtcttttataagaaaattagcgaaatcaagcctggacaccatagtgaaacctcatctccaccaaaaa

SEQ ID NO: 237773 - DNA, 481 bp, Homo Sapiens
cactattagctgatatcacagtgtgtatcaccttaaaatgcttagggagggcagatagctgtgctctctacctttatctggagttattgagtctgatcccttcgggcgaggcctcattcccacttccatggctggtttgggtgcagacatcatccaactttggacagaggatacaggctggcttgagctggcagcttgtaaagattttcctttcttcatgggtattattgcttgtcttataatgttggtgatagatttttcaccttccaagctgcccaaacccagtcaatttccacgtgactatactggttttagtgatgataaagtcattgtttaagctacatttactcattgcagttttattctctgtgtgctgtgggttgagagcaaaattggagtctgccaaaatgaaaaagtgagtggttttgtgaggttttcaattttatgtacttccaaggaaatagcaaaaacaaaaaaacca

SEQ ID NO: 237774 - DNA, 594 bp, Homo Sapiens
  misc_feature (109)..(109): n is a, c, g, or t
gggtgctctgtgctcacgctcaagtctgtgaatgtctgcgcaagacatctccctttctggatctgcccttgtctctgcttcatacgcaggatgtcctcttcgtgctcancagcaaagaagtggcacaggccaagaaagccatgtcctgccaccgcagccagctcctctggttccgccgcctctacattatcttctcccggtacatgagaatcaactcactgagcttcctctgaagccttgaagggttttcaggtccaaggaacaaaggggaaaatagacaaaggagtgcagaggacctggcctggcactggcttatttacctgagctcaaggagatccccgctggagcagcctctgcaaaagggagcccatgtaggccaggggctgtccaaactccagcttcttcccctgggaaaaaacccaaagaaccaaaaacaaaccaccccaaggataataatagctacactgctagcttctcaagttcttgtgaaaaacaatttacataatgacacagtagatgtggaacacctagcccagtgcctgggcaggtccctattatcataaatgaacataaaagtgctctaaaaacactaaa

SEQ ID NO: 237775 - DNA, 490 bp, Homo Sapiens
  misc_feature (483)..(483): n is a, c, g, or t
gacggaatgattaacaaaggcgtccgaagaaatcgttgttggaaggtgaccaaggtggaaagagacgttgctttggccctgcaagtaagaagagagagggaatagcctgaaggagtaacactaaatttaaaatgacacttttttaccaaccagcgaaagcagatgttcaaaggggatattggccagagtctgtcacactaagatgagaaatgtcctttcttcctgaaggtgtctgatgtgtaaaaatatgatatactttgtgctgtttcctcccttcccttttgcatattattctgaaacaacattaactagttactttgcgtcattgaaggtatgcacttcccctctatgttaggagtgaataaaattaaaaatagatccttataacaaagaaaggcagatagaatgattaaaaatgaccaaaacatgttagaaacagtctctcaggtgtatgcagatggtaattacaaaaaaacttttacnaaaaatg

SEQ ID NO: 237776 - DNA, 484 bp, Homo Sapiens
tttttttttttttttttttaatacaacgtttaatcatctggttgatcaagaaatgcaatgctcagtctaggaacagcagcagaaatagcgagagacacgggacttttatacaaaaaaatttgttgcttacaaaacatatgcaaaaaaagcttaaaaaaaccagagaccaaaggcagcatccttgctaattttcatctacattaagaaaaaaaaaatcttgtaactaatgtttttattttccttaaaaaaaatatttcgcttaggcacaatttgctggtggctttagaagaataagccaggtttccacagcatcccccttgagtgatatgtttccatttctccgctttttatagttaaggcatttttttcttctctgacaaagtgtatgttttgttgcttgctttcaggttttgtttactttcacatgtgcccggcggggttgtgggcttcgctcaggcctgggtggggagctgaaagctcgtgc

SEQ ID NO: 237777 - DNA, 594 bp, Homo Sapiens
gggctgaaaagcatatctatacattcggagaagtcgcaaatagaaaggaaaaacatattgaagggattacttgaaggagactatgaagttgtagtgagcacaggagtcttgggacgaggcctagacttgatcagtgtcaggctggttgtcaattttgatatgccttcaagtatggatgagtatgtccatcagattggaagagtaggaagattaggtcaaaatggaacagcgattactttcatcaataataattcaaaaagactcttctgggatattgcaaaacgagtaaagcccacaggatccattcttccccctcagttattaaattccccataccttcatgaccagaagagaaaggaacaacagaaagataaacagacacagaatgatctggttacaggagctaatcttatggatattatcagaaaacatgataaaagtaattctcagaaatgattttctctgccacttgaatatttttttttattgtatatagtcagcaaaaaattatggtttgcataaatggaaatgtacatgaattttaaaaattttaagatatttttaatttaataaaatttatataactaaaaaaaa

SEQ ID NO: 237778 - DNA, 624 bp, Homo Sapiens
tctgtgatgggtctcagatctctgcatttttaatctcacgtgattcttaagtatgtggtggaagtacctttcttcaggaaattctgtcctaagcttttaccctgagaaaataaaacctgcatgctttcaccatggacggtgggagactccactgaaacacatctgctagaccactaagtttatccttgtcacccagtttgctcttggaaagagtctgttcccttttgtcactgaaccaatcatgacataaacttgtgctttacctcctatagcacagccgagacaaggctggaacatttaattaaggtttttactaaggactcaggaataacaacagggaaatatctatgtaactagatgacctgacataaaatctatcttctgattgcagtctattgtgagaatgctgcttttcctagctcccagccttccatggggcagaaggctcttttaattaggaagagagggaggacaaaggagagccttttcttttgtccattactcttagaaatgaacaggtacataatagaaaataaataattattgttggtaatgtttacacagcagtgttagagcctctctgtagtgaaacaaaaataatgttctttcaaaaaaaaaaaaaaa

SEQ ID NO: 237779 - DNA, 628 bp, Homo Sapiens
ttgcaacagccagtgtgggtacctctggggagagaggacctcctctgacaaactggtctggtacccaccatgtgccaggatccaccctggcctctttttacccactgactccccagaacaacccttccaggcttctcttgtcatctttctctgcctgaggggaaactgaagctctgaaatgcgatgtgatctgtaccaggtcacccagctatgctgcaaagtgggttggccaaggccctttgcactgcatcaccctggtgcccagcaacatcaggtaaccttcactgagcaccaagcttatgccaggtctgtgctggccactctcatatacctcttcagatcctctgcttgtacccccagcccttgccttccctggattttgggcacccaggactttgctctgcctggtggagggtacttgatttctctgggcttccttcatctcaattctgacagtgtggaaggaaatctgtaggtacccaggtcctcagctccagactgggtgatgctggagacccaggagcaagtcagcacaggctctgcccacaggaggcatgcacaatctggtaggagaaacgcacaagtacagatagcttgctctctgaaaaaaaaaaaaaaaaaaaaaaaa

SEQ ID NO: 237780 - DNA, 619 bp, Homo Sapiens
ggacagccagcttgtaggggggagtgccacctgaaaaaaaaaatttccaggtccccaaagggtgaccgtcttccggaggacagcggatcgactaccatgtgggtgcccacaaaaattccacctctgagtcctcaactgctgaccccggggtcaggtccagattttgaacaaatctctctagagattgaacagagctgcgcctggatcccgccgcagtgaggagacctgaagaccagagaaaacacagcaagcccctggatcctcctggaatccccgatccctcttgctccctggcagagttttctagtccctcttacttgaagcatgtctttcagagcccggcaccacccatcttgagtatctgataccccatcagcctgagtctcttaaaggcctttatacacatatgtctacacatagggatttggatgatctcgggatcccacatcctcgctgtcccctgtccccccgcaacatcccccaccaatacctttctgaagttttctagtccctcctttttgtttgtgctccttaaagcccagccccatgcctgactttggttcccagtgagcattgtacatttgtggatattaaatctttggcaaagtcaaaaaaaaaa

SEQ ID NO: 237781 - DNA, 621 bp, Homo Sapiens
caggtgtccccagaaggctgtcatcttcagaaccaaactgggcaaggagatctgtgctgacccaaaggagaagtgggtccagaattatatgaaacacctgggccggaaagctcacaccctgaagacttgaactctgctacccctactgaaatcaagctggagtacgtgaaatgacttttccattctcctctggcctcctcttctatgctttggaatacttctaccataattttcaaataggatgcattcggttttgtgattcaaaatgtactatgtgttaagtaatattggctattatttgacttgttgctggtttggagtttatttgagtattgctgatcttttctaaagcaaggccttgagcaagtaggttgctgtctctaagcccccttcccttccactatgagctgctggcagtgggtttgtattcggttcccaggggttgagagcatgcctgtgggagtcatggacatgaagggatgctgcaatgtaggaaggagagctctttgtgaatgtgaggtgttgctaaatatgttattgtggaaagatgaatgcaatagtaggactgctgacattttgcagaaaatacattttatttaaaatctcaaaaaaaaaaaaata

SEQ ID NO: 237782 - DNA, 599 bp, Homo Sapiens
ctcaggggtgtccaccaaaaattctccttcaaaagagaagactccgtgcttcagggctatgacatcaacagccaaggggaagagtccatgggaaatgcagagccccttaggaaacccatcaaaaaccggagcataaagttaaagaaagtgaactcccaggaaatacacatgctcccaatcaaaaaacaacggctggccaccttttttccaagaaagtaaataacggctttttaaaatttgtatgattataatatggggaaaggtgcattggttttataaaaaggcatttaaaacaaattatctttgttaattattttggggagtagttgggaaatggaaaggtgaattggctctagaggccctgtatgctagtatcattttcttttttaatttttgacttttcacaaatgagtaaataagagcaacctatttttcaagcagattgcacattttttgcagctttaatggaatattgggtgaattagaggggtaaaaaaagctattttcattgccacaaagtgctttgatgatgtaatacctaataaagggtaggatgaatatttcacaataaatgtttgtttgcactaaaaaaaaaaaaa

SEQ ID NO: 237783 - DNA, 629 bp, Homo Sapiens
attagctgaggaatatctttttattagtagtagtagtaactcatttttagattcaagtaaagtttgttttccaggtgagatgacatttttaagaaattgaatttaagtatgtgcttttatatccggaccaggtttctcaaggaagcagaatacaagggaatgaaaggggaagggagggtagtgcccaagagaaacctcggctcctaagtgctcccctgccaggtttcccccgtgcctgcccactggcaccatcctggcagctccagcccacaccccctcctggaccctgggctgcctctcgctgaatagctgcagggggcctgctatgtgacaggtatggaatgaggtaatccttttccacctctaatttctgaagggtgtgtctgtccagtttttacttgttcattgaatttaaagccttaggaaccaacagctacagtgcaagctgtaattattgatgtctgtttcatattcatctgtaagttctggcatttgatcaagaagtcaatatatcacttcatcttcaggctgaatgtgtctcagctataaaggttttattgtttgatggatagcatacaattatgactgcccacaataaaaagtgttttcatttgtaaaaaaaaaaaaaa

SEQ ID NO: 237784 - DNA, 585 bp, Homo Sapiens
aggaactccgcatccttgtccctctctgcattcccagtttccgcaggagccttgatcaatggggaagcctgggtgaggatgggccaggtcccaattcccaaagctcctggaagagcctgaagacattgggaaaggctgggcctggggaggaggcagccctgggcctgctgcccatgcctctggtcctgggtggagcaggaatagttccactgtattgtcacagtgtgtttgcactttctgaggttctagctagtacagattgtatattgatagtacatattgctttgtttatgtctttgagatgagaaaggcttaaaacttgagaatatatatttggaatacagccttagaacggtttctgtacacatccacgtgcacttcacgggtgatcagttctagtacctacttgaaacagtgtctgtctgctactttattttcccaatttgatacataccctgatttgatgttttggtatttgagatgaactctgagtatgaagctgtaccataatgcaggacgtcagttttggtgtgactggacatacttgcttcaataaaagaatacatcactcccaaaaaaaaaaaa

SEQ ID NO: 237785 - DNA, 610 bp, Homo Sapiens
tgagaaaagaatatatgcaacttgtcacaggcaaaaggctaatttccgtaatatatacagcattcctacaaactaacaaggaatgcattgttaatttttgtgcattgctagtgagaaggtaaagtagtgcgatctttgcagcaacaatttgtaagtatcaaaattataaatgcacatgccctttgacttaggaattttacttatagaattgtgaatgtacagcttattcattgtagcattgtttaaatggcagtacctcaaaaatctatcagtagggactaattaaatgaactctggtccattatatagtcatagaaattaatgaagagccaggcacagtggctgaagcctgtaatcccagcactttgggaggatcacttgagcccaggagttcaagaccagcatgggcaacataggaagaccccatttctacaaaaaaaacccaaaaatgttagcaggatgcagtggggcaagcctgtggccctagctactagggaggctgatgtagaaggattgcttgagtcccagaggtgtaggctgcagtgagctgtgattgcaacaattgcactccatcctgggcaacagagtgagatcctgtctcaaaaaaaaa

SEQ ID NO: 237786 - DNA, 607 bp, Homo Sapiens
gacccccgtcacggccgctacctaacggcggctgccattttccagggtcgcatgcccatgagggaggtggatgaacagatgttcaacattcaagataagaacagcagctactttgctgactggttccccgacaacgtaaaaacagccgtctgtgacatcccaccccgggggctaaaaatgtcaggcagcttcattgggaataatgcggccatccaggaactcttcacgtgtgtctcagagcagtttacagcaatgttcaggcgcaaggccttcctccactggtacacgggcgagggcatggatgagatggaattcaccgaggccgagagcaacatgaatgacctggtgtctgaatatcagcaatatcaggatgccacggccaaggaggaggaggatgaggagtatgctgaggaggaggtggcctagaactctccttttctaggtaaagcgggggaggcagtgtgtattcttcactgtgttgtgacagctatgtgtcactacgcacttgttcatttgtgtcttcacatctcctgctgctgcattttaaagcacttttatagtgtgcagttttgactaataaagtattctcacagcaaaaaaaaaaaaa

SEQ ID NO: 237787 - DNA, 598 bp, Homo Sapiens
acctacattatgatcttcaaagcctgtgtggtctgccatccctctgattctttggacacaagcattgagaagaattctgagtggttatccatcagagatgactctgtctcattgactttcagattccccatcaacaaacacttgagggcctgtatgcatgggccaagggatttttacatccttgattacttccactgaggtgggagcatctccagtgctccccaattatatctcccccactccactactctcttcctccacttcatttttcctttgtcctttctctctaattcagtgttttggaggcctgacttggggacaacgtattattgatattattgtctgttttccttcttcccaatagaagaataagtcatggagcctgaagggtgcctagttgacttactgacaaaaggctctagttgggctgaacatgtgtgtggtggtgactcatttccatgccattgtggaattgagcagagaacctgctctcggaggatgcctagaagatgttgggaacagaagaaataaactgagtttaagggggacttaaactgctgaattcacctgtggatgtttttgagtaaataaaagctaa

SEQ ID NO: 237788 - DNA, 569 bp, Homo Sapiens
cagcagtaactaggcatccagaaagtagcttcaaccaaagctaatagagcccaagtttccgcaggaagtttggtgctgagctgtccagagcagttgtttatctgagtgttgctagcccttagccatgctttcttagctttattctcgcctgttcctaggcatagcctgaaccagagctatggctcactgctcgctttattctactccctagtcatgcggaacaacatagtctaaaaaggaagatgtggactggggagttaggagacctgatttctattccctatgcttctactaactagcctcgagatcttaaccgctctgtgcctcagtgttcccatctgcaaaatggggatagtgttaattgccctacctacctcacagggttgttgtgaggataaactgagacaatgaattcaaagcaagttgacaagtaagtgctatgcaaattgtaagaaatggaaacaatcatgttaaaagcaatggaatggacattggcagaagggttaatggattgtccagccctttctctgtgtggcttaaacccaggtcgccattgctttatacatttt

SEQ ID NO: 237789 - DNA, 624 bp, Homo Sapiens
gaggcatagtcccgagaagtcaccaaggccatctggagactcctggctttctgaactttgcgcgttaagccgggacagctgctttgctgcccggagagtagtccgcgccaggaagagagcaacgaggaaaggagagggactctggcgtcccggcaggcgagaggcgaggctgagcgaaagaaggaaggacagacggacctgtctgtcagagttcggagaacactggctctcagccctgagacacaggcctcagttaggacgctcggcgcccaaatctcatcagttttattgcctgctcgattatatagaaaaatacaaaaaatctgcattaaaaatattaatcctgcatgctggacatgtatggtaataatttctattttgtaccattttcttgtttaactttagcatgttgttgatcatggatcatactccccttgtttctttgggtgagaagggatcgcagtttggaaactccggcggctgcgtgcggggtttcagtcccagctgtaggcttgtaaatacccgccccgccaaaccgcatagagaacgtggcagcaagctgagggtctttgtttgggtttattattacggtatttttgtttgtaagttaaaaaaaaaaaaaaa

SEQ ID NO: 237790 - DNA, 617 bp, Homo Sapiens
cctgatccttaggtttctgaaatagggttctgttacatcctcttcgatagcctgtttaaaatgtttagaaggtctggagctcaaaaatgcgttcttccacattgataatttagtaaactgagaacattgacatcactacagggcagcataagaggttgcttacatgtggtagcagctctggtttgattcaagttgctaccatgtacattgacagcacatataccataaccagcgtgttgggttgaattgcactttctacctttgtatgagatttacagactttccttctgggtttgtatcatgaccagaggggtactatagggttggtttatactgcaatatagaggatcagaagccatttgatttggtaggtgtgtcagaagggagaatgatggcagacgaactgctggaagaggtcagaagatagccatgctaaaatgcaattatatcctcatgtttatcccaaactaatcttggacttttccactcattagctttgttttgcccttgtttcccttgaaggtttaagttcaaccatattctgtcaactgttcagtttcagtggaatcttgtatttctggttcattataacaaattgttcgcttaaaaaaaaaacc

SEQ ID NO: 237791 - DNA, 593 bp, Homo Sapiens
ccctattgttatacaatagatgttgaaattaaattagatgaagaaggatttgtattgccatccacagctaatgaagatatccataaaaggatagcactgtgtattgatggtccaaaaaggttttgctccaatagcaaacacttactggggaaagaagctattaaacaaagacacctacagttactcggttatcaagttgttcagatcccctatcatgagattgggatgctaaaatcaagacgtgaattggtggaatatttacaaagaaaactgttttctcaaaacactgttcattggttgcaagaatgaatactgacttcagaactcaaacaatggaagaacttgcatttttatggaactcagtattaaaagaaaaatataatgtgaattagccactttgcagaatatgttctagactggtgatctgaaagcatctgtagttttccttatactatgtatacatttattgtggtaaaatttaaaattaattttaatttaatactagtgtcatagatactttttgtacatcaaacaattgatcatgtgctgtaaaggaattcaatgaataaatgttatttttaaaaaaaaaaaaa

SEQ ID NO: 237792 - DNA, 583 bp, Homo Sapiens
ctgacagattttttgccaaaactgcttgattgttctatggagattaaaagtttccatgagccaccgaagttaccttcatattccacgcatgaactctgtgagcgatttgcccgaatcatgttgtccctcagtcgaactcctgcttatggaagataaactgcacactttccctgaacacactgtataaactctttttagttcttaacccttgccttcctgtcacagggtttgcttgttgctgctatagtttttaacttttttttattttaataactgcaaaagacaaaatgactatacagactttagtcagactgcagacaataaagctgaaaatcgcatggcgctcagacattttaaccggaactgatgtataatcacaaatctaattgattttattatggcaaaactatgcttttgccaccttcctgttgcagtattactttgcttttatcttttctttctcaacagctttccattcagtctggatccttccatgactacagccatttaagtgttcagcactgtgtacgatacataatatttggtagcttgtaaatgaaataaagaataaagttttaaaaaa

SEQ ID NO: 237793 - DNA, 573 bp, Homo Sapiens
cagggacacaactgccacaagccggacacgtgggtcttttcaaacatagacaatcatgggatattaaacttgaaggacaatagagatcatctagtcccatcaactcactatatatatgaggaacctgaggtccagagtggggaagtgtcttacccaaggtcacatggtttcagagaaattatgttgaatccaataagccttcccggacattccaagcctcttaaccatggcatctatgttgaggatgtcaatgtttatttcagcaaaggacgtcatggcttttaaaaactccttttaagcctccttgttttgatgtcaccttggtaggctgggccctctgagaggttggaagctctaggcattgttctctttggatccagggatgctaagtagaaactgcatgagccaccagtgccccggcaccctttaacaccaccagatgggtgttttcccccatccaccactggcagggttgccccttccctccaatcatcactgtgctccttttttcccggcctacgaggcagctcctgccactatctttagagccaataaagagaattaaaaaccaaa

SEQ ID NO: 237794 - DNA, 592 bp, Homo Sapiens
atgtgtgtgtccaggaaggaaaaaaaggtggatcagtgattttacttgaaaacaagctccatcccttttctatatttataagaagagaagatcttgagtgaagcagcacgcgacccaggtgtgtgtgaattgaatggagacgtttcttttctctttctttaatttttgtttttgttctttttttctttaaggaaagttttattttactgttcattttactttcttggtaacaaaaactaaaataaggaatagaaaagctgtttttcaggctgacagtccaattaagggtagccaagaccttgcatggtagagtaggaatcatagtgtcagtgaggtcccgtgagtctttgtgagtccttgtgtcatcgttcgggcactgtttttttatgcaagggcaaaaatctttgtatctggggaaaaaaaacttttttttaaattaaaaaggaaaataaaagatattgaggtcttcctagtgttacttaaattaagatcaaggtaagaaacattgtaaaaaaaaattacaaaagtgctatttgtttcctaaaaacagtgatttctattaaaaaggtgtcagaactggaaaaaaaaaaaa

SEQ ID NO: 237795 - DNA, 590 bp, Homo Sapiens
ctcaaataaccagctggaaaatatccatacagagtaagaaaaggaaagcctttgacttcactgttatgttgagattattttgtaaagacaaaaagcaaaaaaattttaaaaaaataaaaaggaaatagtatatgtataatttaaaaaagaaagttatacaaaccataaaagagtaccataaacacactcctactgagcacattttagaaagattatgaaacaaaattttttgttcattagatgaagtctcttcaaaggtgctttctcttcgtttgtgagtgaaaaagcccttaccccaaagccacaaagtgaaatctaccaccaaagagtgctaataaatagcagacttcctgcttcagttggtaaaaccagctgctgatttattaggtatctagagcggcaggttcatcctgttccagataggatactcatctgcagcaaaggctacttagagagatttcacacctgctgatgtgggttggactacatcttcctataactcgttccagcattcttccaacagatgcacacgctgcttctccttccgggaaacagcacatggagtccaagcacttgatacctgcatttgt

SEQ ID NO: 237796 - DNA, 564 bp, Homo Sapiens
ctcatggggctgctgtgtgggtttgggaggcaaaaatctatgaagggttttttgaaatcccataggtgccacatctatgagatgtttgataaatgtgaatatgcttttacatttgggcttatctaatttgcaataagagagcctctctctatcaacaccagcttctctctcgggctgtttgctcagggaaggcaagaaagccacgtgctggccctctgccttctctaaagtgctgttggagcatggaggagctggaggagatggggatggactgacagctaagagggcggctgctgggactagatagtggatgaagaaagaaggacgaggaagccgtggggcagcctcttcacatggggacaggggatggagcatgaggcaagggaaggaaaagcagagcttatttttcacctaaggtggagaaggatcactttacaggcaacgctcattttaagcaacccttaagaaatgtttatgtttctttattaccaatgtaatctatgattattgaaggaaatttagaaaatgcgtagatacaaaattaaaaaaaaatactgtccaaaa

SEQ ID NO: 237797 - DNA, 424 bp, Homo Sapiens
gcactggaataatttttatttttttccttggcaaaaagtcaagtgctacatttttaaaaacagaaaatctcaaacaatcaaacgcattacccattacagaagagggtctagcaatagtacaaaacatcctactgaagattttttttttaaatatacaagtcagtttaaaatgatagaagttctgtgagaactaagaaatctacagcctgtagtttaataatagaaaaaaaattaagacaattaaaagatctatagcatccagcattttgcttaattccctgtttatagcacctatttctctaggttcgaagatgagaattccagaacctgtggtatgtgctgtgtaacaagttagggtggacttgctgtctctcctctccagtagccccccaccattaaaaggagaatatatatataatttttt

SEQ ID NO: 237798 - DNA, 508 bp, Homo Sapiens
aaaaaagacttatctattatgtataaaggaaaatatccaagacaatttctttaaaatatatacaattctaacatagttatgcaatatatacattcatattttgacttaatctgccaaaataaacaggtacatatgaaactttatttacataatggctacagtttcagtctttagagttcaaagaaatagttaagattttcacctatttcatacttttcccccatgtttctcattcacctctagaggtttaaattaacctttcaaattgattaaaatgggtatgcctgaatgtacacaaaagggcattgttttatgtgtgcaaattgaaatattaaagatggatcagggatctcagtttaaggaatcctgccttctgtatgatgatgtcttaatttttgagattttcatatattgggttatagctatatatcaggacaggtaaatacattataaaattataacctttataataatttttagtataatcacttgtgtgactataataaat

SEQ ID NO: 237799 - DNA, 565 bp, Homo Sapiens
ccagcctcgctctcggggggggccatggtgaggctggagcctgaggaccaagtgtgggtgcaggtgggtgtgggtgactacattggcatctatgccagcatcaagacagacagcaccttctccggatttctggtgtactccgactggcacagctccccagtctttgcttagtgcccactgcaaagtgagctcatgctctcactcctagaaggagggtgtgaggctgacaaccaggtcatccaggagggctggcccccctggaatattgtgaatgactagggaggtggggtagagcactctccgtcctgctgctggcaaggaatgggaacagtggctgtctgcgatcaggtctggcagcatggggcagtggctggatttctgcccaagaccagaggagtgtgctgtgctggcaagtgtaagtcccccagttgctctggtccaggagcccacggtggggtgctctcttcctggtcctctgcttctctggatcctccccaccccctcctgctcctggggccggcccttttctcagagatcactcaataaacctaagaaccctcaaaaa

SEQ ID NO: 237800 - DNA, 574 bp, Homo Sapiens
aatctgcagcgagtcatccccatcaggagagcgccacttcgcagtaagatcgagattgtaaggaggattttaggagtgcagaaatttgacctggggatcatctgtgttgacaacaagaatattcagcacattaatagaatctacagagatagaaatgtcccaaccgatgtgctttcttttccatttcatgagcatctgaaagcaggtgaatttccccagcctgattttccagatgactacaatttgggagacattttcctaggagtggagtatatcttccatcagtgtaaagaaaatgaagattacaatgacgtcctgactgtgacggccacccacggactctgtcacttgctgggattcacacacggcacggaggcagagtggcagcagatgttccagaaggagaaggcggtgctggacgagctgggccgacgcacggggacccggctgcagcccctgacccggggcctcttcggagggagctgagggccgcgttccttctgaaagcgggacgcgggaggggtggaggctgcggggagccggggtcgcacacaaataaataacgaatgaacgt

SEQ ID NO: 237801 - DNA, 591 bp, Homo Sapiens
tctgctgaagatgtgcagcgcgtggtggacaccaataggaagcagcggttcgccctgcagctgggggatcccagcactggccttctcatccgggccaaccagggccattccctgcaggtacctaagttggagctgatgcccctggagacaccgcaggccctgcccccgatgctagtccatggtacattctggaagcactggccatccatcctactcaaaggcctgtcctgccagggaaggacgcacattcacctggccccaggactgcctggagaccccggtatcatcagtggcatgcggtcccattgtgaaatagctgtgttcatcgatggacccctggctctggcagatggaatacccttcttccgctctgccaatggggtgattctgactccagggaatactgatggcttcctccttcccaagtacttcaaggaggccctgcagctacgccctacccgaaagcccctttccttggctggtgatgaagagacagagtgtcagagtagccccaagcacagctccagagaaaggaggaggatccaacaataaaatattaatttataaaaaagaaattttaaaaagtaaaaa

SEQ ID NO: 237802 - DNA, 584 bp, Homo Sapiens
cagtttttaaagggatacaagtttaacaataaaaaacataaaaagcaaaaatagctcccctttttcttgcaaggctgttttttaccccaataatttagagtcctggggtgaaaggactagaaaaacaaaaatagaattttcaacaatctctatcttacaaagatatttagctatccaatgaaattgcactttactcaattcaaaattcgattgttttgattgattcctgtcagtttctgtcaaaacagaccatcttccccatttccatgtgaatttttgtgtcattgttgaaattgttgaaaaaatgttgttgttgtttttttaaatgtaagtgcagcatttcaaaacttttaaaaaactgaacagtagtagtagtagtttgccattttcggaattgttctgcaatgtgagtggattcattgtccttgcgggccatgttatatacttaactgctgactgctgaaccaaaacaaactaaaggaacaaataaaaaaggaatataactgcattttctttttccaatatgttacagaaaaacattgccctttgactgtcccgttatatattgcagatctcagctacta

SEQ ID NO: 237803 - DNA, 498 bp, Homo Sapiens
ccacgcgtccgctgtattgtcccactgaatgctcaagatattggttagaagtagaaaaggggagggggtagtatttagcctctgtccccactaaaaattattcccaattgtcatttgtgtcatctgtttagcttacagttttaatccttgtcaaaatgatcatttgccagggtgcataaaacaccctatttgatgagaactggttttaaaggaaaatggggccatcagaaggaagccggttggtgtgaagagacgtctgggaagagcccctggcgagggccctcattccactgggtgacccagaaggagaaaaccgcgatggcgcttctcatttgaaatgttttctttatggacagtgtttagcaattgttataatgtgtacttttgttgattgatctgtatacatatgtaaaataatttgttctctgagttaattttgttggaacaaagactttagtgcttcctacattaaaacatttttctgtaaaaaaaaaaaaa

SEQ ID NO: 237804 - DNA, 593 bp, Homo Sapiens
cccaaaaggccaaaaaacaaaaaagttagagttcgaggaattaccaactgtagttttagccttggttcatgctctcttgcatatttatataatctctgacttgtaatggaccctgactggaatgtgatccctcaggaacttagtagcctgagtctttcagtagactacactgcccagaaccctggccattctcaaaatgagaacttgggaatgtttaagaagaaatcaaacatgtttcaggaaaaggaaatctatggagtattatagggacattcccatgggaatgtatcttcctccatggcatgtcttgagggtcctttcttgttaggagtttatcctgccagcccataaatggactatttattgtaagtgtagaaaatcacagagaagcagttttgcaccagccttattcctgtgccttgttttcctcttgctctttttttacctgtatatctaatttatattttcatatatattgtgtattgattgaagtcactttaaatccttcttgggaatgacacagtatataaataaggaagaaagaaaacatgccaagctgagcatgctgctccaaataaatatctgctttccta

SEQ ID NO: 237805 - DNA, 607 bp, Homo Sapiens
tttttaaagcctgttttagaaacgaaaaggaaccatacattgaagcaaagcagactggcttaattatttttctaccaaaatgaaaaagtgagaaggggaaaaaagttttttaagcccatttactctctgaaatattaacaccagttgtctctggatgatgggatggtgtttaaattttctcctttatgctttattgtattttgcagattttctccaggaaacatgttttacttgtgcacgttcagttttcaaattttcaggtgtgaacgctggtgagagctgcttaaaaacaaagctatgggccgggcgcggtggctcacacctgtaatccccacactttgggaggctgaggcgggcggatcacctgaggtcaggagttcaagaccagcctggccaacgtggtgaaaccccgtctccactaaaaacacaaaaattagccgggcgtgtggtggcgggcccctgtaatcccagcttctcgggaggctgaggcaggagaatcgcttgaacccgggaggcagaggctgcagtgagccgagatcacgccactgcacccttctcactgcactggtgacagagcgagactccgtctcaaaaaaaaaaaaaaaaa

SEQ ID NO: 237806 - DNA, 465 bp, Homo Sapiens
tgttttggccaagtacttgtcttgcatgtctgaccttgcagaagctggggtggatcatagcatactaatgaagagaattagaagtagtttacaaagctcgctcactcctcatttctctgtgatcccttctatccagtggccccaccaccacctgggaaaacagatttttcagtacaggtgggataaatgctctgaaaggctgtgcccagaggaatgagcaaataggcaagtgtttccaaactacttggaggtttacaaaaaatatgtcccagaaaaaaaaaaaatcttaccaagatacgtaaagaaaaaaaaatttttttttaaacagtcaaagagtcatgtttgaatttcacaaaatcacatcagacagaagttgttttcttcaggagggaaatgaaccacttaatatacccatactaccttgaacaatgaaattgaattaaaatagccaaactttgctcgtgc

SEQ ID NO: 237807 - DNA, 637 bp, Homo Sapiens
ggatccaaaagacagggacgtttctgaagaacataagaaactttccttagaggaggagaccttgtggttaagaatccgatccttaacattgaggctgataagtggacttccaagtctcaaccaccctgtggagccaaagaactcggagaagactgccgagaatggggtatcctcccggattgatattcttcgtttgctccttcaacagctggaggcaaccctggagacaggaaagcgatttattgagaaggatattcagtatcctttccttggtcctgtacctaccagaatgggtggattctttaattctggctgttctcagtgccagataagctctttttatcttgtcaatgatatttatgagctggataccagtggtttagaggatacaatggagattcaggaacgaatagaaaatagttttaagtctttactagaccagttaaaagatgtcttcagtaaatgtaaaggtgacctcttagaagttaaagatggtaacttgaaaacacatcctactcttttagaaaatctagttttctttgttgagactatttctgttatcctttgggtatccagttactgtgatagtgtcctacgaccatacaaactaaatttacagaaaaagaaaaaaaaaaaa

SEQ ID NO: 237808 - DNA, 575 bp, Homo Sapiens
aattctgcctactgatttttgtaaacaaaattttattggaaaacagctgcagtttttcagttacaaacaaactgaaaaagtgtctgttgtttgtggctgtttccacattacaaaggctaagctgagtagttacaacagagaacatacggcctgtagagctgaaaaaatttcccgttttacccttcacataacctgtttgccaaactcttgatctaattaatgatccagctctcttgtgtaactttttgttttacttctgtcatttaagattgtatcccaaatctctggctgttgctgccattctaatatagtaaccttttatatagaaaattgccagtttaacagtcttatcctccagtaactggcaaattgttgtttagaataaacatgcaaaatctgcaattgtgttaaaaactaatataaaataattagactataaaaatgaatcttagctgggtatggtggcacacacctttagtcccagctactcaggtggctgaggtgggaggatcacttaagcccgggagttcagggttacactgagctatgattgtgccactgcacttgatcctgga

SEQ ID NO: 237809 - DNA, 612 bp, Homo Sapiens
ttcaagtattgttttccatttcccatccctgatttccagcttcttaaagctgactgttcttgcaggggccacttgcttctcctagagtacaaaagtaagggccttccttactaactgcagggtctctctattacacctcaacatacacactttgctgctactgtttgtactgtctacagtagaatttccttatcttgctcctggtagtgcattacaggcaagcatgaaatgtaaagtatttatttaaataaaaagaaaacctctaaattggtaattgaattacctccctgtagctttatagtttgtgacatttcttgaccttgctagttctttcattagatctgcgcaagatctagtcatctggttaaggattttaagcagatgcaactataaacccaagaaactgtattactattactgttggtcatactaaacctgtctatttcctgaagtatatgacccacaaggatgtggaataactaggagaaactgtttttgtacactgtacatccttagtatttttacacgtatatgatagggatgaacatgattttccttcgtacagacagcttaaataaagcactatgtcaatctgcaaaaaaaaaaaaaaaa

SEQ ID NO: 237810 - DNA, 552 bp, Homo Sapiens
tttcagtcctattcctatagtctcattctagcagttcctttaccaaacgctactcagtaagatgctgcaactttgccaacaaacgtccaatgaagactaattgagatctctggcgagaacatccccaacaaggtccaggtacatgacttgctactaaagactttattcatgcatttaccaagaaatatccagcatactacagggaatcaagtatgaagatttcctctttacctcttttaaaatactgtattcatttcctattcctacataacaaattgccacaaatttagcagcttaaaacaccactgatttattatctcatagttctgtaggtcagaagtccaagcaggcttaagtgagttctcggcttagggtctcacaaggctggattcaaagtgttggccaggctgggtcttatctggagactggagatgaatgcctttccaagcctatgaatgagcttatgggctgaattcagttcccgtggctgtaggactgcagttcccagctcctttgctgttagccaaggcctctctcagctcctcaaagcca

SEQ ID NO: 237811 - DNA, 567 bp, Homo Sapiens
tagaaggccaggaatagtttatgttcccaccagccagagtggaggatttggtagtcacagggcgtcaaatagagtcttcagaagggtgttgcctcagcactagggcataatttggtttcacttaacaaagcttaaaagctactcctgaacagtacccttaacttaccgttttcaaataagtgcatccctaacaaaactcaataatttagcaattcaaaaatatccagcatccactgaaaaattagcaggcatgcaaagaaacaagcaaatgtaacctataacaagcaaaaaaatcagtcagtagcaacagatccagaagtgacacagaagatagaattagtagacaaggacattaaaacagtgactgtaatccatctgctgaagaaggcagaggaacaactgaacatgtcagataaagacatgggagacattcaaaagacccacattagaatgtaagagatgaaaagtacaacatccaagatgaaaagtacattaggtgggatgaactgcagaatagacactatagaagagaagattagttaaatgttacataaggcaatagaaact

SEQ ID NO: 237812 - DNA, 582 bp, Homo Sapiens
taaaacactgaccattacgggcaattttatgaacaagaagaaggatacacaaaacgtacccttatctgtttccccttccttgtcagcatcgggaagatggtatgaagtcctctttggggcagggactctagtagatcttcttgtcagagaagctgcatggtttctgcagagcacagttagctagaaaggtgatagcattaaatgttcatctagagttaatagtgggaggagtaaaggtagccttgaggccagagcaggtagcaaggcattgtggaaagaggggaccagggtggctggggaagaggccgatgcataaagtcagcctgttcaaagtgctcagggacttagcaaaatgagaagatgtgacctgtgccaaaactattttgagaattttaaatgtgaccatttttctggtatgaataaacttacagcaacaaataatcaaagatacaattaatctgatattatatttgttgaaatagaaatttgattgtactataaatgatttttgtaaataatttatattctgctctaatactgtactgtgtagtgtgtctccgtatgtcatctcagggagcttaa

SEQ ID NO: 237813 - DNA, 626 bp, Homo Sapiens
gttgaagcagtctgaattgactaaaacagtcacttggagtagttataaaccactttcctgttgaaagcagaacatgctgattcaactgttttgttcaatagcaatgatagattttgtttaagtcccctacactttcttatttctaaatgatcaagagtacacttcctggcagtgattaaggagtgtgtatctaacagaaaaaatatatataccctgtgaacccgaatatggaattcagattgtttctgccctcagtatcatacttaaaaaacaagcatacaaacaaacataagggaacaaacagcaaccataacaaaaacaaacctttaaaggtgggtttttgctgtgataaatgaatacggtactctgaaggagaaaaaagtttctcaaatgagcttaaactgcaagtgatttaaaaattagagaatataattcttaaagctattgaaagtttcaaccagaaaacctcaagtgaattttgtatgtaaatgaaatcttgaatgtaagttctgtgattctttaagcaaacaattagctgaaaacttggtattgttgtagtttatgtagtaagtgacttggcacccatcagaaaataaagggcattaaattgaaaaaaaaaaaaaaaa

SEQ ID NO: 237814 - DNA, 565 bp, Homo Sapiens
gaggaactctgccgcttccctgagctgcctgcccgcaagcccctcacctaccagacgaagcagctcatcgcccgcgagatcgaggtggagaagatgcggcgggcggaggcttctgcccgggtagagaacagcccccaggtggatgggagccccccagggctcgagggtctgctggggggcattggggagaaaggggtgcaccgacctgccccacgcaaccatgagcagcggctggagcacatcatgaggcgagcggcccgggaggaacagcctgagaaggacttctttggacgtgtggtcgtcaggagcacagcagtcccgagtgcaggggacacggccccggagcaggactcagtggagcggcgcatgggcacagcggtgggcaggagcgaggtctggttccgcttcaacgagggtgtctccaacgccgtgcggcgcagcctgtacatcagggacttgctctagttctctgagccgcggacatgccctcgcattgcttcccgcagagtgcagagacaggaagctggagatgtctttataaagtcacacctttacagactgtaaa

SEQ ID NO: 237815 - DNA, 580 bp, Homo Sapiens
ttccttttagaacaacatgaattttattcaccttactattagaaaaaggaataactacagccagaaataacttcatttcctacaaggtataaaaagtggtcaagtgaatgtgaaggggcttttctacacaggaatatattatcgggaacaaagtatttcctgctgccttaactctttgggatgcataggataaaatgataaagaccattttaatatcagaaagggttgtcttattaatttttaaataaaacttcacatttcttaatggggagctcattcagaaactaaataatggtttctcaaagtgtggtcaggatacgatctgcatcagaatccttggaatgcttgttaaaaataccaattgctatgacaaaaccaagtctgctggaaactgcatttcagcaggtttcccatgttattctgatgtattttaacatttgagagccactaccaatcatctgtacagttcctactgttatgatcacaataagactaacatgaatttaataatctgaataatttttaaaatttaaataaacagaaattgaagttaaatttaaaaataaaaataacctcagaa

SEQ ID NO: 237816 - DNA, 618 bp, Homo Sapiens
ctgctggaattctgcctagctgtgctcactgctgtgctgcggtggaaacaggcttactctgacttccctggggtgagtgtgctggccggcttcacttaaccttgcctagtgtatcttatccctgcactgtgttgagtatgtcaccaagagtggtagaaggaacaaccagccaatcacgagatacacatgggagggcatttgcattgtgatggaagacagagaagaaaagcagatggcaattgagtagctgataagctgaaaattcactggatatgaaaatagttaatcatgagaaatcaactgattcaatcttcctattttgtcagcgaagggaatgagactctgggaagttaaatgactggcctggcattatgctatgagtttgtgcctttgctgaggacactagaacctggcttgcctcccttataagcagaaacaatttctgccacaaccactagtctctttaatagtattgacttggtaaagggcatttacacacgtaactggatccagtgaatgtcttatgctctgcatttgcccctggtgatcttaaaattcgtttgcctttttaaagctatattaaaaatgtattgttgaatcaaaaaaaaaaacaaaaaa

SEQ ID NO: 237817 - DNA, 576 bp, Homo Sapiens
agtcccctgcttcgaagtgaaatcttcaaactgctgctggccgagtttgcccagcaccgccggcttgatgctcacctccccctcctttgccgcctgtgcccaccagaactggctccagctgagctcctgcttctactgaggacatacctcccagatgaggtggggcccccaaccccattccctgagcctggagcagagccccctctcactgtgggcttgctcaaagccctgctggagcagactggggctcaaggatggctgtcgggcccagttctaagcccatatgaggacatcctatgggaccccagcactccacccccgactccacctcgggacctatgactacccttcaggcatcagaacactcagggcctggaggcttgcttgggactggaggcttgcttggacagttcctctgtgtcactgacacaggaaatcatttctaggacacagtgatcagggaagggtgcctgggacttggagggtcccatgtatggacctgtgtatgcaatactgttctgtcatctggagctatttttaagatgtgtgtgttaaatatatacatagtttaatata

SEQ ID NO: 237818 - DNA, 966 bp, Homo Sapiens
ccttggcccmhctctttttkkgkttttgscscchtawtyytgkggwwaaaaarawaaaamaghcaacaattttscttgtyttytctgcycccctaaggtccytctcccttcgccgtaagatgtgactgaccagtacagtttctcctgaattgacaaactgaactactccttctaccggctaaaccctvacatcagtagaatcaaaccaaaaacaaggtagagtgtttcacagagaagtggtggattgaataaggcagcagaaacacataccatccagcccctgaacctgaattttgccaaaacagagatactttaagtccatttcttttcaaaggggttaatgctcaaagtgggaatagtgactagggtattctagtggttggaataataatttctagaaaaggttcattgctgaggtaccaaaacagacatcatgctaaggaattcttttactgtgcgcttccctgaatagatacgccgtcaaacaaggcagaagctacaaataaagcttacttctactgaactcatgaagctgttcctagtgtcagttttgagtttcaagtgaagactgaatgtcaactgcaggctttccgaattcctcgaccatgtccatccatggattctcttcttgtctagatttccaagcatgaagatgctaactaaagcatttctcaatggggaacacgaaaagatttctattattgtgggttctccggtgttcctaaaggctgagttataactaaaggatttcaacctatttgtgagtttgatggtaacgctggaaaaatgcttgaagttgttactttgctcattataggagtatggtttccctccaggaaggtttctctaaaattaagagctattctacaacagagacccctctacacttaaggtatttatgggatctgtcctctcatggcttctcaggtgtttaaagaggctacaactccagctgaaattcatccc

SEQ ID NO: 237819 - DNA, 455 bp, Homo Sapiens
  misc_feature (94)..(94): n is a, c, g, or t
  misc_feature (438)..(438): n is a, c, g, or t
cagggaacttaaggccaattcgtgctgacttcctacaagaaaaaacaccaaggtctgggagcagggaacctaaagccagttaacgtgaacttcntacatctaaaccaaaaggaaaaacctcatctacacccgagtagcaaaggatcgaaggcgactgtcgctacaaccctcccccttgtaccagttctctgatagaaaaggacagtgccttggagtggccgtgggccaagcacaggccatgccttcatctgcatagggtaccaattcgcctcaacctttgattagccaaggaccaaatccttcattcagataaggggtagctgataggaacctcaaaaggagtacttaaaacccagaaaacattgtaaccgggtccttgggcggcttgctggggctcacacccaccctgtagagttctttttcactttttttcaatcnggcttttgctataacta

SEQ ID NO: 237820 - DNA, 1000 bp, Homo Sapiens
cccaccctcccccccccccycaggccsgatgccatcctgcccasacccaccytgcgccmctgctggrgrcacagccgcatggcakgacccytctccwtktctgcctctcagaaagragatagrsagctgaacakycccagacataayttkgtkwaatgctcctkttttctgccacaagccctttgtcttacccactacctcagagcacactgytaagaaaatgaaagccaccaatgagcccagcctgacacatatggactgctcgacaggtccactgtcccacgagcagaagctgtcacaaagcttggaaattgccttggcatccacccttggctctatgccctccttcacggcacggctgaccaggggacagctccagcaccttggcacaagagggagcaacacttcctggaggcctggcaccggctcggagcagcctgggagcatcctgggccccgaatgtgcctcctgcaaaagagtattttctccctacttcaaaaaggagccggtgtaccagctgcctgcggccacctcctgtgccgaccctgcctgggtgagaagcaacgctccctgcccatgacgtgcacagcctgccagcggccggttgctagccaagacgtgctgcgggtccacttctgagtgactgacctccactggaggagacccattgctgggaggagctgagggggaacaggagcagggccacagcacccctgaggtctggccaggccccaggcacagagctgcctgctccctcccggggctcttcttcatcacctcacggtatagcacattgcttctgcgctggtggcaatagggcaacaaagccataggccagagggcggggggatgtccctgcctccctgccaccccccctgcctgagcccaggacccactggagccagccccaccctaggcaggaagacccctgctgagggcccccccgtgcagtccgcatacccccctgtccagcagggcactgtgggtggctcaccctaga

SEQ ID NO: 237821 - DNA, 1000 bp, Homo Sapiens
ataagtgacctgttktcacccttgargacctcccactkkctyctcctgctcaccatcggagccatckcaagcggaaaaccctcatgatgctktktyttcacccaaaatttgttggaagaccctagaaaccctgccagagaagagtgtggtggaaccagctccctgcgaagagcagcccagctgcagagaaagttcccgcatctggagttcaggagtattcgggaaacctcaacacccggcttcggaagctggacgagcagcaggagttcagtgccatcatcctggcaacagctggcctgcagcgcatgggctggcacaaccgggtggggcagatcctgcaccctgaggaatgcatgtatgctgtgggccagggggccttgggcgtggaagtgcgagccaaggaccaggacatcttggatctggtgggtgtgctgcacgatcccgagactctcttcgctgcatcgctgaaagggccttcctgaggcacctggaaggaggctgcagtgtgccagtagccgtgcatacagctatgaaggatgggcaactgtacctgactggaggagtctggagtctagacggctcagatagcatacaagagaccatgcaggctaccatccatgtccctgcccagcatgaagatggccctgaggatgacccacagttggtaggcatcactgctcgtaacattccacgagggccccagttggctgcccagaacttgggcatcagcctggccaacttgttgctgagcaaaggagccaaaaacatcctggatgttgcacggcagcttaacgatgcccattaactggtttgtggggcacagatgcctgggttgctgctgtccagtgcctacatcccgggcctcagtgccccattctcactgctatctggggagtgattaccccgggagactgaactgcagggttcaagccttccagggatttgcctcaccttggggccttgatgactgccttgcctcctcagtatgtgggggcstcat

SEQ ID NO: 237822 - DNA, 916 bp, Homo Sapiens
gccttcctgcctccctgagccccgccatggtggtgccggaggaccagstgacccgstggcacccgcgcttcaacgtggatgaagtacccgacatcgagccggccgcgctgccccagccacccgccacggagaagctcaccactgctcaggaggtgctggcccgggcccgcaacctgatttcacccaggatggagaaggccttgagtcaattggccctgcgctcctgtgcgcccagcagccccgggtctcccaggccagcactgccggctaccccaccagccaccccgcctgcagcctctcccagtgctctgaagggggtgtcccaggatctgctggagcggatccgagccaaggaggcacagaagcagctggcacagatgacgcggtgcccggagcaggagcagcggctgcagcgcttagaacggctgcctgagctggcccgcgtgctgcggagcgtctttgtgtccgaacgcaagcctgcgctcagcatggaggtggcctgtgccaggatggtgggcagctgttgtactatcatgagccctggggaaatggagaagcacctgctgctcctctccgagctgctgccggactggctcagcctccaccgcatccgcaccgacacctacgtcaagctggacaaggccgcggacctggcccacatcactgcacgcctggcccaccagacacgtgctgaggaggggctgtgagcctgggggccactgtggacagacgtgggcttcagaagctcgctggcctgggcccaccagcattttcttttatgaacatgatacactttggccttcctttccccagcgcccctgagggccagaggcagatgtgggctgcaggttgcacagcccgagggtctatggchrmagrgcggtggcccccgcatggtsscbcttgttggmttcac

SEQ ID NO: 237823 - DNA, 935 bp, Homo Sapiens
  misc_feature (272)..(272): n is a, c, g, or t
  misc_feature (275)..(275): n is a, c, g, or t
  misc_feature (898)..(898): n is a, c, g, or t
  misc_feature (900)..(900): n is a, c, g, or t
acagcctttttatggtkgtgttactttttatttcctscctctaaacttcmcgtgtcccttataaacttktcrggatgtgtgttgcgttgaattctkcatttcytttttttgcccmccctcaggttawgytggtactaacttatccccagaggaaacagggtttatgagcactgacagatgtcttccctgggcaaaaaaaaaaaaaaatagtatatgtatacacacacacatacacatttatatttatatttcttaaagctkctaatcccttncancccctgatatctcagagatttcaaatcattgaacactgaagtatatttttcaggccagatgaaaaattgtattaaaaccctattcctggtcaggcgcagtcgctcacgcctataatcccagcactttgggaggccgaagtaagcagatcacctgaggccgggagttcaagacaaacctggccaacatggtgaaaccctgtccctactaaaactacaaaaaaattagcctgatgtggtgttgtgtgcctgtagtcccagctacttaggaggctgaggtgggagaattgcttgaacctgggaggcggaggttgcagtgagccaaaattacgccactgcaccccagcctgggcaacagagcgagacagtcccaaaaacaacaacaacamcmaaaaccctattccytgcctttgtaggagtcaaaataaatgaacttcttttttcttttttttattattatactttaagttctggggtacacgtgcagaatgtgcaggtttgttacataggtatgcacgtgccatggtggtttgctgcacccatcaacctgtcacctacattaggtatttcccctaatgttatccctcccctagccctccatcccctgacaggccctggtgtgtgangnccccgccggaggcccaaggggcccaaggvccaaaa

SEQ ID NO: 237824 - DNA, 960 bp, Homo Sapiens
  misc_feature (935)..(937): n is a, c, g, or t
tgagtggggaagcaagmawgaggttaatmwyaamagmgcacagagactgcagcctcmcmaatcgtgcaggctcaggcattgagtmrgtttmtgtgtmtmtggagggamagagcagaggggcmagggamtgagtgagtggmtaagcaggggagggtgatgtgaaggtgatmtcgagtttgcmaggggtgggctgaacaggagaagatgaacaaaggatccggctctcaaaaggccctggcagggactggatgctgggtacagaagcgcgccmttgggcttcaggctcmtgagmtggmagmacggcagggagagctccatccatgtcgcaggagcccaggaagctcagcccctgggtaaaaagtgctcactgcagctcagatmagtcctcaggtmamatttcggggagcmagcctcccctcttcccctccccagccccgctcctcccbbtgtggacacactccgggccctcagccagctggctgcatgaggagcagctttgtgctgtgggagagaccggttctgggagaatgggtttcatcccagcctacgtcacatttgcccagtgccttatgttttctgggtttttttcctccagttctgtttctaaaaaccagcttgagtttggctgaactgtcctttctcaacagaagcgcttttgcaattgatcccgggcaacaagtcaaaataagcttttaagtggagattttgtttttttcaaatgtatatgctttggaaattttgattttttagccagagggttttaccaagtgttctttgaagcacattacgatgcctcgagagggcggcccgtgcacgcgctttcaagaaaatgttctcgggacactcggtcttctctttgaaaggacattttctcattggttttgccgtgaaaatcctgtggagacttcgcaaagaaaacgcagccttacawtwgnnnattaaagacagattcgttgccaa

SEQ ID NO: 237825 - DNA, 405 bp, Homo Sapiens
agctatctgccccaatatttgtattcctattcctaagcctggtcattgtcagatgactcatagaagcctttaggagaagccagagtatacctagctctaggagtgcttatcagattaatgacctgatcatgaaactggcttaaaaacattagacacatatactcacacacatacacatgctgtgtagatgtttttgcccacagaaggggctgccagctgcatcaggactggccgtagtcttctctgtgctcagatatgctaaatattcatggaagttgcagctgctggagtatctcttcccagaaagctcccacaccccaactggacattccattggtcactgttaggtggtgactgctcatagcttttctctgcagcagaaatgttgctttccacatagccggg

SEQ ID NO: 237826 - DNA, 839 bp, Homo Sapiens
aggyttctytacagtatagcctttaatgccaggtttctgagacatctttggtttctaatatcttcctatktyaacacggatgatcayagggtytatggtwccgttgcttcaggtgatatccaggggttctcctgtgtcttttgaagattctagtcgawtcattcctcactctttttttcttttttgctccttgtttagtcattcactaatttccatacatgataacgaattcttcggtgatcccatagaagttgtaggtcaaagacaatcttcaatgatgccttttactttagaagatgctgataatgttgtctcgatgccttcgagatgcatgcctggggatcatcaagttggcttatccagaaaccaagccagaagttcgagaagaatatattacagcatttcagagtatttggagttactactagctctgaaatgcaacaatgcatacagatggaacagaaaagatggattcagttatttaaggttatcaccaatctagtgaaaatgttgwagtccagagacacgaggagaaatttttgtcctccaaaccactggctgtcagawcaagaagatattaaagcagataaggtgttattgaaagatctttttaatatttatcattaaaaaatacattcagcttgtgtctttctggagagaagaattaagcactttaaaattatttattttatgactcatatgactaaatagtaatgataaaccttattactaahtyttacgccaactatcattaatggaacatatagcagtatcattgacttaaaatgataktstgagttattaadcvtaaattttcctttttaacctgagattatttt

SEQ ID NO: 237827 - DNA, 883 bp, Homo Sapiens
  misc_feature (661)..(661): n is a, c, g, or t
  misc_feature (846)..(846): n is a, c, g, or t
  misc_feature (848)..(849): n is a, c, g, or t
  misc_feature (851)..(851): n is a, c, g, or t
  misc_feature (853)..(853): n is a, c, g, or t
  misc_feature (860)..(860): n is a, c, g, or t
  misc_feature (872)..(872): n is a, c, g, or t
gtatggtctctctggcagtgatgtcytggataatgtagcatatgctcgagcgttcaacacagaccaccagacccagctcctttatcaagcatcagccatgatggtagaatctaggtatgcactgcttattgtagacagtgccaccgccctttacagaacagactactcgggtcgaggtgagyttcagccaggcagatgcacttggccaggtttctgcggatgcttctgcgactcgctgatgagtttggtgtagcagtggtaatcactaatcaggtggtagctcaagtggatggagcagcgatgtttgctgctgatcccaaaaaacctattggaggaaatatcatcgcccatgcatcaacaaccagattgtatctgaggaaaggaagaggggaaaccagaatctgcaaaatctacgactctccctgtcttcctgaagctgaagctatgttcgccattaatgcagatggagtgggagatgccaaagactgaatcattgggtttttcctctgttaaaaaccttaagtgctgcagcctaatgagagtgcactgctccctggggttctctacaggcctcttcctgttgtgactgccaggataaagcttccgggaaaacagctattatatcagcttttctgatggtataaacaggagacaggtcagnagtcacaaactgatctaaaatgtttatwccttctgtagtgtattaatctctgtgtgttttctttggttttggaggaggggtatgaagtatctttgacatggtgccttaggaatgacttgggtttaacaagctgtctactggacaatcttatgtttccaagagaactaaagctggagagacctgancnntntntgaatantaaattaatgrnrtaaaaaaaaa

SEQ ID NO: 237828 - DNA, 1000 bp, Homo Sapiens
tccyccccagtwttttttkgrccaagttttwggaaamagcatararcattwtycacaggaagcctgcctctcactcttcacactaatgrcctctactgacccaakttytttttctcggcagcctggraccactatgagcagagagatgggagtctgtgtaagaaggatgcaagtatcctttgatttggagtggacagagcaggtccttgcaaaggcagtgggttaaacaacgggatgtctgtgggacaggccagggaaggagggcagagacagggtctccagttcaccttgccgcagaactagcctaatcgtccctgcttctggtcttggccacttggcaatcatggggaagttgactccccgcctcacttgggcttggagctggatactcgtggccacgcccaggataggttgccagagtttcattaggccgctgggtcgggctggaggcttgtgtacacctcggagcagtcgggcagcaggagggccggaagcctggttggtttgtatatgacctctcttgcccttgtgcactttccttgatttagcaaccttgacctgcactggccctcacagctgttggagggaagtagcctcttgcagggaaatattttcccctgccctggaatctcctatgtgcctgttaaagattccagggccaagaactcggcaggctgaggagcagctaggtaggtgggttatgcggttcaggactgcttctggaagggactgcctgtacttctgtaccaccgttgccctttacactttgctcagggcggggtgggggaagcattcaaacaaaacaaggaagggaactgtctggcaaagcataagtggatgcatccagagctcagtcccctttaatcttttgtctctgggcgttctgctgccttcctcataccggggactggcattccaggtcagcttggctgtggtcttagaggcagggagtgcctacccagtcctgcctcaggagcagggtgagtagctaaatacagac

SEQ ID NO: 237829 - DNA, 876 bp, Homo Sapiens
  misc_feature (228)..(228): n is a, c, g, or t
  misc_feature (459)..(459): n is a, c, g, or t
  misc_feature (758)..(758): n is a, c, g, or t
  misc_feature (827)..(827): n is a, c, g, or t
  misc_feature (832)..(832): n is a, c, g, or t
  misc_feature (841)..(841): n is a, c, g, or t
  misc_feature (855)..(855): n is a, c, g, or t
gtgaggttgttaataacagagtgatgcaatttttaactgttcagaaaaaacaaaagttatatatgaaaggaagtgtcatcatagtacaccgtgttgcttagctgtgaaccatacataataagtattatgttaaaaaactagactaaaaatcaggatttacacctgccatgtaaacactggtcagacgcacagcccccagaagtgctggggtagtgtaccctgaggaanactcacagggaggggctccctgggcaagtgtgtaggtactccattgtcctcttccttctggggcagtataaagcagtctgacaagattacacatgtcagactctgggaaaattaccccgtcacttctggtatgatgagagactgggagacmcattataaaatgtatataatagtttttgctattcaaatatgtttatttcctgagtgtgactagtaaaaagttagataatnaggcatgttgagttattggaatcctcttttgattctatgtgttggttagcagatagcaaatattataatagcaagggatactagccctctcaaacacacaaaagaaaatctgtctaaatgtgtttagatccaagcgctatcaatgttgggaggaaatgggtaagaaggaaaaagattatgttcctgtctttcttgatgttagttwgcaaagaaagtaaaaaaagaaaaaagttatatccccaaatttaagaaataagtaatatatgacctaatgaatacatttatggatggtacttggnactgcttttttggtggtggtggttgttttttggttatgtcttaataactgtgttttagttgaasagaantsccnatgtgaacnttggatgatattangacttcccatccaaaatatgt

SEQ ID NO: 237830 - DNA, 1000 bp, Homo Sapiens
attwttttttttcwtcctcattaaaykctaraaaaaamrtkktaatratscamtaaawatcaagcctcmacctcagccagyctcacaccamacgmrtmacmccamacacacctttakggttcctgtccattccttctctaattacmwkgcagttwtttacacctctactgtgycctaatcccataccccaccctcmwtcagkgaccctgttccttttttagagaaattgaagctcttagacattggttccacagtaataattttaaaacttcttacaactacctacaaagcagatgttctatcctatctacagagcagaaaattgaaattctcaagtagcagacccggtattaaagtgcagatctgactttaaagtccatgttcattttacacagcaggctgcctcttaagatagtatttattgagcacacactttgtgtaggttctgattttggtagatgtcatgctttatattaatctttacaacaactataagtaagaggtattaacctcacttaacagatgaggaagcaagaatccagaatatgccaggaggcacattctgcagatttcgtgcaaacatttatacacagcttcttttttttttttttgagacagagtctcgctctgtcacccaggctggagtgcagtggagcgatctaggctcactgcaacctccgccacccgggttcaagcagttctcctgcctcagcctctcgagtagctgggattacagggcatgcgccaccacgcccagctaattttgtttttgtattttaagtagagacggggtttcactatattggtcaggctggtcttgaactcctgaccttgtgatccgcccgcctcggcctccaaaagtgctgggattacaggtgtgagccaccacggccggcctatacaaagtttcttattgagaaaagtggttccaatcatgttttttgccccctttagctgctatctcttgaacagaaaagtttgttaggaaggtaaaagttgc

SEQ ID NO: 237831 - DNA, 955 bp, Homo Sapiens
  misc_feature (931)..(931): n is a, c, g, or t
cagttgaagtggcccctatggcgcatccgctcaccctttctgccatcctgtccaggtctacagagctcatccgccaggactttgatgtccccmccagccacctgattggagcacatggctactgwacacaggaacttgtcaatctgctcctaactgggaaagctgtgtccaaacgttttcaacgatgtggttgagctggattctggggatgggaacwtcacacttctmagaggcattgctgcacgcagtgatattggcttcttttctctctttgagcattactacatgtgccaggttggctgcttcctgaagaccccgaggttccccatctgggtggtttgcagtgagagccacttcagcatcctctttagcctgcagccggggctcctgcgtgactggaggactgagaggctctttkacttgtactactacgatggcctggccaaccagcaaragcagatccggctgaccattgacaccacccaaaccatctctgaggaaacagacaacgaccttgtcccacccctcgagctctgcatcagaaccaagtggaagggggcatcagtggactggracggctcagaccccatcctgtgaccgttggatgtgggtaaaccctgtggtccaccactcatcacctcatcaccgaggatgacagctgaaccccaagcctctggggcaggtctcatgtaccccaacctgggtcagcatgactgcagaagcatccagagcctccctgccccttccatgaagggcccacccaagactgtgctggggacccagtgtgttgctgggtcccctcccagctgggctgttactgctgagtactggaaggaggttgccagggtctctgctacctttgtctgcatccctcccttgctccctgctgggtggtccctcacccaggcctccaatgtggttggccctgggnactcattacttctggtkgbtggct

SEQ ID NO: 237832 - DNA, 1000 bp, Homo Sapiens
  misc_feature (696)..(696): n is a, c, g, or t
accgaaacagaabgytttstsgggctgaactcagtgcactgtgtccagggatctcaccctccctbgcwccwcaaagcckggatcactataattcaaccaaaggctctgcaaatgaccggcctgattttttaaagacgaccagctcttcattgtgctggaatttgagtttggagggattgacttagagcaaatgcgaaccaagttgtcttccttggcaactgcaaagagcattctacaccggctmacagcctccctcgcagtggcagaggcatcactgcgctttgagcaccgasactwacactgggggaacgtgctcttaaagaaaaccarcctcaaaaaactccactacaccctcaatgggaagagcagcactatccccagctgtgggttgcaagtgagcatcattgactacaccctgtcgcgcttggaacgggatgggattgtggttttctgtgacgttwccatggatgaggacctgtttaccggtgacggtgactaccagtttvacatcaacaggctmatgaagaaggagaataacaaccgctggggtgaatatcaccacttatagtaatgtgctctggttacattacctsacagacaagatgctgaaacaaatgaccttcaagactaaatgtaacactcctgccatgaagcaaattaagagaaaaatccaggagttccacaggacaatgctgnacttcagctctgccactcacttgctctgccmgcacagtctgtttaagtaagctaaatgtctcttactgccccgaaatgagaggagactggtcttgaagcctctggtgctgtttcaacctccatccccacaggagggtggcactcccattctcacaggtttccagtcagcttttcaaacaagaattttgtttccaaatggaaactgaaatatttgttgaaatgtttaaatttgctgataacaaatgttctgaaagaagtaaactagccgggcacagtgcgtgcgcctgtagtcccagctactcgg

SEQ ID NO: 237833 - DNA, 1000 bp, Homo Sapiens
  misc_feature (110)..(110): n is a, c, g, or t
  misc_feature (652)..(652): n is a, c, g, or t
  misc_feature (993)..(993): n is a, c, g, or t
  misc_feature (995)..(995): n is a, c, g, or t
  misc_feature (998)..(998): n is a, c, g, or t
tttttagacatgaaagattccattwgttraacagttctcasrttktagttgcaatcccctkgggtccccmaagaccctttcagrgkttkgagggtcaaaagtgtgwcatnatatycaaagactrtwtycmttttcmactgtktkgmatttgaactggtgatgctaaagtaatgggtggatamgctgctggtgccttagtgtgattmaaggtagtgccacmaaagtgwacttgtagtttctgtattagtcacctgmcgwgaactcacagtaaamtamataactcaactgagtattacccagttatacccaatmcctgatgaagtattaaaatgttattagtwttattaactctctacacttgaatgtgtgttttttaaaatattctgtgtgatgacatgggtagtgtgcataaagtacctctgtgtctgaagtatgatagttgtcttgaggaaaagcacttgtgtgattgaattgtgaggtaaactacctgatttttttttgttgttacatgaaagaataactgacaaatctttaaagtatttacaatatcactccagaaaagaaaacaaatcaaataaatattractcaaaactctccaagtacatatcaaaatctcaggaagggaaaaaagagtctaaagaacaaaatatnacactattttatttcagtcatgttagttcagtttccacagtttgaactgggtatagattaatatctaaaaccaaaaaatgaacatgtgtatagtgatgctsaaaaatgtgcattattttttatttatattttaggaataataaagttagttattaaagaatttagtgattttgattgagtgagaggtgtgagctatatttgcttctttcctgtatgatatacatacattgtttccaatctcatttctattaaataactataggagagcccacagccttgttattttacatatcactatttagatatttgttatttatttatttgtgttggcctgaagtaantnttnct

SEQ ID NO: 237834 - DNA, 1000 bp, Homo Sapiens
tttggggccctcmcctacctkktttttcctccscaacmakctgytccccttgaaatgatgatgsgagacggggykctcagcgccatctgcstmatctgcgagaccgccaagacctggagcagccggaccsgggtggacatgctgcaggagccgctgctgaaggcgctaaaggtctacgtgcggaagcggaggcccagccgcccccacatgttccccaagatgctaatgaagattactgacctgcgaagcatcagcgccaagggggctgagcgggtgatcacgctgaagatggagatcccgggctccatgccgcctctcatccaggaaatgttggagaactcagagggcctggacactctgagcggacagccggggggtggggggcgggacgggggtggcctggcccccccgccaggcagctgtagccccagcctcagccccagctccaacagaagcagcccggccacccactcccgcgtgaccgcccacgccacatggacacagccctcgccctccgccccggcttttctctgcctttctaccgaccatgtgaccccgcaccagccctgcccccacctgccctcccgggcagtactggggaccttccctgggggacggggagggaggaggcagcgactccttggacagaggcctgggccctcagtggactgcctgctcccacagcctgggctgacgtcagaggccgaggccaggaactgagtgaggcccctggtcctgggtctcaggatgggtcctgggggcctcgtgttcatcaagacacccctctgcccagctcaccacatcttcatcaccagctaaacgccaggacttggctcccccatcctcagaactcacaagccattgctccccagctggggaacctcaacctcccccctgcctcggttggtgacagagggggtgggacaggggcggggggttccccctgtacataccctgccataccaaccccaggtattaattctcgctggttttgttttta

SEQ ID NO: 237835 - DNA, 1000 bp, Homo Sapiens
  misc_feature (117)..(117): n is a, c, g, or t
  misc_feature (977)..(977): n is a, c, g, or t
gtctccagtaatcgagtgctsaaaactcatcgctaragcacgcccagaatctyctcgagcccattccctagccasagccctgcctgkggagagaarccaagstgcgtcgaactgtcntgccacaaaatcccatatattctctgcagttaatggggtagatgacgtgcatgggagggagagagaggtgggasggavacagagacagagacagagagagacagagacacgagagagatctgagagagagactctgaggacatagagagagactcasagagactccaagattcaaagagactaatagagacacagagatgtaatagagaagatgagagacagagacagacacgcgctggacagaggggcaggagagtgccaaggttgtcctggaggmcagacagcccagctgagcctccttacctcccwtcagccaagcccacctgcacgtgatctgctggcgtcaggctgctgctctgcgdgsatggctggagacagtagaggcatgaacacacatggatgcacacacacacacgccaatgcacacacacagagatatgcacacacacggatgcacabacagatggtcacacagagatakgcaaacacaccgatgcacacgcacatagagatatgcacacacagatgcacayacagatatacacatggatgcacgcacatgccaatgcacgcacacatcagtgcacacggatgcacagagatatgcacacaccgatgtgygcacacacagatatgcacacacatggatgagcacacacacaccaatgcgcacacacaccgatgtacacacacagatgcacacacagatgcacacacaccgatgctgactccatgtgtgytgtcttctgaaggcggttgtttagctctcacttttctggttcttatccattatcatcttcacttcagacaattcagaagcatcaccatgcatggtggcgaatgccmccaaamtytccmcnaaatgtatttckcscttsgctgg

SEQ ID NO: 237836 - DNA, 1000 bp, Homo Sapiens
tttccycmrtttaataattatttattggttgtggtttggtttttttgttgtttkttktagtgaktccccatcctctggcccctaraaatgctsccttgtgtktggggtacctgggaaaggtggtggctgaggcagtcataatgcagtatcttcccctaactccagccacaaagctcatacccagccctaccaatcatgaattggaactccataaggaggggccaaattgggagaccttttggcaaacagtgtctattttacagagaggcaaaccaagcctccttagtgccctggggctgatggtcacccagagccatagagcacccttcctcctgggccagagctgggttatcatggttggcttaggtacctcaggtggcccaggaggtcccccctccataaggacgtcaaacttccatgagggccagtgttcctagtgtgggccaggaacaggacagggagaccttgtgatggcggggcagggagcctgttcgtagggaagatgaggaggcaagggctgcctctcacacctccaggttctgtaagttctggggagggagcgccccacctgctgaggtcggtcctctcagccctgcctgccctggcctgggctctcccagcctcccagccctctgccccctcagatggctttttgtttttgtttttttttgcatccatcagagactgcacctctgtgtggcaggcagggcatgggttttagtcctggccactgaccagctgtgtggccctggccgagtcgtagccccctggagcccagcttccatttctataaaatggttgtttcgggagagaggggcaggctttctgtgtgactcgggagttcttccatgagggctgccagggggtggtgtgccaggacbtcaggctgggcctttgtgctggccttgcagtgggtgtgtggggaagtcactgtcccactatgggtctccactacccagtcactgaccctgggagaccccttctgtgtgggagggagcgg

SEQ ID NO: 237837 - DNA, 915 bp, Homo Sapiens
  misc_feature (875)..(875): n is a, c, g, or t
  misc_feature (887)..(887): n is a, c, g, or t
tataasccacttkcttgcctktktgctgctccacccacatgccccactgtcagcccaggcaggagccttcctggccgggctcaggatctgcctgcagcccagccaggccatcacccagccccgatgcatcctggcactgcacgcttactcttcacaagcacttatacgcggatggcctccgagaccctgcctccctggtctgctgaggtcaggccagktctcccacggagccgsgcagctccacagcgcccaccacctggcaccgttaggtttcagatcycccgtgtggtgtttgatgtcggcttttgttcctaccttgggagtttggattgtttcctctggtgtctttgtttaccttcctcactgttctacctcctggccaggtctcagcttagcttccctggtgtggggtgtttttcaagccttccagccacagctgtctcccctcaggctggacggctccggggtgacagggcttcaccctctgcctgcagacccctggtgggcacatctcacaggcttccgtcttgctgagttgggtacggaggcagaagtggggtgtggaggaaagtcagagggaaatctgcttcagaaaggaagggtctttagacacaaagactggaggcccttccccgcccgcacgggagctgccatcgtgggtctcatgcacgtcaagaccttcccacatccaaactcagcttccagcagggattttgactttggatgacaaggctttatttgtaaatatgctcttaatatgcaactttgagaataaaatagaaacatcatgtattttaaaatataagatgaagtgtgacgcactgtatacaatttaatatatatttttagggttttgtwatttaagaaaatggaangtaatggtactnttacaaaagagaaaaaatgttatttata

SEQ ID NO: 237838 - DNA, 1000 bp, Homo Sapiens
ggaaaabccaggycttaccataaawtgragyttatttcccytagaatggraacccagtrtmtwktgtttcctmccacaacccatagggcctctctctcccmtgggctgaacagctwtttgaggaasccattcagcycccwcagttgagctcccacagggctttaggtgtccattccctttcaactkcttagaggcagctttgagcacagccttcctggaaggaagctaggcaagacctgccacacagcgaaggttgggtttacaagggtgacattggtacccccttggccaagagtaaagaagaacaagtctaagccttgcttttatcttagttgtctgggtggtagcagaactcatcagctccttatcctcagtctgttcctctataaaagatgagagatgttcactgactttgtgcagtgagaaggcagcaagtactcacggctggtgctgtgggacctcacagcttctaaggagaggggctgggagggcctttgccatcagatctgccaagcacctaatgcttgcctgtggtgaaggcaagatggaccaagggccttggagaaaagggctcccaggcttctgaactttgaggcctcagcactttctgcattatcgtcaaactctttggaaagaaaccaaatcattaaaaagtagaaagaaatctgcctcttgtctgccctactgcccctttacccccactctgtccccaaatgatattattgcaccttgacctgggagcgcagagaggggagggagttggcagagacttctggtgccctctgccctcctagcaacagatgccacttatattttggcccctggcagcctcgcccagcccctgatcagcccaggcctagggcagttaggacctttctgtttattttctgaagcagagagaatgatctcagagtttgcaaatgaagccttttttgcactttcattcacatgcactttggtggggttacatttttgtacttgcctctcgtgtgtgcacatg

SEQ ID NO: 237839 - DNA, 999 bp, Homo Sapiens
  misc_feature (428)..(428): n is a, c, g, or t
cagagwttmccsatcttcacaraacagatbsagaccgtstgcccasrcgagtccccgggaacaacgtgtggacattcaggtscgcccactacgacggacagagcccaacaagctsagtgctgccagaacctgtgaccccksgctccacccagcgtggtgcacgtcctccgccckccccgccacggtatcctytgcccctccctgctgtccctctgtggccggctcgttccagccctcccagtgagctctgcacggccgggccggggcccaggaaggacaggagccagtgctaccccgtcctgcccggggaaaagctagaagcccccggtttgctgcacccatgaaactcgggtccccacagcgtcttggcggggtggggagggcggcaggatggacggggctggccagaggcgaggaggacgggcggnacggcgccgccttctccccttttccttggccgactctagggagcgattgcctccctccctctgtgaccgggtggcccagccagcccgtcgtccccacccagaaccgtgctctgggccaaagcccgaagaaccaggcagcgggggccggggcaggcggaccccccgggctctcagcgcccacccgctcctccgcacacagcagctcgcacaggcctcccacctctgcctgttgattgatgcagggagaagcccgtccccccctctcccctctcccctcccctctcctgcacgcaacgcgccctctcggccctccctgtccccctcctctgtctcgtctccccatctggtctggaacctgtttgcaagtgaagcaatatctccgtgttttgtatatacaaccgctcttgtagcctttggtttttgttaatgtagagaaacacagattctttatacactttgtaagatttacgccaaaccccagctctcgatctcttcttctccctgtggcccctgcgctgttgccccgtccccgtcaccccscccsttactgaaatgtatwatctgacktcct

SEQ ID NO: 237840 - DNA, 1000 bp, Homo Sapiens
aaaacccttrcacttracctttcaaattcatcmwcttccctgasyttkggtytcactttcctagtytcactttaayccstktkcgacaccttgcccttaatctagccccaatttccattctkgattttcccattgccctcatatgggaaacccacaccccactaaccccagccatctcttccaccttggacctcactctgacctctggcctccttctgtgttctcctcacccatttctctctccaggccatggacacaggaatgggactggccatgggaacagtacccaccatggccctgagtatatgcgctgtagcccacatctagtcttgtctghactgacgtctgacaaccatggtgccacctatgccttcagtgggacccactactggcgtctggacaccagccgggatggctggcatagctggcccattgctcatcagtggccccagggtccttcagcagtggatgctgccttttcctgggaagaaaaactctatctggtccagggcacccaggtatatgtcttcctgacaaagggaggctataccctagtaagcggttatccgaagcggctggagaaggaagtcgggacccctcatgggattatcctggactctgtggatgcggcctttatctgccctgggtcttctcggctccatatcatggcaggacggcggctgtggtggctggacctgaagtcaggagcccaagccacgtggacagagcttccttggccccatgagaaggtagacggagccttgtgtatggaaaagtcccttggccctaactcatgttccgccaatggtcccggcttgtacctcatccatggtcccaatttgtactgctacagtgatgtggagaaactgaatgcagccaaggcccttccgcaaccccagaatgtgaccagtctcctgggctgcactcactgaggggccttctgacatgagtctggcctggccccacctcctagttcctcataataaagacagattgcttc

SEQ ID NO: 237841 - DNA, 682 bp, Homo Sapiens
gtcagaaaagccagttttttttttatttgtaaagctctgccataaacttctagcgtgtgccaatggtcacctgccacactcgcaccaggttgtccgtgtagccagcaaacagagtctgcagggaagaaatgacagtgacaggtcaggctggcataaattctgcagtctcactagattcagcccaagtggctttttttgagatccgtccaccttgctccattgtctaggctggagtgcaggggtgcgatcctggctcactacagccttaagcccctgcagttcaagagatcctcccacctcagcctccagtaggcatgtgccacaacgccgggtagactgtaagaaaccgctctcatttcaacagccagcttgtaagtggtggttatgtattccttgaggaagaaacagctggtgataaggctccagacatttgaaaactggtcagattaattaaggtattaattgaaggctgacagccmctgcgttccacatcagtcttccctctgatgcagaaacacattcactggcatggcaaacgagggcatcctcatcaacctggcttgtcatttcactttatgccaaggacactgctcttgtgtctgacagactagatatactaacagaatgagagggagaaaattaactggaagcagaatcacctgagaggacagacccacttacc

SEQ ID NO: 237842 - DNA, 1000 bp, Homo Sapiens
ttttaaacttgcaaagscamartaccccccaaaaratytcycccactccctggtccagctbyccgarcarsccwcccaaggagaagmagagagtkgkcccagatktcmcccccatattccctytccctttgcctcarcccgctgcctctctracstgaggtksttctcasccatcgggcaggtcctggtcgrgcctgcttagcccaggtggdgyttgcaraascgggcgggtgtgaagatattccatctgggccaaccccaggctgggcctgcgctgagcttctggagcgcaggtactgggtcttgctaagtgaactgtttcccaggaacacctctcgggcccatctgcgtctgaggctgggagtggcatctgaggccgggagtggcatctgaggccaggagtggcaggctggtgggctgggcgtggggttttctgggccctgcccagtactgccctggggacttggtgggctcctgggtcagcagcatcccacccctgggagtctggccagctgagccccagggtggcaggggcattatagcctggtggacatgtgccttcagggttcctccggggccaccttcctcaggccagtgctgggttcaaagggctttttgtgtttgtgtttttttttktttatttatatgtgtgtgggtgcacacatctgtcccatgtatgcagtgagacaaatctacctcccacaaggagcaagggctctgcccgccctctgctcattcctacccaggtagtgggaccccgggcccccttctgcctggcttgcctgcttctgccctttccagaggggtctcactgacagccagagacagcaggagaagggttkgctktggatcaaggaaggctgcccctgtaccctgtggggaaatggtgggtgcatggctggatgcagaggtggaaggccctgggccacaggcgagagtgggcgtgtcacctgtcccaggttcccagcaagtctgcagctgtgcagtcctggggtccctg

SEQ ID NO: 237843 - DNA, 1000 bp, Homo Sapiens
atcagrgagttgttttttcaactggtwcataaattataatgtgggggkgwgatawcctattaggaattgascagtggggawtgtttagtaaagtatgcgtctgttagaattataattgtaagtactgtggaacctacagaaakractaggacaaggaaaagaatacaaaaaatggtttgtacactggttacagtcacataaacataggcattcaggtgaagaagaatggagaaaacaggtaaaaataaaaataagtactgtcttttgtgatgtggttattcatgatccttccatattgcttttgaatgacatatttatctaagcaactgttgtaagttaaagctaaaactgactgttctttgatcaattttgaatgtttcggatacagcagttaaaacagttactggaggattctacctcaggtgaagataggagcagctccagttcctctgaaggtaaagagaaacacaagaaaaagaagaagaaagaaaagcataagaaaaggaagaaagaaaagaaaaagaagaaaaaacggaagcacaaatcttccaagtcaaatgagggttctgactcagagtgacaaggatgtgacttgttcaacattctcttctcaaacactgaccaaggaacagaggaagatgcagtcagagaaagtagcaggatagagacgccgagagaggagtatatgtgggtcacagcagtgagctcccacccgccttgcagtgaagatgtgaccccaggagagggagtgtctccttccaggtgctagctctggacagcagctgattttaggcaggaaagtttcttcatcgttgtcctccctgctggtcacatgagtttacgattccttagaagtgtctcccacagggtggcaggactgggagaatctctgaggcgtgtcttccaggccctcccacagcttgtgccctccacagtgtagacttgaacacttggcctcatgtgatccttccaccttggcctcccaaagcattgggattac

SEQ ID NO: 237844 - DNA, 943 bp, Homo Sapiens
caggaaagtacctcttcagaatmactcattacagagaattcctgtaactccatttgctgataaaagtcccattaaaaattaccatgtggttctcaaccaatagggatacctttggcattgaagaggctgagggttgattttagtactgcttgtaagaccatagtgttccagaggctctgtagctggcttctttgggaatctgaagttggtcctgtctttgagacatggccaaaagcacatttttcctcacttgatgcagaagaaaatgttatctcctgcttgctcagatcatagcctcgaggcagatcacacagctcaggatgmacatggactggaacagcaccagggcaagcaccccaaatcacaaaataatcatgttaggatgactaagttgggaggctgaacttaaaaccctatagctttgttcagaatatttttttctttgcttttttcattaagttttactgaccaaaaaggtggaaaaaagaacctaaatkttctgcacaaaagcagttctctgaaacctgaactttaccaatctgtgtaaaagtactctacagaaaatamacaagcagaaaacagtaatgtaagcttcatctgaagtaacggtttagtcacatgacaaatttggttgtcgatttagtatgctgtagcccttatctatctaaattcagtatgactacatagacatttattctctggtactgaatttccatttgaatagaaacggctgctttgtggaagaaagaaacttcaatttaaaaacaatttcagcatcgttgaagkgccaatcagttttcaaattatgtgtgtgtatacatatgtatgtatgtgtgcatgcatgtatgtttgtattatgtgtattttttcctcctctctccctgtctggctcgctctagagagagaatcccgggaattccggaccggtaccagcctgctkttt

SEQ ID NO: 237845 - DNA, 962 bp, Homo Sapiens
caggscccaaggktttttwatttttktctggacgctktkggagtgactggatkkasccagccctatgggtggggatggcaccgccctaccgccgagagagttgaagctgcacccccgaaaggagccagctgtaccttcacccagtctgggggagtgktgaggcacttgggggatggggagcaaggccagctcacgaaggaagacttgggcagggaggatcagggacgcctggcaaggatccaccctatggaatcgggcctcgtcagtggggtgacaatgtcagagttgtctataaatcgggggggaggccgcggcctcgaggtgggaaagcaggtgccggcgcacctgtggacaaattctggaacgcgtttggcgagggaggaataggcgcagctccggaaggcagtgacctcgaggcagcctcagcacggcactctcttgggtcctcttccaggctcacactgggcgacagcggagaggctcttggacggggcagagctcgcgccgagacctgcatgtccgcgtcttgtgacgggtgtgtgggaagccgcccgcctgtgcatcttgcttccgggtattcgctggctgatttactggttttagagatggggatgggcacccagtgctggactgaagaccagagaaggtggagctccctgtggccttggtctcacctctcttcaggtaacaggctctgccctgacccaagctgagccaatgaaccccctccctgggaatccacacctggacccattccttctgggcagggagggcttgctggagggagggaggctgtgcaccccacagaagactgggccccctgggcacaaggggacactggtgctgggttcagcagcccccaggacctgggccaagacgggggtggctgctgcattcacgcaggacgttgagctgcagggactagagtggcagatgggccaggtccactaggccaccccatc

SEQ ID NO: 237846 - DNA, 1000 bp, Homo Sapiens
ccccaaggggygggaaacggcgggccccccccccscaaattycmctttttwwcccacggasattttaaraamcgggwaatktcaaaaahtwtttggaggaaaagtbttthttttattattttckgtttcccagtwcattaccaagaaaatgtttttttaaaaaccatccctaccgaacaatggatwycctttatctggaaggactcgaattyccattatttgtccaaatggtgaaaaagtctgacgcattagttgttctgttagacwaaaaaccaaaacaaacaaatcacactaagttatataaaaatcctacaaatattaagctttgcactttaaaaaattaatgccacacagggaaggctcccatacctgttagcccagaagtaacacctccacagtatacagtacagttgcttggactagactgatttacaacctcatcatatgatagctgtttggtatttgctggtgagagaaaaggtttatgtctttaattcattaaataaaatgtgcagaaagagaaaagtagcattcactacactactgtaaaggtaacattaaccttgatcaaaatgcttatattacacatattatacttcagttcaggattaaacctcccccacgaatgtctaaaaaattacccagtattttctatttaataggagacttgacattagaaataatattatttataattacaaaaatgaaaactaagtacatttttgaatagtagtcttgatttgcttctcatctatttctgcaataagtctccgggaacagctctaacatttaaaatctagcgtatttttctccaaaattccacatttccttttcttctccaatacacctacactcatatgtactctttggagcgggaggctttcgggttgcccagttagttctgatttgtcttccaccaagccactggccacccatctgttgaatggcgttttcagcatcctgttccgtacaacattagaaacaataaagaagtcactat

SEQ ID NO: 237847 - DNA, 963 bp, Homo Sapiens
ttycaattcataattacatttwttataaatacataaattattcycccaaattatttcacttatatttaaatcaagtacaaattattttattttaaaaatatgttatggtcacgtgatttaaaagttgggataaacatggcttgaggccccctcccctctcatcggggtagctgatagggaggtgtttctttctgaaatgtaacagaacatgcatcatcattgtatcatttttcacctacaaagatagtattagtgtcttttaccttagaagcaatcttaccttagaaggcccagtagtttgtaataagtagtaaatcatcatcaagcttccttatatattagtcttgacagatatatttaattacctattctatcacctatggctattcccagtactcctctaggtctttgttttctcattggtaaaatgaggaagttggatttcatcagcttgcctccatgattctatcatggagaatcatgatagaacataaaaataatgaagatgatattctaaggttcaaatatttttacaataattgctacaataatttattggcaataaagacaggttgagaggcaaaattagacccatgaagaaacctgtaatatagatttaaatatgtaaaactgtagttaccttgatacaaacttcaacaccattttatgattaaaaaaaaagctgcacaatttttgaaatcttcactaaaggattaaacatttgtatcaaggtatgtcagtattacagtcgttattacatttaaactgcccaatagatacacgatatatacacacattagggtacgacagaaggagcacgcttcttacattaaccaagaacattttatattcaaattcctaaccactttctgtttataatcagagactaagttttattgcatattgttctagatgccattaaagatatatcaagatatttctcaaatctagatggttgctacc

SEQ ID NO: 237848 - DNA, 1000 bp, Homo Sapiens
  misc_feature (953)..(953): n is a, c, g, or t
cagggggagcatctyycattwkagagtcaggatgatscccagccagktgcaacctgtyaatggacacagaaattggcccgtggtatsactgagactgcaatagaaagattttctgacctgtcatcggggaccaccattatgacacacggacactttgctcaagaacccactgattggaccacatcgaataccgagatgtgcgaggtggggcaggtgtgtcaggagacgctgctgctcctagatgtagaactcacatcaaccctggtggggacaaaaggctgcagcactgttggggctcaaaattcccagaagaccaccatccactcagcccctcctggggtgcttgtggcctcctatacccacttctgctcctcggacctgtgcaatagtgccagcagcagcagcgttctgctgtactccctccctcctcaagctgcccctgtcccaggagaccggcagtgtcctacctgtgtgcagccccttggaacctgttcaagtggctccccccgaatgacctgccccaggggcaccactcattgttatgatgggtacattcatctctcaggaggtgggctgtccaccaaaatgagcattcagggctgcgtggcccaaccttccagcttcttgttgaaccacaccagacaaatcgggatcttctctgcgcgtgagaagcgtgatgtgcagcctcctgcctctcagcatgagggaggtggggctgagggcctggagtctctcacttggggggtggggctggcactggccccagcgctgtggtggggagtggtttgcccttcctgctaactctattacccccacgattcttcaccgctgctgaccacccacactcaacctccctctgacctcataacctaatggccttggacaccagattctttcccattctgtccatgaatcatcttccccacacacaatcattcatatctactcacctnacagcaacactggggagagcctggagcagccgkacttgccctatggg

SEQ ID NO: 237849 - DNA, 1000 bp, Homo Sapiens
cccccmcycggaaagccatgkggcgcgacgtgsagcgtgtgckgctctkkggcgcgccgcsssagcagagmagaytatwcgaytcaaggcgtcaacatccgggmayactgtktcgctgawrartaccscgatcgtktcccttgtgtgaatgtgccagcgagtgcgsytcamagaccagaactaccgagccctgcagcagctgcagcgagacctgggcccccaccacttcaacgtgctcgccttcccctgcaaccagtttggccmaacaggagcctgacagcaacaaggagattgagagctttgcccgccgcacctacagtgtctcattccccatgtttagcaagattgcagtcaccggtactgtgcccatcctgccttcaagtacctggcccagacttctgggaaggagcccacctggaacttctggaagtacctagtagccccagatggaaaggtggtaggggcttgggacccaactgtgtcagtggaggaggtcagaccccagatcacagcgctcgtgaggaagctcatcctactgaagcgagaagacttataaccaccgcgtctcctcctccaccacctcatcccgcccacctgtgtggggctgaccaatgcaaactcaaatggtgcttcaaagggagagacccactgactctccttcctttactcttatgccattggtcccatcattcttgtgggggaaaaattctagtattttgattatttgaatcttacagcaacaaataggaactcctggccaatgagagctcttgaccagtgaatcaccagccgatacgaacgtcttgccaacaaaaatgtgtggcaaatagaagtatatcaagcaataatctcccacccaaggcttctgtaaactgggaccaatgattacctcatagggctgttgtgaggattaggatgaaatacctgtgaaagtgcctaggcagtgccagccaaataggaggcattcaatgaacattttttgcatataaaacaaaaaata

SEQ ID NO: 237850 - DNA, 962 bp, Homo Sapiens
  misc_feature (313)..(314): n is a, c, g, or t
  misc_feature (319)..(319): n is a, c, g, or t
  misc_feature (321)..(321): n is a, c, g, or t
  misc_feature (323)..(323): n is a, c, g, or t
  misc_feature (326)..(326): n is a, c, g, or t
  misc_feature (328)..(328): n is a, c, g, or t
  misc_feature (330)..(332): n is a, c, g, or t
  misc_feature (334)..(337): n is a, c, g, or t
  misc_feature (339)..(339): n is a, c, g, or t
  misc_feature (341)..(341): n is a, c, g, or t
  misc_feature (444)..(444): n is a, c, g, or t
  misc_feature (447)..(448): n is a, c, g, or t
  misc_feature (450)..(450): n is a, c, g, or t
  misc_feature (457)..(457): n is a, c, g, or t
  misc_feature (464)..(464): n is a, c, g, or t
  misc_feature (466)..(466): n is a, c, g, or t
  misc_feature (468)..(468): n is a, c, g, or t
  misc_feature (471)..(471): n is a, c, g, or t
  misc_feature (473)..(474): n is a, c, g, or t
  misc_feature (483)..(483): n is a, c, g, or t
  misc_feature (517)..(517): n is a, c, g, or t
  misc_feature (921)..(921): n is a, c, g, or t
  misc_feature (952)..(953): n is a, c, g, or t
tcytcatagccttcycaggagaacgcatgaatgtaggagaagcaaagaaaatttgcatgagaaatgacgcctvagatccagagtgaatcaattcagcgagtgtwgcagatttgaaagtacagttgtatgcaaaattcgggagcwacataamccttgaagctgatgaaagttaaacattttataatacttttttwatgtgtttaatatacttgaatattgtttaaaatgwtaattttccttcttcaaatgacatggaaagcwaaactttcttttttawawattttcatttatttaatggaaacttgccccattnncacangncngcntnannnannnnananttttaaaagaagacagtattcacctatgttatttygcataacgattatatcaagtctaggggcttcatgtcatgttattaaaatcagttaagcaatcttttangtnncnatattanttagaanantngtngnngcaattttnacataagaaaatttaacagttgtgtcatgttgtntctgtctgattttaattgctgtctaatgacggggaaagcacgatgaaaagatgtacaatcctgcatccttgcttatttcacaactaaagctttgtcatagacttcaaaatatammtgtatatattttayttaaatatatgttacatattatatttaaacatacatatttaacattttttacatatctatcaatatcagagatttgggtaaaagaatgggtaatgtttaaacatgtggaggcatgtggagctttatacaaacagggcagaaccacagaagaacgttttagaaaccaagagatgtgcagaaagaaatgtttagtgttttttcgttttaaattttagattttattttagtgctttgtaattaattggggtttatattgataaagatgtggaagttanacagctatgtatgtaaaagtaaggcttattnnttwaataaa

SEQ ID NO: 237851 - DNA, 1000 bp, Homo Sapiens
ctacctagaagacttcccaggcttgtgcactycatctatgtggaccgcaccactgggcagatggtggcgccttccctcaactgcagtcaaaagacctcgtcggagttgggcaaggggccgctggctgcctttgtcaaaactaaggtctggtctctgatccaggtggcgcgcagatacctgcagaagggctacaccacgctgctgttccaggaggggatttctactgctcctacttcctgtggttcgagaatgacatgggtacaaactccagatgatcgaggtgcccgtcctmaccgacgactcaggtctatcggcatgctgggaggagactactacaggaagctcctgcgctactacagcaagaaccgcccaaccgaggctgtcaggtgctacgagctgctggccctgcacctgtctgtcatccccactgacctgctggtgcagcaggccggccagctggcccggcgcctctgggaggcctcccgtatccccctgctctaggccaaggtggccgcagtctgcctttgcatcctgtcctccagccacccttgcttgccactgttccccatgacgagagcctcctgtctgcagtggccatcctgaggatagggcagagtgcccagggtggccccagggcttctaaaaccccacctagaccaccctccatgtcaggtactgagcaaggccccagatccttctctctggaggaagagggaagcccaggggtcctgtttgtaaaacaacggtggcaacagctcctcttccagagctgtctctgcctttatcctgggagatggggaggaagccccatctctgctgttccccgcgtggaggaagcccacccagcaagctctctcctaccccaggtaaaaggtgctcctttgcctgggtttgaattccagcgctgccacttcctctctgcacctcctggcaagtttcttctattccccacatttaaagcgatggcacctccgtcccagggtggtgtgaggattaccca

SEQ ID NO: 237852 - DNA, 923 bp, Homo Sapiens
  misc_feature (243)..(243): n is a, c, g, or t
  misc_feature (247)..(249): n is a, c, g, or t
  misc_feature (252)..(252): n is a, c, g, or t
  misc_feature (257)..(258): n is a, c, g, or t
  misc_feature (269)..(269): n is a, c, g, or t
  misc_feature (272)..(272): n is a, c, g, or t
  misc_feature (894)..(894): n is a, c, g, or t
  misc_feature (902)..(902): n is a, c, g, or t
  misc_feature (904)..(905): n is a, c, g, or t
gaaggtcatwttttaamkggatgcagktgttccttatgcayagacttgwggtctgtctgaattaggaaawgtttgaacaccttatttgtttgaacacagactacatraattgtgtaagwtgtgtaaagctgtttgcaggaatataccaatgtgtatgtttggcagagggcaaattgttmcctcctgaatcactgtatatgccatgttttgcgataagattgcttgcattttctgmtcaacaangtgnnnctnctgtnngggaaagcacnagngatggattactttttaaagcaatacatttagctgcaaattgtgcctttaaaargaraaataggcagagcttttgagggccaagaaggaagctgtccagtttkccaaaaatcctttttccctgctatcagaaatgtgaaaccaaatttagcaaccaagattaatgaaaagatgggttttccattagtgctgtccctatcttgttcttggctttgttatgtcctttcccctagactgtatcccgacaaaatgtcctagtaacaaattgctttttaagctcctgttctgggaaaactaagcattaaaattgattattctaaaacataaagtggactaaagccatcctattttataattttctaatgcaaagtggtttagtatagagttaacacttagaagtttatagtttactgtttttattcttatgtactgtaaggaccatatttgagtttttggtctattcctaccattgtttctttgtggggaggagttggggcggtttgggggattggttttttttttttgtttttttaaactacaggtatttgtaaaacaatgtttgggttcaaacaaattagttgttaaacatctgtaatccagttttctgtaaatgttgctgttgtnctaagctntnntaatgttaagcattattt

SEQ ID NO: 237853 - DNA, 1000 bp, Homo Sapiens
caccttaaaatgaatcctttatttactttgtaactactaktacacttttcctgagagatttcactctgacatgactgtcacacaagataaaagtatttggcacatagctattaaggcaaaggcttccatggagcctactgattattatcgttttccttttaaaaactgcttgatgaagaaatacttggatcttactttttaaaagtttaccctccccacagcccaaatagtcattcaatagattttccaagtggtaagctgatgctgttggcataaacagagctatgtaaatatatacaaaattcacaaatcacagcaaacatacaaataatgaggaggtgcctggatgtttcaaggcttaaaaatgaaaaggaaaattacatttcatcttctgattgctaaagacagaaaagaagtaaagagggggaatagggctatatttattggtttaaatcatccttccctctgctctgaattatttttttcaaccttcacatcttggctaaaaagcatatttgggcttatgttaacatctgcttttgtggtgacatttaattctgtatattttcaactagtgtttctgcatcacagattttcctcctttatctctttgctctgaaaagacaaccaaagagcaatcaaaaaggtgtctgacttggccattcagacaattgcccccttgtgggaatgcgggaatgaatggtacagtggacaccccagcaccattgacgttataaacatgtaaatgaaacacattagggcagacaatcaattgtctgtgagcattgcaaacctgcactccctctctctgtkacaggcacaaaatagtgtctaccttgggaagccacggtgctgagaggaaaaggacaaagaatttcctttcacacagaagaaaatgcaccttaaaagccttggaagaatgcagatgacaaaaactgttgcaaggaaaagaatctcccacatcttagaataaacgcggcactgctagaggctagcaacg

SEQ ID NO: 237854 - DNA, 1000 bp, Homo Sapiens
accggcamatgatacasacctcggccttattragccatrccyccmggggrscctgtgccgactckcayycccaccctggctggatcagagcagggcatcctctgctgkttccttactggcaaaggaccagcgtcctcgttcaatacattccaagaaagkttaaggagtycccccaaccatcttcactggcttccatcagtggtaactgctttggtctcttctttcatctggggatgacaatggacctctcagcagaaacacacagtcacattcgaattcgggtggcatcctccggagagagagagaggaaggagattccacacaggggtggagtttctgacgaaggtcctaagggagtgtttgtgtctgactcaggcgcctggcacatttcagggagaaactccaaagtccacacaaagattttctaaggaatgcacaaattgaaaacacactcaaaagacaaacatgcaagtaaagaaaaaaaaaagaaagacttttgtttaaatttgtaaaatgcaaaactgaatgaaactgttactaccataaatcaggatatgtttcatgaatatgagtctacctcacctatattgcactctggcagaagtatttcccacatttaattattgcctccccaaactcttcccacccctgctgccccttcctccatcccccatactaaatcctagcctcgtagaagtctggtctaatgtgtcagcagtagatataatattttcatggtaatctactagctctgatccataagaaaaaaaagatcattaaatcaggagattccctgtccttgatttttggagacacaatggtatagggttgtttatgaaatatattgaaaagtaagtgtttgttacgctttaaagcagtaaaattattttcctttatataaccggctaatgaaagaggttggattgaattttgatgtacttatttttttatagatatttatattcaaacaatttattccttatatttaccatgttaaata

SEQ ID NO: 237855 - DNA, 1000 bp, Homo Sapiens
taatacaasgtgrtkccggcagccgcccctgakcagtcaggactgacatgactgaawcaaacagawaaagcaagaacctatctatgacctcacagccgtacccaayttgtttacctatagctctttcaacaatgggcagttagcaccagggataaccatgactgaaatcgaccgaattgcacagaacatcattaagkcccatttggagacatgtcaatacaccatggaagagctgcaccagctggcgtggcagacccacacctatgaagaaattaaagcatatcaaagcaagtccagggaagcactgtggcaacaatgtgccatccagatcactcacgccatccaatacgtggtggagtttgcaaagcggataacaggcttcatggagctctgtcaaaatgatcaaattctacttctgaagtcaggttgcttggaagtggttttagtgagaatgtgccgtgccttcaacccattaaacaacactgttctgctytgaaggaaaatatggaggaatgcaaatgttcaaagccttaggttctgatgacctagtgaatgaagcatttgactttgcaaagaatttgtgttccttgcagctgaccgaggaggagatcgctttgttctcatctgctgttctgatatctccagaccgagcctggcttatagaaccaaggaaagtccagaagcttcaggaaaaaatttattttgcacttcaacatgtgattcagaagaatcacctggatgatgagaccttsgcaaagttaatagccaagataccaaccatcacggcagtttgcvacttgcacggggagaagcvgcaggtatttaagcaatctcatccagagatagtgaatacactgtttcctccgttatacaaggagctctttaatcctgactgtgccaccggcmgcaaatgaaggggacaagagaactgtctcatagtcatggaatgcatcaccattaagacaaaagcaatgtgttcatgaagacttaagaaaaatgt

SEQ ID NO: 237856 - DNA, 570 bp, Homo Sapiens
ttttaaagaaattatctcctaagtagattttaatataaattttgaacagttatagaaaataaagatggcctttgggtcaataacagaacataacaaaaacactaaaaatttctgtacataaacacacgcatatcacaagtctagtcagaaagaaatacatagaaaaacaagatagaattttaaaaataatttgcaagggaagttctcaatgcttcagttctaaaatattgtcttcttttagaaaaatttaagactggaataacagattgtttttcctgcaatgctgtaattactgcaaatttatcagcaaagaggtaaacagcaatgcaatttttccttaagcttgaatacataagggaacaataaagaaacctgattagacctgaactaattaaaagtcacaccagtaattttcaggccagctctggtctccaggtagaattccaggacaggtttgtatcactgggtccattcccaacaggctggataggagagtctggagtaattataaggataccaccttcttctatcctgggctgcccgactggcattgggcttcacattccaaga

SEQ ID NO: 237857 - DNA, 1000 bp, Homo Sapiens
ggcacccatttytkcmraacmcgcactscagaatttcaccmcaaacagcgrgggcaaaramctgggatraggattcagattatgtackccagatgatgccacaattaactatggaattctgtkgtcctctggtgaacttggatggtgatgtrattggcgtcaattcattgagggtractgatggaatctcctttgcaattccttcagatcgagttaggcagttcttggcagaataccatgagcaccagatgaaaggaaaggcgttttcaaataagaaatatctgggtctgcaaatgctgtccctcactgtgccccttagtgaagaattgaaaatgcattatccagatttccctgatgtgagttctggggtttatgtatgtaaagtggttgaaggaacagctgctcaaagctctggattgagagatcacgatgtaattgtcaacataaatgggaaacctattactactacaactgatgttgttaaagctcttgacagtgattccctttccatggctgttcttcggggaaaagataatttgctcctracagtcatacctgaaacaatcaattaaatatcttgttttaaagtgggattatctaaaaaaaaaaaaaccagttatatcacgtggtttgtattggagatgtgccaaacatggcaagaagtttttggatctttttcttacaaagaaaaatggatggttatcaacccaaatgcccatcaatgacagactggataaagcaaatgtggtacatatacaccatggaatactatgcagccataaaaagcaacagtcctctgcaggracatggatggagctggaaaccattatcctcagcaaactaacgcaggaacagaaaaccaaatactgcatgttctcacttataagtgggagctgaacaatgagaacacatgaacatagggaggggaacaacacacactggggcctggcagtgggtagggtagagggagggagagcattagcaaaaatagctaatgcat

SEQ ID NO: 237858 - DNA, 1000 bp, Homo Sapiens
gagacagagtcttgtctgaagtacagtggtgcaatctcggctcactgcaacctctgcctccccggttcaagcaattctctgcctcagcctcccaagcagctgggattacaggcacctgccaccatgcccggctaattctttttctattttttgtagagacgggattttaccatcttggccaggctggtcttgaactcttgacctcgtgatccacccgcctcggcctctcaaagtgctgggattacaggcaggagccactgcgcccagcctactctttatgaatatgttatgattaccagaaactatagaaggtgacaataggaagtgaactaaaacaaagttaattaatcaataaacctattgtaaataattgactagaaaagtgtctaaaatcttaagatttttctcagggaatgcttaagaaaaaaccttaagattttataactgtatagctagcgaatctactaaaaccacttactgtgaatcgttagtggcttctcttctcacatttatagtcttttctccttaagctttgaacctcattatcagtgttaaatctgagccccactgcattggatctgatggcagcaactctcatttcttcccacagtctcttatcattgttgttactatatttccaaatccctcacccctgtttgtttgtttgtttgtttgttttggcaagctgctcacctgaggctatacaaattactatactatatttaacttcaactcatccatccatcagtttaccagttttcttttcctcagaaagcatcaaaagttgactgtatttggcatagtactaggcagcattttgctatctcaaggttcccataccatttaaaagtagaaaacaataaaacaatcatcttcccatgtttgctttcctatgcagtttccaggaatacactatagccaaaaagtagggagggttttacttttcaaacacatatctgggtatagttgagaaaatttacttcctatatataacacagcc

SEQ ID NO: 237859 - DNA, 405 bp, Homo Sapiens
taagatatctagcaatattaaattgaaacattaataaatgtggtaatttgtgttgactcaaattcatttctgaaaccatgaaatgtcttattaaaaggaagcaccaagtttcaggccaggagtggtggctcatgcctataatcccagcactttgggaggctgaggcaggcggattacctgaggtcaggaattcgagaccagcctggacaatatgatgagaccccgtctctactaaaaatacaaaaattagctggctggtggtgcgcgcctgttgtcccggctacttgggaggttgaggcacaagaatcgcttgaacctggcaagaggaggttgcagcgagccaagatctcaccactgcactccagcctgggtgacagagcgagaccctgtctcaaaaaaaaaaaa

SEQ ID NO: 237860 - DNA, 644 bp, Homo Sapiens
cctgggaaagaaaagaagggcaagcccggaaacgcagggaccaggaaaagaaaacggcgaccctcgttttgcctggttagactctgaagtgactgggagtgggctagaaggggaccacctgtcttgcactccccccacgtcgctggagctcgattcacggaggcattgaaattttcagcagagaccttccaaggacatattgcaggattctgtaatagtgaacatatggaaagtattagaaatatttattgtctgtaaatactgtaaatgcattggaataaaactgtctcccccattgctctatgaaactgcacattggtcattgtgaatatttttttttttgccaaggctaatccaattattattatcacatttaccataatttattttgtccattgatgtatttattttgtaaatgtatcttggtgctgctgaatttctatattttttgtaacataatgcactttagatatacatatcaagtatgttgataaatgacacaatgaagtgtctctattttgtggttgattttaatgaatgcctaaatataattatccaaattgattttcctttgtgcatgtaaaaataacagtattttaaatttgtaaagaatgtctaataaaatataatctaattacatcatg

SEQ ID NO: 237861 - DNA, 577 bp, Homo Sapiens
  misc_feature (281)..(281): n is a, c, g, or t
agtaagatgtattcataaaaataacataatgataatggcagctatttttttgagtacttactctacagcagacactaagtgcatccatcacatgcatgctttaacccactcataactccacagtgtgtaggtatttataagcaagaaaatgactgggttagataagttgaataatttacccaaggaaatagggaaattgtgatttgaaccagattctttacttttaaacactattttatgcagcctgcttagtttctaaaatagtcaaagggggttttttntgtttgttaataaataagcattttgaaagttcctagagaaagatgaaaaggaaactttagactgtggtcaaaagttagaaaaaatagaatgtatatcttgcttttagcccatttgaaattattttctgtttttgtttgtttctattcagttggatgttattgtaatttattgattatgttactgaaatattacctgatcctgatcaggttgtcttttaaaatgtctcagtgttctcaaattgccatttattgacatttgaattctgtttgcaatgaataaaaacttgtaaatgatc

SEQ ID NO: 237862 - DNA, 680 bp, Homo Sapiens
tgagctcttcaacattgttcttttattatctctaacatatttagattgtactctaacaaaaaatgttattcaaatatagtactttgatgtttgaacaaccttttcttgatcacttcttcgcaataaaaatatgacatatgtagtaaaccttaaaaaatttcgtgtaactttatggctctacgctggaattcttctgaagtgagtaatcatcacaatcatctttagtatataatggatcaaaatgacacgattgcaaatattgataacacacagttataaaaggtgaaattctattgggaacacatctcttagtgagatagatggggctgacccaccaattaattcatttatctggatgaatagttcctactggtagattaacagggttcattttcaattctgttgttttcacagatacaagtgctgagaaatggttttacataaataggtgagaatgctagtagttttgttgtaagcatgtcaatcaatcgtttggtttctttccgagttgcatgccaaaaaccaaatagtgttccttcatcagctgacaattcatgggccaccattaattttgttgaaagcaaagaactggaaaccatctgacttgaaaagaatttgttatcctgttattagagtcattcactttctctagtgacttttaattatactaattactctca

SEQ ID NO: 237863 - DNA, 1000 bp, Homo Sapiens
  misc_feature (993)..(993): n is a, c, g, or t
  misc_feature (998)..(998): n is a, c, g, or t
tgtgaraacttttgakgtakcakgkggaaagcctttcaggrsyctaccttcttcccatcacagattcatctgagagaaccctataaatgtaktactgtggaaaycytccggcagcgatctcaacttgtagtgcatcggcggacacatactggagagaaaccttagragtgcagtcattgtgggaaagctttcatccagagtctcccctcatcatgcaccagagaacgcatgtcggtgggaagagctatcagtgtgacgtgtattaagccagcggttgtgactcattgaacatcagaggacatatcctggagaaaagccctacgaatgcattgattgtgggaaagccttcaatgatcgctcaacccttagtaaacacgagaggacacacactggaggcaaaccctatgaatgtgaccattgcgagaaagcctttagccaacggtgtcaacttactaggcagcagagaattcatactggagagaagccctgtgaatgttaacaaatgtggaaaagcttccagttatgatactttccttattcaacatgagaaagctcatgggcaagaaactctatgaataaccaagatggagccgggtgcagttgccaacacttgtaatcccagcactttgcgaggccgaggcaggtggatcacttgagcccaggagtttgaaaccagcctgggtaacatggcaaaatcctgtctacaaaaaatacaaaaattagcctagcatggtggcgcatacctgtagtcctagctactcaggaggctgaggtgggaggattacttgagcttgggaggcggttgttgcagtgagctgtgatcatgycatcacaccgcttccttgtgagagattgagacactctaaataaataataaccaagatgggaaatttccctgccagaccttgtttactagaaatcaggtggccaaaacatgactctcagagtggggcttcatgaccatgtgcatcagaattgcctggagtgtgcatntgaanac

SEQ ID NO: 237864 - DNA, 522 bp, Homo Sapiens
ctagcatctgatattggataaggatagcttgtgctagaagttggagattaatctggtctgctgactggcagcattagagactgtatctgatggttggtgtgaggatgttgttgacagttctgaaagttagccatcaattcctgtgcagggtggagtcagacccagtgacttccttttcaatgtcagcaagagttttctcatgcctgctttggtcactttctcttggaaacttcacgcatttgacttgcagcttcttgacccgaggaatcaactgagctcccagtgctggctaccttgggcaaataaaatctgtggttgagagagttctctttgctgtgccacagtccctgtgatgtgccaaatggcaccagcatttgcagcaaagctcgttaaatctttttggaatgggcaaatattttttcaacttgagccctgctgagccaaaccaaatacttgctggcagaataaagttcaaactggcaactgttttggagaccaaagtaaaaccatatatcttttttt

SEQ ID NO: 237865 - DNA, 413 bp, Homo Sapiens
  misc_feature (394)..(394): n is a, c, g, or t
agtacagcatggtgatctattgatattagtatatattctttatttgctgacataggaggtcaccgggtatataaagatgataagcatatgtcctagttggcctaagacagttctggtttcatgcctgtagtcccaccttaatttttaatagtgcttcctttcactctcaggtatgtcccattttgtataataaattgtacgatcaccctatatataagacacatagttatatgaagaattaagcatttttcataacagatgtattagaagttattgtgaactgattttgaggggaaaaaatctcattttgtactagaatagaatatagtagaaaatcctgaattctgggtatgtagcagtattctaccaacattgaaatattaataaaaaattncctaaagaaaaaaaaaaaa

SEQ ID NO: 237866 - DNA, 1000 bp, Homo Sapiens
tttcatgccarmtytgcakccctgggagastkkcccccatctgaacagtsmtcctgggaaatcagaggstcagagaacccasmaagggagtttaggctctgagaaaacagggaaaggtgaaaactcaggaaatcattcctacacaggccaagtggcaagaggttaaagaagtactcctccagcagagcgtgatgggctaccaggtctggagcagtgcagttgtgaaagttttgattcatggattcacccagtcattacttctagatgatgctggctcagttctggccacagccaccagctgggatgagctagaaattcaggaggaggcagagtctggcagcagtgtcacatccaggatccgactccctgcacagccgtcctggtatgtacagtccttcctgtttagtttatgccaggaaattaatcgggttggaggccatgccttgccaaaggtgacattacaggagatgctgaaaagctgtatggttcaagtagtagctgcctatgagaaactctccgaagaaaaacagattaagaaagaaggtgcatttccagtcacccagaaccgggcgctgcagctgctttatgatctgcgttacctcaacattgttctgacagccaagggtgacgaggtgaagagtggccggagcaagccagactccagaattgagaaagtgactgaccacctggaagccctcattgatccatttgacctggacgttttcacgccacacctcaacagcaaccttcatcgcctggtgcagcgaacttctgttctgtttggattggtgactggtacagagaatcagctcgccccccggagcagtacgttcaactcccaagaaccccataacatcctgccactggcatccagtcagatcaggtttggacttctcccactgagcatgacaagcactcgaaaggctaaatcaaccagaaacatcgaaacaaaagctcaggttgtccccccbgcacgctccacmgctggtgacccsacagt

SEQ ID NO: 237867 - DNA, 1000 bp, Homo Sapiens
cagktgggacggatcaccacatcctgwacacttcattttcacagcagtktktaggggcatgaaccggcgcccatcctcwtcatcatcaccctggagatgcgggatgggcaggtgctgggccgccggtcctttgagggccgcatctgcgcctgtcctgsccgcgaccgaaaagctgatgaggaccactaccgggrgcagcaggccctgaacgagastccgccaagaacggggccgccagmaagcgtgccttcaagcagagccccccctgccgtccccgcccttggtgccggtgtgaagaagcggcggcatggagacgaggacacgtactaccttmaggtgcgaggccgggagaactttgagatcctgatgaagctgaaagagagcctggagctgatggagttggtgccgcagccactggtggactcctatcggcagcagcagcagctcctacagaggccgagtcacctacagcccccgtctacgggccggtcctctcgcccactctcagccctgccactgccccggcgtgctccatggcaggcgtgggtggggaccgcagcgtcggctccgacttccaggcttcatcctagagactgtcatctcccaaccaggcgaggtccttccaaaggaaaggatcctctttgctgatggactgccaaaaagttttttgcgacatcttttggttctggatagtagtgrgcagccaagtgactgtgtctgaaacaccagtgtattttcagggaatgtcccttactgcgtcttgcccgcgccgggggctggggactctctctgctggacttgggactggcctctgcccccagcacgctgtattctgcaggaccgcctccttcctgccccttacaacaaccacagtgttgctgaaattggagaaaactggggagggcgcaaccccccccaggcgcggggaagcatgtggtaccgcctcagccagtgccccwmagcctggccacagtcgcctctcctcggggacccctcagca

SEQ ID NO: 237868 - DNA, 907 bp, Homo Sapiens
  misc_feature (21)..(21): n is a, c, g, or t
  misc_feature (180)..(180): n is a, c, g, or t
  misc_feature (205)..(205): n is a, c, g, or t
  misc_feature (261)..(261): n is a, c, g, or t
  misc_feature (296)..(296): n is a, c, g, or t
  misc_feature (844)..(844): n is a, c, g, or t
  misc_feature (872)..(872): n is a, c, g, or t
  misc_feature (889)..(889): n is a, c, g, or t
  misc_feature (894)..(894): n is a, c, g, or t
aaaaattgtggctgaacawanaccctsacatgtgaaaatkaaaacatraccttgacwtgrccaacaacaktgccaatgccwtkgaaagcaaaaatgtkaaaatgadacaaggaaattgaaatawrwgtcctgtgtgtgtgtrtrtdawktktktktktgatttgtktgadattgacatancacaaatgttgatdkaaaatatdtnaaacaccctwtcwtgaaatdtaatkkatkacaaakaaattaawttwttttaaaaanatccaaaacaaatkakccacaaakgcccaccacanacgaaracagkcakttcaggtatgtaaggaaaggaacattaaactcacctagaaagtgagatctaaaaaaaaattaaaaataaataaaaaataaaaaagaaagtgagatcttggctatggctggaggtcagtcactttatggcataaattatttgggaggtaaaaagactgttttcaattcaaattgtgcatttattggcatctaaatctagcatgattttggttggagcacaaaagaaataccacataataccaaatcacagcaaatgttagaattaatacaacaaaattttcctttggctagaawtcttatgttatacctgaaaaattggttttaaaaaatgttcatcttggccgggcacggtgctcacgcctgtggtcccaacactctgggaggctgaggtgggtgaatcatgaggtcaggagttcgagaccagcctggccaacatggtgaaaccctgtctctactgaaaatacaaaaaattagctgggcgtggtggcaggcgccgtgtaatcccaggctrytcgggaggctgaggcgggagatntctcttgagcctgggaggtggaggttknattgagctatgtatgcnbccantgactccakctta

SEQ ID NO: 237869 - DNA, 1000 bp, Homo Sapiens
cctracctcctgtcctctgctatccgttgggatgtacattccktcctgcagctgaattgcgacctccgcaagacaagcctcttcaaccacatggcctccatgggcccccgggaggcggtcagtggcctggcaaagagccgggactacctcctgacactgcgggagacgtggaagcagcacacaagacagctgtatggcccggacgccatgcccacccatgcctgctgcctgtcacccagcctcatccgcagtgaggtggagttcctcaagatggacttcaactggcgcatgaaggaagtgctcgtcagctccatgctgagcgcctactatgtggcctttgtgcctgtctggttcgtgaagaacacacattactatgacaagcgctggtcctgtgaactcttcctgctggtgtccatcagcacctccgtgatcctcatgcagcacctgctgcctgccagctactgtgacctgctgcacaaggccgccgcccatctgggctgttggcagaaggtggacccagcgctgtgctccaacgtgctgcagcacccgtggactgaagaatgcatgtggccgcagggcgtgctggtgaagcacagcaagaacgtctacaaagccgtaggccactacaacgtggctatcccctctgacgtctcccacttccgcttccatttctttttcagcaaacccctgcggatcctcaacatcctcctgctgctggagggcgctgtcattgtctatcagctgtactccctaatgtcctctgaaaagtggcaccagaccatctcgctggccctcatcctcttcagcaactactatgccttcttcaagctgctccgggaccgcttggtattgggcaaggcctactcatactctgctagcccccagagagacctggaccaccgtttctcctgagccctggggtcacctcagggacagcgtccaggcttcagccaagggctccctggcaaggggctgttgggtagaagtggtggtggggggg

SEQ ID NO: 237870 - DNA, 997 bp, Homo Sapiens
aaagagaactarwtaagacccccaggcttatccagatttatcactamccttaagaagytgagtgaggaagctggcttaagagtcacatgkcagtacatgccacgktaatgttgaaatkgatgagctcatatrtctcacggatcccatctttagctckcgtgcttcaccatcgcagaacaggggtccaaagcgagttcgtcgttccccktkyaywatawgtkatttttttttwtagwtgckttccttatyagtcacaacyactatgwccwtttgtaytacaattttttywttgctttgaatgagcgatttggtawtgagttgakatggtttgttcctttkggtctccttgactggatgcaaaaatgtggctgtgagaatgtgattgagttggactggtgggaggagaattgtgtccccggacatgataaggtcacttttktctttacaccttcccagyactggtgtaaaaggactctwatggatkacaacaaggtgctatggggcagctggtctgtcttggkgccttggaatcgattttttttcgcaggagatactggttattgccctgcttttgaagagataggaaaaagatttggatcttttgacctggtcagtctattccyatcggagcttatgaaccgaggtrgtttatraaataccagcatgtagacccagaagaagctgtaaggattcacactgatgtccaaacaaagaaatctatggcaattcactggggaamttttrccttagmaaatgagcataacttagagcctccagtgaagctgaatgaagctctagagagatacggacttaacgctgaagatttttttgwcttgaagcatggagaatcaagatacctaaataataatgatgaaaacttttaataaataatttcctgaggtgaaaaaccgatattgaagattcatttgtcttttttccattcttcaggasttcggcaaggtgagtcaaggctstcggcctacctagatgtttttca

SEQ ID NO: 237871 - DNA, 1000 bp, Homo Sapiens
  misc_feature (986)..(986): n is a, c, g, or t
atcagatatgaaacactgatgatgagcccsacagagaatgaacaaattaatgsactascaaatcttcaccccaaaagacctaaaacaataaagcagcsccatgtgagaaaaaagagaaaaataaaggatatgttgaatacacctttgtgtccttcacacagcagtttacatccagtgctgttaccttcagatgtatttgaccamccacaacctgtaggtaacaaaagaattgaattccatatatctaccsacatgccagctgcatttaagaaagatttagaaaaggaacaaaattgtgaggaaaaaaatcatgatttacctgctactgaagttgatgcatccaatataggatttggaaaaatcttccccaaacctaatttggacatcacagaggagattaaagaagactctgatgaaatgccttcagaatgtatttctagaagggaattggaaaagggcagaatttctagagaagaaatggaaacactttcagttttcagaagttatgaaccgggtgaaccaaactgtagaatttatgtaaagaatttagctaaacatgttcaagaaaaggaccttaaatatatttttggaagatatgttgacttttcatcagaaacacagcggatcatgtttgatatacgtttgatgaaagaaggtcgtatgaaaggacaagctttcattggacttcctaatgaaaaagcagcagcaaaagccttaaaggaagctaatggatatgtgctttttggaaaacccatggtggttcagtttgctcgatctgctagaccaaaacaagatcctaaggaaggaaaaagaaagtgttaaaaattaataaaggtttttttgaatcccgtgtccttcaagtgctttctaactttgagaggaagaaattgaccacctggactatggaactgtgcgtaacagctttgaaagtgtatttaaaaattaaatctatatgcctttaaatcagtgaattggaaacatataanagtatttaatgatt

SEQ ID NO: 237872 - DNA, 1000 bp, Homo Sapiens
tcatgccatgsattbkgggggtgacaggcccaggtgggatactktctgkgagcccatgtctttctgtcccagckcctgtakttracagagtatgytagagbtcagccattgctagggagctgccactwaccacacagagaggaggaaattcttcagccacagcacttagagctgagcctsacatggtcctcagcaagatgttgcaagttcctaatctgaacacagaggccagggagtaagcatcatctggagcccagagctgactgtcattacccacaaacataaacaccctgagtctggccttctccccaccctgccgaggttgtcagagcctcagcactggctctgccctgggtggcagcccctgggaagcccagctgccacctctctacaaatggccctgtagaagctgtgctcagtkatccacttcctggggggggbggcccaccttgttgccattacaccccattacaaactgatgcaaccagctttcaacagacactgccaaggaagatacacattacaacagcatgctgcaatacctctgcctgtgcaagagactgacccacatccaaaaaatggacatcttcccaccccagtgtctcactccactgrgctggaagtggcctttgtcaggaccctgtgaggtcttgagtggatctgcttttcccaagatattaaaccagtgmctttaaatcctsgctgchtattaccatcatctgggatattaaaaaatactgatgcctggttcttgctcccacccaaagagtctgactgaattgatggggttttcaaacattttttaagtgtttgttgaaggatgacatatatgcaaaaaaaaaaaaaaaagcacaaaccataagtgtaaagctcagtgaattttcacaaaatgaatttaccccgagtaaccagcatccaaatcatgaaacagaacatcaccagcaacccctggtaccccttccacttactacctggctccaaaggctaatgtccattctgg

SEQ ID NO: 237873 - DNA, 1000 bp, Homo Sapiens
gaagawccgccagaamtggtccaggcatgggttagrgatgttctttccctmaaatkttamcccacyatggaagtktgggycgtsgggcatgaawacmaaattatgatattyatacagaacwagkttccttatgtactgcaagaaggttttattmgctaatrtggggaggggggcatgcygcagtatttttttcctgggaacatgcatgtctgatgggaagttattttgtwtacaagagttgktttacacmcamccctgaatgaatgtgtctttggcctaaaaatggtagmcctgtatttccttcccgaggcaggctgattcgttycctgatyccttctgtctgagattacctgatgctgaccagacttatttttcctttcctgaatcttcacagctgagtttatggcacccatccaagaccttcccatttgaatgactagatttctattctatccccgatcatccttttgaaatagttctagtgataaactcagagaaattcaatatattgattgaattttattttttcgctttgtatctacaacagaaattgatttgttcatttttatttcaaatctcttcatggcaagttgggctaatggactttgcactcaagaaaggtttgtttaccagttttgtagccatgtttggcaaatcttagcaactagaaaccccgtcctttcttttccttctttatatgttcttgcagttactcttgtattgcaagattttctgactttaagctttgagactactgcatcttaaaagaagaactaggctgactggcaaaaagtcttgccagtggccctgtcactcccatgatgctttggttttgagagttgggaaaactctgagaacttaagggaaccaaactcaggaatcccaaaattggtggcattgtgccattcgtttaggggctgaacataggacctgtctgaaactgagtgagctagatgcatttgggtttgaatttttgtcacatactgaaatgtaagtcagc

SEQ ID NO: 237874 - DNA, 1000 bp, Homo Sapiens
cctagwgaaggtacatrtkgamacttyaccccctragcaatccttgtcacgagcagargaccggaggagscccrscgagagccgacatgcatccctcttcaatcaccccaacatccytcscctcgtggcttactgtctgagggaacggggtgctaagcatgaggcctggctgctgctaccattcttcaagagaggtacgctgtggaatgagatagaaaggctgaaggacaaaggcaacttcctgaccgaggatcaaatcctttggctgctgctggggatctgcagaggccttgaggccattcatgccaagggttatgcccacagagacttgaagcccaccaatatattgcttggagatgaggggcagccagttttaatggacttgggttccatgaatcaagcatgcatccatgtggaggctcccgccaggctctgaccctgcaggactgggcagcccagcggtgcaccatctcctaccgagccccagagctcttctctgtgcagagtcactgtgtcatcgatgagcggactgatgtctggtccctaggctgcgtgctatatgccatgatgtttggggaaggcccttatgacatggtgttccaaaagggtgacagtgtggcccttgctgtgcagaaccaactcagcatcccacaaagccccaggcattcttcagcattgcggcagctcctgaactcgatgatgaccgtggacccgcatcagcgtcctcacattcctctcctcctcagtcagctggaggcgctgcagcccccagctcctggccaacatactacccaaatctgaaaaagcagcatgttgagaagatggccccttgtgccttggaaagaggttcccatccctcattggaatcaccacccattccatccaggacttctcttacacttgggggtagcggggtcaggacaatcatctcagtcctgcatcttttcttctgctttcttccctccaagagcaaaacctgggcaaggggacttactgagtg

SEQ ID NO: 237875 - DNA, 1000 bp, Homo Sapiens
  misc_feature (972)..(972): n is a, c, g, or t
  misc_feature (974)..(974): n is a, c, g, or t
  misc_feature (984)..(984): n is a, c, g, or t
  misc_feature (993)..(993): n is a, c, g, or t
aaaamtatatcawgcaycccgtttattgtatactgkmctctatakttagctctatgtaawcacatcargaaatytttatgcthactctcacacacatttkgggtattkctaattamatyttkaawactgttttgctggttcatgattaawkatatgtcytaccwgcttgatgccaactcttgaytactkactggaagtttwttttttattctgcaaataatgatttaagttagtgaagtkagagatttcgtgtktaatggattgttaacttgaacatttcactcagtkacacwayagttcakccctacttaaattttataattcatttbttgyacttgacattgttatkaggagttttgttattttcatacttgtattttgagagtgtcctcatgtgactgaagtatgtgttactcttcttaattgaataaccccagaatctcyakaattgataattggaggaaattctactgttggaaagaatggatggattatacagccctgttttttgactgttcattttgtccttggagtyactaccacttggcctyaaagtgtgaacatgtaaccctttccttaatactttgctacacakctgagcagaaactgtaaatttggatcctttttcagtacaacttaaatatggaacaatttcaatggcttagggtaagatawgtttgtaaagatacttttgtaatagaagaaaaaacattggatattaaatttyacacagtagtatttggktktggtggttcattgcctataatcccaacgtctttgggaggccaagacaggagcactgctkkaggccaggaatttgagaccagcytggccaacatggtgaaaccttgtctctaccaataaaatacataaaatcagccaggtgtggtggtcacatgcctgtaatcccggatactcgggtaggctgaggtgggagaatcgcttgtaaccagggaggtggaggttgcagtnanctgaaatctnaaaactcanttcaacc

SEQ ID NO: 237876 - DNA, 982 bp, Homo Sapiens
  misc_feature (976)..(976): n is a, c, g, or t
  misc_feature (978)..(978): n is a, c, g, or t
ctccctgwgctcgaggycttcttgtggatgaaacggggractccaccaccgaggctttggggtgccctsccaccttggcgtcctcacagccctgccgtgtgttggggtggccaagaaacttctgcaggtggatgggctggagaacaacgccctgcacaaggagaagatccmactcctgcaractcgagraractcattccctctgctgggagactctggaactgtcctgggaatggccctgaggagccacgaccgcagcaccaggcccctctacatctccgtgggccacaggatgagcctggaggccgctgtgcgcctwacttgctgctgctgcaggttccggatcccagagcccgtgcgccaggctaacatctgctcccgagagcacatccgcaagtcgctggaactccccgggccacccacaccgaggagcccggaggcgcagaggccagtggcatgccccaaaggagactccggagagtcctcaggtgagggccagcccccacaggaccacagcccaggccccaggacagccccaaggccaggctcccaggrgcaggcgggcaaggactggcagtagggtggaactgggcaccatgaagacaagaaggccaccggccaccccgttctggcctcaggacactgaccacccctgggggtggtctagggacttaggggaacctcatctcagccgcaggtggagcacccagtccccaaagacaggctgaccgcaccaccccagggggacgccgcagcacagcccagcaccaggtggggcagaggtgaccacggcccctctttgctccgtcatcggctggtcagctgtggtcacggtgcctcagaggacagatctctatgggggcaagtgccagatcctgagagcgcatgagacgctttcccggagccgacgaagggractcggagctgcagcctgcacgacccctgcagcctgtgctttgcccacscgtggggatangntgga

SEQ ID NO: 237877 - DNA, 1000 bp, Homo Sapiens
gcccaattacccytggccckkaamasgarmcttcagcmcctccyccktgacctkgttaaggtkaccaycggcatggcgacctggagwkctgagsarmaccaagtaccccktgttttcatcatcctggttgtgtcctacatcatcctcmctttktgctgctccctcaamatgctcattsccttcatgggcgaracagtkggccaggtctccaaggagagmaagcacatctggaagctgcagtgggccaccaccatcctggacattgagcgctccttccccgtattcctgaggaagsccttccgctctggggagatggtcaccgtgggcaagagctcggacggcactcctgaccgcaggtggtgcttcagggtggatgaggtgaactggtctcactggaaccagaacttgggcatcatcaacgaggacccgggcaagaatgagacctaccagtattatggcttctcgcataccgtgggccgcctccgcagggatcgctggtcctcggtggtaccccgcgtggtggaactgaacaagaactcgaacccggacgaggtggtggtgcctctggacagcatggggaacccccgctgcgatggccaccagcagggttacccccgcaagtggaggactgatgacgccccgctctaggaactgcagcccagccccagcttctctgcccactcatttctagtccagccgcatttcagcagtgccttctggggtgyccccccacaccctgctttggccccagaggcgagggaccagtggaggtgccagggassccccaggaccctgtggtcccctggctctgccyccccaccctggggtgggsscccccssccacctgtcttgcycctatggagtcacataagccaacgccagagcccctccacctcagsccccagcccctgcctctccattatttatttgctctgctctcaggaagcgacgtgacccctgccccagctggaacctggcagaggccttaggaccccgttcc

SEQ ID NO: 237878 - DNA, 1000 bp, Homo Sapiens
gggggaagcctgtctgttacacaatcagctggaccaaaaagcatcccgggacktcccyccttgaaartacgccgagagcgatgggagktgtcttgcacttcatggtggctcccccagkgcagctgtcagccaggacttggctcagctcctcagccaggctgggctcatgaagagtactgaacctggagagccgccctgcattacctccgctggcttccagttcctgttgctggacaccccggctcagctctggtactttatgttgcagtatttgcagacagcccagagccggggcatggacctggtagagattctctccttcctcttccagctcagcttctctactctgggcaaggattactctgtggaaggtatgagtgattctctgttgaacttcctgcaacatctgcgtgagtttgggcttgttttccagaggaagaggaaatctcggcgttactaccccacacgcctggccatcaatctctcatcaggtgtctctggagctgggggcactgtgcatcagccaggtttcattgtcgtggaaaccaattaccgactgtatgcctacacggagtcggagctgcagattgccctcattgccctcttctctgagatgctctatcggttccccaacatggtggtggcgcaggtgacccgggagagtgtgcagcaggcaatcgccagtggcatcacagcccagcagataatccatttcctaaggacaagagcccacccagtgatgctcaaacagacacctgtgctgccccccaccatcaccgaccagatccggctctgggagctggaaagggacagactccggttcactgagggtgtcctgtataaccagttcctgtcgcaagtggactttgagctgctgctggcccacgcgcgggagctgggcgtgctcgtgttcgagaactcggccaagcggctcatggtggtgaccccggccgggcacagcgacgtcaagcgcttttggaagcggcagaaacatagctcc

SEQ ID NO: 237879 - DNA, 1000 bp, Homo Sapiens
aaatttgscatyaatcymagccctctttccatgaatkgaawcysmagtgacyaatcctmattgtggytgatgtttgctgtttytccaaactcattcccaaactagwttattscctgagmmmagctgmctactcagmatttcmacttgggtgcttcataggmatttaaaamctgatgtktttaaaacacttgattaggctccggttttcctttggcttctgcttttcagtgaatggcatgactgcctatggtggtggcaagccacccaggtgccgaggaaagagactgagggcacgagctgttccagtataataaaatatataaaataagaagagttatactagatctagatcatagacatgattatatgtgagtatcattaatcattagtttatagcaattactctttattccaatattataataatcctcactctacaatcataacctaggaaaaaccaggccatacagagataggagccgaggggacatagtgcgaagtggccagaagacaagagtgtgagccttctcttatgcctggacagggccaccagagggcttggtctagcagtaacaccagtgtctgggaagatgcctgttgcaaagtggaccatggtctagcagtagcatcagtgtcaaggaaaaacacccactacttagcagactgggaaaaggagcctccctttccccgggggagtttagagaagactactcctccacctcttgtggagggcctgacatcagtcaggcccgcccgcagttatccagaggcctgtctccctgtgatgctgtgcttcagtggtcacgctcctagtccgctttcatgttccatcctgtatacctggctctgccttttagatagcaggagcaaattagtgaaagtactaaatgtctgatatgcagaaataatggcataagctgtctctctctcttctctctctctctgcctctgctgccaggcagggaagggccccctgtccagtggacacatgacccatgtg

SEQ ID NO: 237880 - DNA, 1000 bp, Homo Sapiens
gaatgccccasagcwtgaaccaasccactamamtcacccaamagastacacctcaatggaccaaaccktgatcacgaaytccctatgcccgatctkttttagtktggctcggtktraagatgctgcattcgggcttcctcytggagaaggggatgcgggktctctcggcccccaagawtccrgggcaagttctcgctgcgggcctcaccaacaggcatgatcatcatggacggtgtgragtgccagaggagaatgtgctccytggtgcatccagcctggggggtcccttcggctgcctgaacaacgcccggtacggcatcgcgtggggcgtgcttggagcttcggagttctgcttgcacacagcccggcagtacgccctcgacaggatgcagtttggtgtcccactggccaggaaccagctgattcagaagaagctggcagacatgctcactgagattaccctgggccttcacgcctgcctgcagctcggccgcttgaaggaccaggacaaggctgcccccgagatggtttctctgctgaagaggaataactgtgggaaagccctggacatcgcccgccaggcccgagacatgctgggggggaatgggatttctgacgagtatcacgtgatccggcacgccatgaacctggaggccgtgaacacctacgaaggtacacatgacattcacgccctgatccttgggagagctatcacgggaatccaggcgttcacggccagcaagtgagccgctccatcaggggcccgaaactctcaagcccctttctggagagcatgcctggctggaccgtaggagcgctgtgctctcgagcttagaaagggaggtggcgcgatggagtgggaagtragagacactgatttttaaatatccaaatttcccttctgaaktcgttcagatgtgttccttaaaaagaagatggaattctctgtagagcgtctcaatccacttttaaccatggatgagagcagactccatttacc

SEQ ID NO: 237881 - DNA, 934 bp, Homo Sapiens
  misc_feature (660)..(660): n is a, c, g, or t
cttcccgaagcagcgccccaccaagctcaagagcctcatccgcctagtcaagsactggtaccaaaattgtaagaagaagcttgggaagctgccacctcagtatgccctggagctcctgacggtctatgcttgggagcgagggagcatgaaaacacatttcaacacagcccagggatttcggacggtcttggaattagtcataaactaccagcaactctgcatctactggacaaagtattatgactttaaaaaccccattattgaaaagtacctgagaaggcagctcacgaaacccaggcctgtgatcctggacccggcggaccctacaggaaacttgggtggtggagacccaaagggttggaggcagctggcacaagaggctgaggcctggctgaattacccatgctttaagaattgggatgggtccccagtgagctcctggattctgctggctgaaagcaacagtgcagacgatgagaccgacgwtcccaggaggtatcagaaatatggttacattggaacacatgagtaccctcatttctctcatagacccagcacactccaggcagcatccaccccacaggcagaagaggactggacctgcaccatcctctgaatgccagtgcatcttgggggaaagggctccagtgttatctgganccagttccttcattttcaggtgggactcttgatccagagaggacaaagctcctcagtgagctggtgtataatccaggacagaacccaggtctcctgactcctggccttctatgccctctatcctatcatagataacattctccacagcctcacttcattccacctattctctgaaaatattccctgagagagaacagagagatttagataagagaatgaaattccagccttgactttcttctgtgcacctgatgggaggtaatgctaatgatta

SEQ ID NO: 237882 - DNA, 931 bp, Homo Sapiens
  misc_feature (906)..(906): n is a, c, g, or t
  misc_feature (910)..(910): n is a, c, g, or t
gcacccctytttgtatttcattccagccaattgtctaaagtmatttctttgttttttgggagatggagtcttgctctgttgcccaggctgraatgmagtggcgtgatctcggctcactgcaacctccacctcccgggttcaagcgattctcatgcctcagcctcctgagtatctgggatwacaggcgtgcaccaccatgcctggctaagttttgtgttttttttagtagagatgggttttcaccatattggtcaggctggtctcgaactcctgaccttgtgatacacctgcctcagcctcccaaagggatgagccaccgcgcctggcccatttcttctttttttgacccatacttaatgttgcagaaactattcttgtcataacattatctctcatgtacagtaattatatgtaaattaattgaagcaaatatggaaactttacaatagaaataaagataggcagccagcgtctgtttccaattataatacaagtattgaatgaaccattgaaacactagaagtcaggatgtttccgaatgccagggtttcaaaatcaagacaattctatgaagtaaaaagtagattagctattagaacaaagctgaaattagaaccttatatgctttaaataacttttaagaatttgcttgacctgtggcaatccaaaaatacatcagtatttataaattctagacttctgttactacttctggcatatccacacttttttctgtcagtggattacataattggaaatttcagtacatctagactgtctctattttctttttctttttttatttttagtagagacagggtctcactgtgttgcccaggcaggtattgaactcctgggstcaagtgattcacccacctcggcctcccaaagtactgggattatggnttgncccactgtcctgccattttct

SEQ ID NO: 237883 - DNA, 945 bp, Homo Sapiens
ccaaktggactttkgaatcaagaaagtttctgtcagttkggacaaychwyyttttttttgagccaggcgcttccttacagcaacacttcatccttcgcttcagggcttttcaacagagcacagctgcttctctcaccagtcctagaagtggaatcctggctatatagttgggaagccactcttggctctgactgatgatataagttactcaagccagggtaatggaagttgctctgttaaaagacatgaagtgcagtttggagtgaatgcaatatctggatgcaagctcaggttgaagaaggcagactgcagccacttgcagcaggagatttatcagactcttcatggaaggcccagaccagagtatgttgccatctttggtaatgctgacccagcccagaaaggagggtggaccaggatcctcaacaggcactgcagcatttcagctataaactgtacttcctgctgtctcataccagtttccctggagatccaggtattgtgggcatatgtaggtctcctgtccaacccgcaagctcatgtatcaggagttcgattcctataccagtgccagtctatacaggattctcagcaagttacagaagtatctttgacaactcttgtgaactttgtggacattacccagaagccacagcctccaaggggccaacccaaaatggactggaaatggccattcgacttctttcccttcaaagtggcattcagcagaggagtattctctcaaaaatgctcagtctctcccatccttatcctgtgcctcttactacttggagttctcaacctagagactatgtgaagaaaagaaaataatcagatttcagttttccctatgagaaactctgaggcagccacttatcttggctaaatagaacctcacctgctcatgaccagagagcatttaggataatagaggacctaactgaa

SEQ ID NO: 237884 - DNA, 1000 bp, Homo Sapiens
gtgkggcmacggggcacctgaacactcccacatggccaggagatagacagtcacgayacgtgtcccgattgrscgagctctcataaaggctacgaacaggatgtgggactcggacatccttctacgsyttaccgccttctccctgacccagtcactccttatattgggcaatcggggtttcaagaacgtgcctcttgggaaggcacagacccccaggaagcttttcgggaagccctgcacatggacaggtacctgttgctgcacccagactttctccgatacatgaagaacaggtttctgaggtctaagaccctggatggtgcccactggaggatataccgccccaccactggggccctcctgctgctcactgcccttcagctctgtgaccaggtgagtgcttatggcttcatcactgagggccatgagcgcttttctgatcactactatgatacatcatggaagcggctgatcttttacataaaccatgacttcaagctggagagagaagtctggaagcggctacacgatgaagggataatccgstgtaccagcgtcctggtcccggaactgccaaagccaagaactgaccggggccagggctgccatggtctccttgcctgctccaaggcacaggatacagtgggaatcttgagactctttggccatttcccatggctcagactaagctccaagcccttcaagagttccaagggaacacttgaaccatggacaagactctctcaagatggcaaatggctaattgaggttctgaagttcttcagtacattgctgtaggtcctgaggccagggatttttaattaaatggggtgatgggtggccaataccacaattcctgctgaaaaacactcttccagtccaaaagcttcttgatacagaaaaaagagcctggatttacagaaacatatagatctggtttgaattccagatcgagtttacagttgtgaaatcttgaaggtattacttaacttcactacag

SEQ ID NO: 237885 - DNA, 1000 bp, Homo Sapiens
tttcctatttctacatgagwgatccttkawaaaawaraaagaaataatctgrgtarcagrcagacwcayyytgatgtccycascyccactccccagagtaattcaaatgaatcgwbtttgttkctctgktkgttgtagtagtgatcagaaacagatctcagcaaagccactgaggaggaggctgtgatgagtttgtgtggctggaatctctgggtaaggaacttaaagaacaaaaatcatctggtaattctttcctagaaggatcacagcccctgggattccaaggcattggatccagtctctaagaaggctgctgtactggttgaattgtgtccccctcaaattcacatccttcttggaatctcagtctgtgagtttatttggagataaggtctctgcagatgtagttagttaagacaaggtcatgctggatgaaggtagacctaaattcaatatgactggtttccttgtatgaaaaggagaggacacagagacagaggagacgcggggaagactatgtaaagatgaaggcagagatcggagttttgcagccacaagctaagaaacaccaaggattgtggcaaccatcagaagcttggaagaggcaaagaagaattcttccctagaggctttagagggataacggctctgctgaaaccttaatctcagacttccagcctcctgaacgaagaaagaataaatttcggctgttttaagccaccaaggataattggttatggcagctctaggaaactaatacagctgctaaaatgatccctgtctcctcgtgtttacattctgtgtgtgtcccctcccacaatgtaccaaagttgtctttgtgaccaatagaatatggcagaagtgatggcatgccacttccaagattaggttataaaagacactgcagcttctacttgagccctctctctctgccacccacygcccccaatctatcttggctcactcgctctgggggaagctagcttccatgctatgagca

SEQ ID NO: 237886 - DNA, 988 bp, Homo Sapiens
  misc_feature (958)..(958): n is a, c, g, or t
  misc_feature (962)..(962): n is a, c, g, or t
  misc_feature (967)..(967): n is a, c, g, or t
  misc_feature (969)..(969): n is a, c, g, or t
ctctyttgcccagtggagactgtctgccccyctgtcccttcttcccaagtgakttctctggccttaggagagcctccacccagggcasccccaggccaaagggacctggaagggaggtgggccgtgcccttgagtccccattgaggcttgttccttcccaatccagtggacttcgcagtccacttctgacagcctcagtgaccctggctccttgtgccagagaacccagcccaccccccggcagcagcccccagctcccacctccccttgggcccacacctcctcccctctccccagggaagcagcagcctcgcccctggcagagatgcctccctgagctagaaccctctgttccttccctgtgcctcctccctccctctccgactcacaccactagcctcaggggtctgagctccagctcctttcggcttcagctgccagtgtcctgagccccagggagagggggctggtgggtgcctaggcctgggcagtggatggccgtgaatgggtgcccacagtgtcaggcactgggcatgaggggttcctcccctccagctccctgtgcccccagggtcctgggaggagagacactggtggggataggccagccgcgcatcagactgtgaaccccacgaaggagcccattgtggcctaagaggctgccctcctgtgctcagccctgaggacagatgcctccttcctcttttccttcccaaagcaagcaagaggccgtggctgctgtgggaaatggtactgtacagctggctctacttccccatggccctgagcgagtggagtctgccacccaggatccccaaggcacttgagggggaaggattctgctggcctctgcgagtggtttcttgtgcactggcaccaagtgcgggtccggcagcttctgccccctgcagaaccggagagccagctaaggggtggggctgcgggggttccgtgtccnccgnccatncnatttatttctgtcaattat

SEQ ID NO: 237887 - DNA, 971 bp, Homo Sapiens
  misc_feature (79)..(79): n is a, c, g, or t
  misc_feature (933)..(933): n is a, c, g, or t
  misc_feature (936)..(937): n is a, c, g, or t
  misc_feature (945)..(945): n is a, c, g, or t
  misc_feature (948)..(949): n is a, c, g, or t
gaaggacagcatwttaagtytttyatgkgaaamccaagaattgagygtgtggaacmcctcgrmgacaggacatgtkgantggtgrgcacctttcwawacaactaacagaacagmagatggggaattcatggctgttggagcaatagaaccccagttctacgagctgctgatcaaaggacttggactaaaktctgatgaactccccaatcagatgagcatggatgattgcccagaaatgaagaagaagtttgcagatgtatttgcagagaagacgaaggcagagtggtgtcaaatctttgacggcacagatgcctgtgtgactccggttctgacttttgaggaggttgttcatcatgatcacaacaaggaacggggctcgtttatcaccagtgaggagcaggacgtgagcccccgccctgcacctctgctgttaaacaccccagccatcccttctttcaaaagggatcctttcataggagaacacactgaggagatacttgaagaatttggattcagccgcgaagagatttatcagcttaactcagataaaatcattgaaagtaataaggtaaaagctagtctctaacttccaggcccacggctcaagtgaatttgaatactgcatttacagtgtagagtaacacataacattgtatgcatggaaacatggaggaacagtattacagtgtcctaccactctaatcaagaaaagaattacagactctgattctacagtgatgattgaattctaaaaatggttatcattagggcttttgatttataaaactttgggtacttatactaaattatggtagttattctgccttccagtttgcttgatatatttgttgatattaagattcttracttatattttgaatgggttctagtgaaaaaggaatgatatattcttgaagacatcgatatacattnatnnacactctngannctacaatgtagaaaagcggaaa

SEQ ID NO: 237888 - DNA, 967 bp, Homo Sapiens
  misc_feature (966)..(966): n is a, c, g, or t
gacctcrggtgcccgcrsctcctsccctgtcgttgtcttcatcgcatgatcaccttcaataacctctgcctmaagtacgtcggtgtgsccttctacaatgtgggccgctcactcaccaccgtcttcaacgtgctgctctcctacctgctgctcaagcagaccacctccttctatgccctgcctcactgcggtatcatcatcgggggcttctggcttggtgtggaccaggagggggcagaaggcaccctgtcgtggctgggcaccgtcttcggcgtgctggctagcctctgtgtctcgctcaacgccatctacaccacgaaggtgctcccggcggtggacggcagcwtctggcgcctgactttctacaacaacgtcaacgcctgcatcctcttcctgcccctgctcctgctgctcggggagcttcaggccctgcgtgactttgcccagctgggcagtgcccacttctgggggatgatgacgctgggcggcctgtttggctttgccatcggctacgtgacaggactgcagatcaagttcaccagtccgctgacccacaatgtgtcgggcacggccaaggcctgtgcccagacagtgctggccgtgctctactacgaggagaccaagagcttcctctggtggacgagcaacatgatggtgctgggcggctcctccgcctacacctgggtcaggggctgggagatgaagaagactccggaggagcccagccccaaagacagcgagaagagcgccatgggggtgtgagcaccacaggcaccctggatggcccggccccggggcccgtacacaggcggggccagcacagtagtgaaggcggtctcctggaccccagaagcgtgctgtggtgtggactgggtgctacttatagacccaatcagaatacggtggttgagaaggaaccagtgtttacaagtaatatcagaaagtaaagaaccagtttacaataana

SEQ ID NO: 237889 - DNA, 1000 bp, Homo Sapiens
tgccccgsgattgccamwactccaaaatacccttccagtttttahtttacgggcattttsccaccytmaccaattcgcaccctggagggacatymgcccccgctggaytktggccccaactkyccctcctccaaggcatcctggtgcctgcatacytctggcagctggcccaggaagagccagcaagagcaaggcatgggagaggggagttgtcacacaacttggaggtaaatgcccccaggccgcwtgtggcttcattatactgagccatgtgtcagaggatggggagacaggcaggaccttgtctcacctgtgggctgggcccagacctcmactcgcttgcctgccctggccacctgaactgtatgggcactctcagccctggtttttcaatccccagggtcgggtaggacccctactggcagccagcctctgtttctgggaggatgacatgcagaggaactgagatcgacagtgactagtgaccccttgttgaggggtaagccaggctaggggactgcacaattatacactatttatttatttattctccttggggttggtgtcaggggcgagccaaccccacctctatgccctgagccctggtagtccagagaccccaactctgccctggcttctctggttcttccctgtggaaagcccatcctgagacatcttgctggaaccaaggcaatcctggatgtcctggtactgacccacccgtctgtgaatgtgtccactctcttctgcccccagccatatttggggaggatggacaactacaataggtaagaaaatgcagccggagcctcagtccccagcagagcctgtgtctcaccccctcacaggacagagctgtatctgcatagagctggtctcactgtggcgcaggccccggggggagtgcctgtgctgtcaggaagagggggtgctggtttgagggccaccactgcagttctgctaggtctgcttcctgcccaggaaggtgcctgcacatgag

SEQ ID NO: 237890 - DNA, 1000 bp, Homo Sapiens
ggtttcgacgggrarmscaargccccgyctcggccgttttgtggagaaaaagccgarcccgtcttgccacaggmrccgcatktyctgcgytctactcagatactcggtccagcgaaaggcttcmagcctcccacgccacagagtgcggggccaggtacgggcagacgtgaagaccaaggacstttacttcccacgcccagtttggcgacaacaactaccctgggggtgtggactgtgagtgggtcattgtggccgaggaaggctacggcgtggagctcgtgttccagacctttgaggtggaggaggagaccgactgcggctatgactacatggagctcttcgacggctacgacagcacagcccccaggctggggcgctactgtggctcagggcctcctgaggaggtgtactcggcgggagattctgtcctggtgaagttccactcggatgacaccatcaccaaaaaaggtttccacctgcgatacaccagcaccaagttccaggacacactccacagcaggaagtgaccactgcctgagcaggggcggggactggagcctgctgcccttggtcgcctagactggatagtgggggtgggcggaaggcaacgcaccatccctctcccccaggccccaggacctgcagggccaatggcctggtgagactgtccataggaggtgggggaactggactccggcataagccacttccccacaaacccccaccagcaaggggctggggccagggagcagagcttccacaagacatttcgaagtcatcattcctctcttagggggccctgcctggtggcaagagggaatgtcagcaggaccccatcgccatccctgtgtctctacacgctgtattgtgtatcaccgggggcattattttcattgtaatgttcatttcccacccctgctccagcctcgatttggttttattttgagcccccattccaccaccccagtttcctggggcacaagtgtctgtgcatgtcccc

SEQ ID NO: 237891 - DNA, 1000 bp, Homo Sapiens
ggccccgrackggsccccaccyscakccccattgkgggctgkggggmcctccatmcctkgagctatgarataggactgcatcccagagtycatctcaggattgtttcccagccttggtgacctggagaactgaagtcgtgggaggttaktttataagccagcatctgattattcatagccatgcttgttgggtggtgaaataccctaactactttgtacagcacaccacgttttcagtagcaatttatgtgctcaccagtcacttagcaaaagatgacttcgtgaaggttcgagcaaggataaggggactcattcatttaataactgtctcgactgtggtgagractgcatctcaacagccagcatctgggggtcccgacctgatagtttgtgtgtgggcattgccgggttgctcgctcgtggtaatgactcttccccgaggttctttctgtccaggcagaacaggcatttttgcattctgaataggtatattctcgtacttttggtttgaatgtggatgtgggttaataacgacccgaatctatttgatcttccaggtcaccttgggctctgtttgtcagatcctgttatccatagcctttagagaggaccttctgcttttagcttattttgttgctaactttttacaaacaaagggctaattttaaaatgtcagtgttgtcagtggtcagaaaccgtgtgtttgagcgggtgttgagtggcaggtggctctgctgacctggtggctggtgtgtcgggaggatttaacctgtgtgagggattggcctagaaacaacctgttgagatagtcttgccccataacctgtctcacaccgtagtgtacggccccchcsccscaaagctttgacaaagagtgggtggccaagcagaccaagaggatgctggacatgaaggtgaaccccatccagggcttagcctccaagtgggactacgaaaagaacgagtggaagaagtgagagatgctggcctgcgcctgcac

SEQ ID NO: 237892 - DNA, 616 bp, Homo Sapiens
  misc_feature (607)..(607): n is a, c, g, or t
  misc_feature (615)..(615): n is a, c, g, or t
agtttttcacagcatatggtcctgattatgtgctggaaatcacgccaagctgccggccagaccgcaatgagccccaccgaatccaacaaatcctcaactacatcaaagggaatctgaagcatgtggtctagttgacagaaagagatcaggtttccagagctgaggagtggtgcctataatgaagacagcgtgtttatgcaagcagtttgtggaatttgtgactgcagggaaaatttgaaagaaattacttcctgaaaattwccaaggggcatcaagtggcagctggctwcctggggtgaagaggcaggcaccccagagtcctcaactggacctaggggaagaaggagatatcccacatttaaagttcttatttaaaaaaacacacacacacaaatgaaatttttaatctttgaaaattatttttaagcgaattggggaggggagtattttaatcatcttaaatgaaacagatcagaagctggatgagagcagtcaccagtttgtagggcaggaggcagctgagaggcagggtttgggcctcaggaccakccaggtggagccctgggagagagggtactgatcagcagactgggaggtggggagaagnccgcaggng

SEQ ID NO: 237893 - DNA, 894 bp, Homo Sapiens
gtktgtttwtggataacatgaaacacctattagagctaaataaattaataatgaaatcacagcaggaatcttgggatttagaggaaaaactgcttgatattagaaagaagagattgcaattaaaacaagcttcagaaagtaagcttttagaaatacagactgaaaagaacaaacagaagattgatttggacagtatggaaaactcagagaggataaagatcatacgacaaaacctacagatggagataaaaattactactgttattcaacatgtgtcccagaaccttattttggggagtaaagtcaattgggcagaggatcctgcccttaaggaaattgttctgcagcttgagaagaatgttgacatgatgtaataagaattcatttctgacatattttacatttctggcaatctcaactcttatttggaatacttctgtgcatttgtctgtccaccgtaattttagaaaagcatatccataacgtttacagttgtagtacagttgtggttagttatttgtagtgggattgaaagtaatttttttctttttatatttctatatttagtttgtttttttgttgttgttgttttttgagatggcgtctcgctttgttgcccagactggagggcagtggcgcgatctcggctcactgcaacctctgcctcccgggttcaagcagttctgcctcagcctcccaagtagctgtgactaaaggtgcacgccgccatgcccagctaattttttgtattttagtagagacggggtttcaccgtgttgcccaggctgctctcagaactcctgagctcaggcagtccaccgcctcggcctaccgaagtgctaggattacagacgtaagccgccgagcctggtctagtttgcattttttttctat

SEQ ID NO: 237894 - DNA, 973 bp, Homo Sapiens
cagtctggcgccattgccctgctggtcctagaggaggaggagagcgccttctggtgcctggtggccattgtggagaccatcatgcccgctgattactactgcaacacgctgacggcatcccaggtggaccagcggtgctccaggacctgctctcggagaagctgcccaggctgatggcccatctggggcagcaccacgtggatctctccctcgtcaccttcaactggttcctcgtggtctttgcggacagtctcattagcaacatcctcttcgggtctgggatgccttcctgtacgaggggacgaaggtggtgtttcgctatgccttggcsattttcaagtacaacgagaaggagatcttgaggctacagaatggcctggaaatctaccagtacctgcgcttcttcaccaagaccatctccaacagccggaagctgatgaacatcgccttcaatgacatgaaccccttccgcatgaaacagctgcggcastgcgcatggtccaccgggagcggctggaggctgagctgcgggagctggagcagcttaaggcagagtacctggagaggcgggcatcccggcgcagagctgtgtccgagggctgtgccagcgaggacgaggtggagggggaagcctgacttggccmccccccccccccacagccyccctcacccttggctggcagacccactggaggtcaggcacggaccagtggcccagccctgggtgtcccatcaccatgtgaccttggacatgycccttcccctctctggccctcagtttccccactgggacattgtgtgcbgcaaagccattggttgggcsacktcttcataggcactcacttacccagggatgccaccctttcgtcacctcttccacagagcactttggcatgtaaacaagcaagagcactgcctctatagggtaacctggaacattctctaggttatatcaatataaaacaatgtaaat

SEQ ID NO: 237895 - DNA, 1000 bp, Homo Sapiens
ttccgaaccmcwttgagaagtwtttccatccaggctacttgtkttacttctawacagtcattttctaactgaagctggcattcatgtcttcattttgggctgtttcagtgcagggcttcctaaaacagaagccaactgggtgaatgtaataagtgatttgaaaaaaattgwwktttttattcaatctatgcatattgatgctactttatatacggaaagtgatgttcaccccagttgcaaagtaacagcaatgaagtgctttctcttggagttacaagttatttcacttgagtccggagatgcaagtattcatgatacagtagaaaatctgatcatcctagcaaacaacagtttgtcttctaatgggaatgtaacagaatctggatgcaaagaatgtgaggaactggaggaaaaaaatattaaagaatttttgcagagttttgtacatattgtccaaatgttcatcaacacttcttgattgcaattgattctttttaaagtgtttctgttattaacaaacatcactctgctgcttagacataacaaaacactcggcatttcaaatgtgctgtcaaaacaagtttttctgtcaagaagatgatcagaccttggatcagatgaactcttagaaatgaaggcagaaaaatgtcattgagtaatatagtgactatgaacttctctcagacttactttactcatttttttaatttattattgaaattgtacatatttgtggaataatgtaaaatgttgaataaaaatatgtacaagtgttgttttttaagttgcactgatattttacctcttattgcaaaatagcatttgtttaagggtgatagtcaaattatgtattggtggggctgggtaccaatgctgcaggtcaacagctatgctggtaggctcctgcctgtgtggaaccactgactactggctctcattgacttccttactaagcatagcaaacagaggaagaatttgttatcagtaagaaaaagaagaa

SEQ ID NO: 237896 - DNA, 1000 bp, Homo Sapiens
gaagagrgctagaaagccattttagtgtkttgcaaataaacaggamakgaacagccatkactycctcagagatggcaaattacttggkttacctgccttgaaggaccgaaaatggcagatattcaaaacgtcagcaaccaaaggcaccggccttgatgaggcaatggaatggttagttgaaacattaaaaagcagacagtaatwaagtccattcttctcccctgaaatgaagactacatcacctctctccctttggaaacagtcaagtgtacttcacactactagatgttaaaactatatgattattggcatatactgactgactgcaatatttgtagtaaatagggaaaataagtatttagttggagggataatttgatcgaatcacctgaatgttctatgtaatgtaaaatattcttttcttgctttcttgtgttaaggtatatattctatttgtatggaattcttatttaaatacagttctattaaagagtatactcctattggatgaaaaaaacctatttttgaatagtagttgcagcttgtttgtataaatactaaaaaatatcttaacagatttttttccccttaaaatgaattatctttccaaagattagactcagtatgagagtaggtgaggaacatagtttgtgtaatataatctttatttgcttacctgaccactttttattaagctgttttgtttaaaagcttttggttataggcatgaatattgttttgatggttaacttcactgacttatctgtaagtgtcattttatagtactttacagttgtcaaaaaaaatcttacatatattgatctagttgatcggtagaggaagcttgtgaagtaggtaggacaggttatgatgtcttcactgtatggacgtgaacccagggttctaataggttggcttgcccaaggtcacctgctagcttgtaaggtaggaatagggctcaaagtaaaacttttggttcagaagcttgactcataaacta

SEQ ID NO: 237897 - DNA, 1000 bp, Homo Sapiens
aaraagagytgagcccagacaggacattaagttcagtggccatgttrgckggtcgggaagacatccatggaagtgaagatgcaaatgttmccagtwacatggtgatgaattttgtcctgttttggatgcaacatttgtaatggtggctcgtgattctgaaaataaagggccggcatttgtaaatccactcatccctgaaagcccagaggaagaggagctctttagacaaggggaattgaacaaggggagaagaattgccttcagctccacgtcgttactgaaaatggcccccagcgctgaggagaggaccaccatacatgagatgtttctcagcacactggatccaaagactataagttttcggagtcgagttttaccctctaatgcagtgtggatggagaattcaaaactgaagagtttggaaatttgccaccctcaggagcttaacattttcaatcggatctttggtggtttccttatgaggaaggcatatgaacttgcgtgggctactgcttgtagctttggtggttctcgaccgtttgtggtagcagtagatgacatcatgtttcagaaacctgttgaggttggctcattgctctttctttcttcacaggtatgctttactcagaataattatattcaagtcagagtacacagtgaagtggcctccctgcaggagaagcagcatacaaccaccaatgtctttcatttcacgttcatgtcggaaaaagaagtgccattggttttcccaaaaacatatggagagtccatgttgtacttagatgggcagcggcatttcaactccatgagtggcccagcgaccttgagaaaggactaccttgtggagccctaagaacaccacatttgttgaaaactagcactctacccacagtgacgtggtatctgatgaagacctgatcgagtgtattgattttagtattgcttcgtgtcctccacacaggaggaggatgtattcagcctttaggatgatcagaaaagc

SEQ ID NO: 237898 - DNA, 906 bp, Homo Sapiens
  misc_feature (5)..(6): n is a, c, g, or t
  misc_feature (892)..(893): n is a, c, g, or t
  misc_feature (900)..(900): n is a, c, g, or t
aaccnnaataatagagatatccttgaagtaattgagaaggardgagactcaattgcagtgatcctgttcagtggggtgcatttttacactggaacagcactttaatattcctgccatcacaaaagctggacaagcgaagggttgttatgttggctttgatctagcacatgcagttggaaatgttgaactctacttacatgactggggagttgattttgcctgctggtgttcctacaagtatttaaatgcaggagcaggaggaattgctggtgccttcattcatgaaaagcatgcccatacgattaaacctgcattagtgggatggtttggccatgaactcagcaccagatttaagatggataacaaactgcagttaatccctggggtctgtggattccgaatttcaaatcctcccattttgttggtctgttccttgcatgctagtttagagatctttaagcaagcgacaatgaaggcattgcggaaaaaatctgttttgctaactggctatctggaatacctgatcaagcataactatggcaaagataaagcagcaaccaagaaaccagttgtgaacataattactccgtctcatgtagaggagcgggggtgccagctaacaataacattttctgttccaaacaaagatgttttccaagaactagaaaaaagaggagtggtttgtgacaagcggaatccaaatggcattcgagtggctccagttcctctctataattctttccatgatgtttataaatttaccaatctgctcacttctatacttgactctgcagaaacaaaaaattagctagtgttttctagwacaacttaagtcaaattatactgaaagctgctgtggttatttcagtattattcgatttttaattattgnngttttcncctttg

SEQ ID NO: 237899 - DNA, 882 bp, Homo Sapiens
  misc_feature (479)..(479): n is a, c, g, or t
ctgatataatccgcatctggggagtggtaggtagtgtcaagtcagaggtagctgaggatgtgatgcctcttgaatattcccagcctaggactttgctgttcttaaggctcctgacccgacccagccccagatttccctgacctgccccaccagcccactcacagctctgcagggagaagcgcttccggtcaggggctggcagagcagtgccaggtgctgggggctctggctgtcccaggagatagcatattgagcgtagctggaagcagggatctgccaggagcactgatgtggcttgctctctcctaggtaggggagggtgcaagggcagtcagaaggcttggggcctggctaaaagtctctcttgggattgccaatgaggagtgccatggctcgtacatgatcaccccccctgcatcctttccgtctccctgcttcccaaaccccaagtcctgtattctagtaaggtgccacamadnktgtttttttttttttttttcttgagacgagtctcgctctgttgcccaggctggagtgcgatggcacgatctcggctcactgcaacctccacctcccgggttcaagtgattctcctgctttagcctcccgagtagctggaattgcagacgcccaccaccacgcccggctaattgttgttgtatttttagtagagacagggtttcaccaggttggccaggctggtctcgaattcctgacctcaggtgatccacctgccttggcttcccaaagtgctgggatdacaggcgtgagccaccgcgcccggcctgagggtaccactttaagaaggstcaggcgaaccaccttaagatagtgagagtctgcctgccccataatattatcagtccttcaaagtcacttcaa

SEQ ID NO: 237900 - DNA, 900 bp, Homo Sapiens
  misc_feature (245)..(245): n is a, c, g, or t
  misc_feature (876)..(876): n is a, c, g, or t
cagggctggaagaagcggcacccgggggcgctcacctgtgaagccatctgcgccaagccttgcctgaacggaggcgtctgcgttaggcctgaccagtgcgagtgcgcccccggctggggagggaagmactgtcatgtggacgtggatgaatgtaggaccagcatcaccctctgctcgcaccattgttttaatacggcaggcagcttgcactgcggctgcccccatgacctagtgctagcgcgtgnacgggcgcacctgcatggagggstccccagagcccccacaccagtgcccgcatcactcagcgtggccgttgcgggaggcggaaaaagatgagcgcgctctgaagcaggagattcacgagctgcgagggcgcctggagcggctggagcagtgggccggtcaggctggggcctgggtcagagcggtgctgcccgtgccgcctgaagagctgcagccagaacaggtggctcgagctgtggggccggggtgaccggatcgaatctctcagcgaccaggtgctgctgctggaggagaggctaggtgcctgctcctgtgacggacaacagcctgcggcctcggcgtcaatcatcgatcaagaagcctctacagcacccctgccccctaatttatacagaaaccggacccactaatcctctgggattggccgactsyccccygcagataasgctttcagbcaccaaagagcaatsmacaatggaaacttcagagagctgacacgaagagggggaggcctgcgtctcttgscctgcccmtrartcttctggctgggggcaggttgcctgrgcaagaactgcattcttcaatwccttaacaaatagcaacmamcaacaccacaagatatathtctctctntattatcagttttttgctgttatc

SEQ ID NO: 237901 - DNA, 950 bp, Homo Sapiens
  misc_feature (930)..(930): n is a, c, g, or t
  misc_feature (932)..(932): n is a, c, g, or t
gtccttcccgctgaccaaagcaaaggcgagggcgatcttaacaggaaagacaacagacaaatcaccattcgttatctatgacatgaattccttaatgatgggagaagataaaatcaagttcaaacacatcaccccccctgcaggagcagagcaaagaggtggccatccgcatctttcagggctgccagtttcgctccgtggaggctgtgcaggagatcacagagtatgccaaaagcattcctggttttgtaaatcttgacttgaacgaccaagtaactctcctcaaatatggagtccacgagatcatttacacaatgctggcctccttgatgaataaagatggggttctcatatccgagggccaaggcttcatgacaagggagtttctaaagagcctgcgaaagccttttggtgactttatggagcccaagtttgagtttgctgtgaagttcaatgcactggaattagatgacagcgacttggcaatatttattgctgtcattattctcagtggagaccgcccaggtttgctgaatgtgaagcccattgaagacattcaagacaacctgctacaagccctggagctccagctgaagctgaaccaccctgagtcctcacagctgtttgccaagctgctccagaaaatgacagacctcagacagattgtcacggaacacgtgcagctactgcaggtgatcaagaagacggagacagacatgagtcttcacccgctcctgcaggagatctacaaggacttgtactagcagagagtcctgagccactgccaacatttcccttcttccagttgcactattctgagggaaaatctgacrcctaagaaatttactgtgaaaaagcattttaaaaagaaaaggttttagaatatgatctatctctctcatgcatattgtycmymvvgrcacatttacnantttacttttaatattgaa

SEQ ID NO: 237902 - DNA, 1000 bp, Homo Sapiens
ttcckggcgcaattycacccagtdtccagtktcamaccagggggrtttgctwagtggygccaatycgcaccakttttaccccygccgataaccagcagcmgagatcttttttatycttggaracaggraarggacagatagcttyccaagracatgagactgtgcaaagcctctttgctgtttctctgggctcctgagcataccagggaagttctagaaaccgcagctgacatctcgacccaagagatttaggattctcctgtttcatctgggtcagttcggccataattctggggtcaggccaggcctgggtcctgccctcccatggggtgactcatgacccctccagccaggactctcctacatgtggcccccataggcctctgtggctgcaaggcggtcagttgctgcttgtcccagcaggtggccttgatctctccatgccccaccttaagtggtaagcatgtttaattatcaaaggccccatttgtcaggggtgagagaaaagtcaaaagataaattggggccttgtaaaaggccagggtaaaatgtctcaggcaagcaaaagattgtccccttctgcatatgggtaaaactgagacgtccccgtgagcccgaggctggaagtggtgtctgccttcaagggttaatccctctttgttccaagcagaagcattctggcatcccagtgaagagctcaggccctcaggaagtgtctgctgaatggaatggcccagcattagcccagtattggaaaagacaccagcccaggggccctgactcgtcacacttccctttcctaagcctctgagggtggagattcccctaggagcgcttggccagctgggaaggcagcgcccagctgcacttgttgttgatacagcataagtgaatcatgggcatttccctgagagcagtgggagaggccctctgagttggaagttgagctccacctcctttccaagcgagcactcagtgttgaatcacagttacaacccac

SEQ ID NO: 237903 - DNA, 1000 bp, Homo Sapiens
aaacaagtctctwyytagrrtawgtcgccacaaggkcccmcctctttttcccctttaaaaacymaattttaaaaccctttccaargttcaactgwaaawacttyttttacaaktwtcacatatttttatttaagggaattaacaattgccaggaaaccagccamcccaagtttattwtatcwttaaccttawcataaattcaaacctaagttgctggaccctggtgtgaggacataaatcttccaaagttttgcctatcctaagagctgcatttttctactgctctttaccttgcattttagctaatttaggagttttgagaatgtattggatacgctccagtacataaggagttgccgcatattatatcagactgctttgagaaatctcatccctagtctattgcagttgtttctattagcttactgattaactcagtcctgacacaccttttgggaaatgctgatttaaacttcttaactggcaacagttggaacagtagtcagtttgctaacatatttaaagtcttgaatgttgaagaactcatgtgatttacccttttcaactttttggaaaacgatttaatttattctaattagattaaccctattaatctatggattgggtatcaaaatgaatgccagtccagatgtgcctagacacgaaattggagctgaggactctcacgatatgcaagttcatccaacgtgaagataccataagctttttctctgaaccagagaaatgaaagtcagtttaagaggctgatagatcttggccctgttaaggcatccacttcacagttctgaaggctgagtcagccccactccacagttaggccaagaattagattttaaaacttcatctgtctgtcccagttaactgttaaataaggcctcatcctccactgaagagtatggattgaaggattgtgaactatgtttagtgtgattgtgaacttggtgcctaatgttccatgtctgaagtttgccccagtgct

SEQ ID NO: 237904 - DNA, 1000 bp, Homo Sapiens
gggsccgmcsmatttaaaaaatwggactcarraggagcctttttttcattctcwctkttggaragatttrgacactaraargcackgggarwtctcagctaaaacwcccrscrgttgragtatgattaggamcaycrggctgcattgtcaatgttctctttaagtcttttaacattwatagcaattttttttttcccsggagagtttaggttgcaagttttgggtttcttgtttgtttttgttttgcttcctgctttaattctttaattttcagtcatgactggtattgaaaaataaaatacctttaaaacatctcctcttcagaaataggtccctcttcattgcccatcaccatcttccactctcctattattttgccactactcagtaaaggaaggtaggaagagacaaacgcctaagtgcaggtgtggggagggatttcacaagtggttattaacggccagttcagcaagaagtgttgagtgtgtacaaaggggagggctggaagtgttaactccagacccgttggctgcttgagttgtttcttatattctaaagcagcagtccctaacctttttggcaccagggaccagttttgtggaacacagtttttccatggacggggtggtggtggaggatgaaacttcctcctcagatcatcaggcattagagtctcataaggagcacgcaacctagatccctcgcatgcgcagttcacaatacggttctaagggctttagagtaagcagctttttcacctgtgggcctctggtgagaaattctgtaaattstgataatcaggctggattttaatgctgcttttccagtacaatgttagagtttgggttcattaaaattaggcaaactcccattgggttagggcttctctcattccattttgtggctaaccttactgtgtttcagcccttgctgaaaattcttctgatatgtgttgcccttcctcacagccctttggccattgggagtttggctgtccctc

SEQ ID NO: 237905 - DNA, 916 bp, Homo Sapiens
agagaktrargcttaraaaagagggacccargtgactccacagcatatggaggagctggcagagcaggagattgctaggctagtactgacagatgaggagaagagtctattggagaaggaggggcttattctscctgagacacttcctctcactaagacagaggaacaaattctgaaacgtgtgcggaggaagattcgaaataaaagatctgctcaagagagccgcaggaaaaagaaggtgtatgttgggggtttagagagcagggtcttgaaatacacagcccagaatatggagcttcagaacaaagtabagcttctggaggaacagaatttgtcccttctagatcaactgaggaaactccaggccatggtgattgagatatcaaacaaaaccagcagcagcagcacctgcatcttggtcctactagtctccttctgcctcctccttgtacctgctatgtactcctctgacacaagggggagcctgccagctgagcatggagtgttgtcccgccagcttcgtgccctccccagtgaggacccttaccagctggagctgcctgccctgcagtcagaagtgccgaaagacagcacacaccagtggttggacggctcagactgtgtactccaggcccctggcaacacttcctgcctgctgcattacatgcctcaggctcccagtgcagagcctcccctggagtggccattccctgacctcttctcagagcctctctgccgaggtcccatcctccccctgcaggcaaatctcacaaggaagggaggatggcttcctactggtagcccctctgtcattttgcaggacagatactcaggctagatatgaggatatgtggggggtctcagcaggagcctggggggctccccatctgtgtccaaataaaaagcggtgggcaag

SEQ ID NO: 237906 - DNA, 1000 bp, Homo Sapiens
gggaataactcygcgcatttstcycgarctaycscaaatcgaccgykacctggctmacatccstgcccgcccasccgaaggccccgggggtgcgcgagctggaatatggcacccccactctccggtcatcctctgctctacctacctgatgaattatagaatgtgaagacccagtgatcatktggaaatgcwactgcatcccaggaacttggttatgttgtctcaagttcggcggtcaggcctacagcgacgtggaacacacttcagtccagtgccatgccttagatggaattgagtgtgccagtcctaggacctttctacgagaaaataaaccttgtataaagtataccggacactacttcataaccactttactctactccttcttcctgggatgttttggtgtggatcgattctgtttgggacacactggcactgcagtagggaagctgttgacgcttggaggacttgggatttggtggtttgttgaccttattttgctaattactggagggctgatgccaagtgatggcagcaactggtgcactgtttactaaaaagagctgccatcatggcccagggaggcgggtgaaagctccgtcttctgaattcatctctacaggctcaaaactcctctttgatatcagacctgatgttattttccttcttttggagggcatttgtttggttaagaaggcttctttggactttggaatttcaacccagattttaccttgcagacggaatgacaagcaaaaagtgttgtggggaatcaaatttgttcctttcctcatgcacaaaacataaaggatagtggcgagtttacaagctgtggatgggtttccatagtcttcctttctgtacattgctatatcttcagtcctttggagcaagtggacctaacaagttgagcaaaatgaatatttggatccatgttcctcttgtgaccctgagtcttcatgcaaggagatctgaagctgaacaatgaaaatcttcagca

SEQ ID NO: 237907 - DNA, 1000 bp, Homo Sapiens
gaagcacacasccamtcgcacacctctctcctttgtcacccccgctgggagtcctatgagtgtcaagctcaacaaaccatttcactggcctctagtgatccgcagaagacggtcaccatgatcctgtctgcggtccacatccaaccttttgacattatctcagattttgtcttcagtgaagagcataaatgcccagtggatgagcgggagcaactggaagaaaccttgcccctgattttggggctcatcttgggcctcgtcatcatggtaacactcgcgatttaccacgtccaccacaaaatgactgccaaccaggtgcagatccctcgggacagatcccagtataagcacatgggctagaggccgttaggcaggcaccccctattcctgctcccccaactggatcaggtagaacaacaaaagcacttttccatcttgtacacgagatacaccaacatagctacaatcaaacaggcctgggtatctgaggcttgcttggcttgtgtccatgcttaaacccacggaagggggagactctttcggatttgtagggtgaaatggcaattattctctccatgctggggaggaggggaggagggtctcagacagctttcgtgctcatggtggcttggctttgactctccaaagagcaataaatgccacttggagctgtatctggccccaaagtttagggattgaaaacatgcttctttgaggaggaaacccctttaggttcagaagaatatggggtgctttgctcccttggacacagctggcttatcctatacagttgtcaatgcacacagaatacaacctcatgctccctgcagcaagacctctgaaagtgattcatgcttctggctggcattctgcatgtttagtgattgtcttgggaatgtttcactgctacccgcatccagcgactgcagcaccagaaaacgactaatgtaactatgcagagttgtttggacttcttctgtgccaggtccaagtcggggga

SEQ ID NO: 237908 - DNA, 1000 bp, Homo Sapiens
  misc_feature (728)..(728): n is a, c, g, or t
ggcccgtgggtgtgcagagggccgagtattggkaagagagacacggacmccaagsccacgacaaaytamagratggacctgcagaccctgsscgctacwacaccaagagcgaggccaggtctcacaccctccagtggatgattggctgcgccctggggtccaacggacgcctcctccgcgggtatgmacagtatgcctacgatgcaaggattacctcgccctgaacgaggacctgcgctcctggaccgcagcggacactgcggctcagwtctccaagcgcaagtgtgaggcggccaatgtggctgaacaaaaggagagcctacctggagggcacgtgcgtgaagtggctccacagatacctggagaacgggaaggagatgctgcagcgcgcggaccccccccaaracacacgtgacccaccaccctgtctttgactatgaggccaccctgaggtgctgggccctgggcttctacctgcggagatcatactgacctggcagcgggatggggaggaccagacccaggacgtggagctcgtggagaccaggcctgcaggggatggaaccttccagaagtgggcagctgtggtggtgccttctggagaggagcagagatacacgtgccatgtgcagcatgaggggctgccggagcccctcatgctgagatggaagcagtcttccctgcccaccatccccatcatgggtatcgttgctggcctggttgtcctngcagctgtagtcactggagctgcggtcgctgctgtgctgtggagaaagaagagctcagattgaaaaggagggagctactctcaggctgcaatgtgaaacagctgccctgtgtgggactgagtggcaagtccctttgtgacttcaagaaccctgacttctctttgtgcagagaccagcccacccctgtgcccaccatgaccctcttcctcatgctgaactgcattccttccccaatcacctttcctgttccagaaaaggggctgggatgtctc

SEQ ID NO: 237909 - DNA, 1000 bp, Homo Sapiens
  misc_feature (978)..(979): n is a, c, g, or t
  misc_feature (981)..(981): n is a, c, g, or t
tgcagaaacaagagactttattgatgcttaccttaaagaaatgtcaaagcacacaggcaatcctacttcaagtttccatgaagaaaacctcatctgcagcaccctggacctcttctttgccggaaccgaracaacttccacaactctgcgatgggctctgctttatatggccctctacccagaaatccaagaaaaagtacaagctgagattgacagagtgattggccaggggcagcagccgagcacagccgcccgggagtccatgccctacaccaatgctgtcatccatgaggtgcagagaatgggcaacatcatccccctgaacgttcccagggaagtgacagttgataccactttggctgggtaccacctgcccaagggtaccatgatcctgaccaatttgacggcgctgcacagggacccacagagtgggccacccctgacacattcaatccggaccattttctggagaatggacagtttaagaaaagggaagcctttatgcctttctcaataggaaagcgggcatgcctcggagaacagttggccaggactgagctgtttattttcttcacttcccttatgcaaaaatttaccttcaggcccccaaacaatgagaagctgagcctgaagtttagaatgggtatcaccatttccccagtcagtcaccgcctctgcgctgttcctcaggtgtaatattgttaagaaagaaaggggcaaggaaagtaagaagacatggcacgtgttctgaaaccactggtgtctgctcagatgtgttgggacaaaatgaaagtgactttcaagaaagatcagaggaatttgactcagagaaaactagatccaaatcccagctctactgtctcgtccgaattagccttgggaaaatcatttatatgctaaataatttacctttttatctaggagatgaaaagaggataatgtttccttccataaagaaagttcttgtaagaatcaaanncnaatggtggccctaacccac

SEQ ID NO: 237910 - DNA, 1000 bp, Homo Sapiens
  misc_feature (478)..(478): n is a, c, g, or t
cccaaaaccgcaatggtcttaactatccagccactttaactctgctgaactkttcmgcatgcaaaatytaaagytraagkgataaaaacaaaattgtagcaacatccgkgtaaaaaaagctatatttgatcaactgtgtaacaactagagaagaatgaacagcaggtcaacagagaacctggagatgtagctactccaccacggaagagaaagaagatagtggttgaagccccagcaaaggaaatggagaaggtagaggagatgccacataaaccacagaaagatgaagatctracacaggattatgaagaatggaaaagaaaaattttggaaaatgctgccagtgctcaaaaggctacagcagagtgatttcagcttccaaactggtatacattccaaactgatagtacattgccatctccaggaagacttaacggctttgggattttgtttaaacttttataataaggatcctaanactgttgcctttaaatagcaaagcagcctacctggaggctaagtctgggcagtgagctggcccctggtgtgagcattagaccagccacagtgccttattggtatagccttatgtgctttcctacaaaatggaattggaggccgggcgcagtgctcacgcctgtaatcccagcactttgggaggccaaggtgggtggatcacctgaggtcaggagctcgagaccagcctggccaacatggtgaaaccccatctctactaaaaatacaaaaattagccaggtgtgatggtgcatgcctgtaatcccagctcctcagtaggctgagacaggagcatcacttgaacgtgggaggcagaggttgcagtgagccgagattgcaccaccgcactccagcctgggtgacagagcgaaacttatctcataaataaatagatagatactccagcctgggtgacagagcgaracttatagatagatagatagatagatggatagatagatagatagatagatagatagataaa

SEQ ID NO: 237911 - DNA, 1000 bp, Homo Sapiens
tacccactakcctgggaatgggtatrarcaramgagawtttcatkttggmgargsttcmccactgtgatgacccgctcctggagtatgaagtcatctgtatctactggaccaagtamtacacactccacaatgcaatcattgrgattgtgtcagaaaacagctcaaaaaagagaggcccatcatcctggatccggccgaccccaccctcaacgtggcagaagggtacagatgggacatcgttgctcagagggcctcccagtgcctgaaacaggactgttgctatgacaacagggagaaccccatctccagctggaacgtgaagagggcacgagacattcacttgacagtggagcagagggttacccagatttcaacctcatcgtgaacccttatgagcccataaggaaggttaaagagaaaatccggaggaccaggggctactctggcctgcagcgtctgtccttccaggttcctggcagtgagaggcagcttctcagcagcaggtgctccttagccaaatatgggatcttctcccacactcacatctatctgctggagaccatcccctccgagatccaggtcttcgtgaagaatcctgatggtgggastacgcctatgccatcaaccccaacagcttcatcctgggtctgaagcagcagattgaagaccagcaggggcttcctaaaaagcagcagcagctggaattccaaggccaagtcctgcaggactggttgggtctggggatctatggcatccaagacagtgacactctcatcctctcgaagaagaaaggagaggctctgtttccagccagttagttttctctgggagacttctctgtacatttctgccatgtactccagaactcatcctgtcaatcactctgtcccattgtctactgggaaggtcccaggtcttcaccagttttacaatgagttatcccaggccagacgtggtagctcacacctgtaatcccagaactttgggaggccgaggtgg

SEQ ID NO: 237912 - DNA, 917 bp, Homo Sapiens
  misc_feature (891)..(891): n is a, c, g, or t
  misc_feature (894)..(894): n is a, c, g, or t
agtwgcgaagtgtgaattctgtggaaaatgggatatgctaatgaatttttgsggtsaaaasgattctgsastatgtcgtgtgccaaaagtasaatgttagctgttstaaaaaatttgsagttagtcgttggaatsgtaagcstgataatcaaagtcttgggcatcgtggccgtcgtccaagtggccctgatggggcagcgagagaacatatccttaggcagcttccaattacttatccatctgcagaagaagacttggcttctcatgaagattctgtgccatctgctatgacaactcgtctgcgcaggcagagcgagcgggaaagagaacgtgagcttcgggatgtgagaattcggaaaatgcctgagaacagtgacttgcataccagttgcacaaacagagccatctatatggacagttgatgatgtctgggccttcatccattctttgcctggcatgccaggatatcgcagatgaattcagagcacaggagattgatgvacaggcccttctcttgctgaaagaagaccatctcatgagkgcaatgaatatcaagctaggsccagscctgaagatctgtgcacgcatcaactctctgaaggaatcttaacaggaacatgaagccttgataaaacagcagttttacttttctcacaaaaacttgtaaggtaaaggcactaacttggtctagaatatgavacwtattgtggtggatagccaagsacattgggrtstccacatcaaatactgacatttcktskacaggtataataattcatcatgcattwtmataattaataaacattggtaaaattaattttacaggttacatgaaacattgaaagacttgttacagagggccatgatatttttcaaagaaatgtgttatantanataatttttttaaagatgatgtt

SEQ ID NO: 237913 - DNA, 897 bp, Homo Sapiens
  misc_feature (891)..(894): n is a, c, g, or t
gcagaaatgtcactcytcaaaaagcaagccggctggagccagcccagctcccagttttgcaagaaaaaaaaaatcacagctccattttcaaagatttcaagggcagctcaagaccagcctggactagcaggcctcaaatgcattactggagacccctttacgctcttaacaagtaccgaccccaaagaggctttttgtataacaatgtctattgatatttactctactggaaattaaaagtgagaaatttataacatgtataattcattaaaaataacatataaatccattgcatgttatcataaataattttatgaagataagcatcttccaaaatgaaaaaataatttactgagagagtagcattgttgtacattttcacaaatcctgtcagtgtctggcttaatagaagacagctagggaccttgcgtctgcttccgatgtagtctatggaaatgtgttgtttcagttgaactgtatcaagaaaatctggcctcacgcattttatagttgaaacagggaaaaggattttagtacctttttcagctaactaactatgaacattctttgctattacaccaaaactcaacaagtggtagcttcttaaaggctggttataacatggaatctgaagcctcatgaatagacttttgggctctgtggcagttaaatccgctgttctctctcactttgaacatgtggtttttcatggaaaaatgaatgttcacttgaaaaatgttggttcacagagttctgcagaaattcaaatttttgacacattacattatatagtatcaaaaaatcacttaatatcaccatccatctcatcagaaaactcattatgaggaagttgtcatggtgataggagaaagtttttcaaaattctgattnnnntta

SEQ ID NO: 237914 - DNA, 953 bp, Homo Sapiens
  misc_feature (946)..(946): n is a, c, g, or t
gaaaataaccaattcacccccagaagttaatcagctgcagaagggaggaggtggatgcctgtgccacggctgtgatgtctcctgaggaactcctcagggcctggatctcataggtttgcggaagggcccaggtgaagccgagaacctggtctgcatracatggaaaccatgaggggacaagttgtgtttctgttttccgccacgracaagggatgagagaagtaggaagagcctgttgtctacaagtctagaagcaaccatcagaggcagggtggtttgtctaacagaacactgactgaggcttaggggatgtgacctctagactgggggctgccacttgctggctgagcaaccctgggaaaagtgacttcactccttcggtcctaagttttctcatctgtaatgggggaattacctacacacctgctaaacacacacacacagagtctctctctatatacacacacgtacacataaatacacccagcacttgcaaggctagagggaaactggtgacactctacagtctgactgattcagtgtttctggagagcaggacataaatgtatgatgagaatgatcaaggactctacacactgggtggcttggagagcccactttcccagaataatccttgagagaaaaggaatcatgggagcaatggtgttgagttcacttcaagcccaatgccggtgcagaggggaatggcttagcgagctctacagtaggtgacctggaggaaggtcacagccacactgaaaatgggatgtgcatgaacacggaggatccatgaactactgtaaagtgttgacagtgtgtgcacactgcagacagcaggtgaaatgtatgtgtgcaatgcgacgagaatgcagaagtcagtaacatgtgcatgtttgttgtgctccttttttctgttggtaaagtacagaattcagcaaataaaaanmccaacc

SEQ ID NO: 237915 - DNA, 941 bp, Homo Sapiens
  misc_feature (920)..(920): n is a, c, g, or t
gcatgggctgacaaatggggwgggctggcwtatttcagtgcatcagcatggttgttcagggcaatttcaggtttgggtgttttctggggktgttkacatgggrttcaggcwcaccwcacaggrgcatttcaatcacatgatgggtgcwgttgggcatgtcaaatgtgtgacatcatgagtacacagatgmtaattcgtaggggcacttggaatcacatggttgttttgtgtcmcatggtcaagcattctatcttatcagggcctacastmacatgccaaaagttgcttccaacatatttctctgctttggatggggcatatttctgtgctgtggatgacatggccttactccagaatcccaggccctccactgtgactctcctactggtgcttggttcagctccaccccaaatcttaccccaccactggcactttcagcaccagggggtctgaaggatggtgactgcgccatggcctggatctgctgcagtgtcctttcctgtggaggctccactcaaagctggcatcctcctatgtcacctagagtgtgggtcaaagcaatacacctacatgtagaatgtgatgtcagaactcaaacaggctcaccaggcagtgtgcttccttccttgcatgaggatgcaagatgcaacagtttgtctttcacattggaagggacacccctggatgcccctaaccactagacctgtaaaacttcactgcagtggccacttctgaatctctgtaaggtttatttatcttcaccctctggagagaagatgttttaccaaagcctctagtgtaccttcctcctcttactcatccatcccagtcaacatgatgttgtcaatgaaataaaggaatttaatattctatagtatatccaggttctccagatctcttaagactgtactatagaggcntggtaattataataccctgag

SEQ ID NO: 237916 - DNA, 981 bp, Homo Sapiens
aaggaaaatgcaaaaagcgaggcgacgggttaaagatggagaacgacccccaggaggcggagtctgaaatggccctggatgctgagttcctggacgtgtacaagaactgcaacggggtggtcatgatgttcgacattaccaagcagtggaccttcaattacattctccgggagcttccaaaagtgcccacccacgtgccagtgtgcgtgctggggaactaccgggacatgggcgagcaccgagtcatcctgccggacgacgtgcgtgacttcatcgacaacctggacagacctccaggttcctcctacttccgctatgctgagtcttccatgaagaacagcttcggcctaaagtaccttcataagttcttcaatatcccatttttgcagcttcagaaggatgtcaggcttgcccaggaaaggggctgtgctgtcgtcctggtgtcagaagaagtgaggatgcctgcaggctgggactgctgctggggacgtttgggttggaaggaaggcggcagtcagacttgtcctgtgccggcactgctggggaggcccctccttcctgcagagccgtcccctcatcactgggttgattactccttagagagctccccactgctcagctgctccattccctaatggtttgccctccaaacccttccaaagcctcccagggagagaacgggaccctggacagagtcttgagctggaagcgtagggctgagctgtgtgtgactatccttttgctatggatgtgttcaagcagatctgatgtcctcgcctgtctcagcagcgggacccctgtttcctctttgtcttgcccctggattgcctggaagcaaatttcaggccttctttatgtcacctaaaaatatttcaaacacatctctaaaaaaatcagkwvtttttttaacctgaccgtagtacctaatataataccmcatattaaactcaccaaaaatatacttaagaaataacmacaata

SEQ ID NO: 237917 - DNA, 905 bp, Homo Sapiens
  misc_feature (877)..(877): n is a, c, g, or t
atgccarattccaacycaatctktgagcaccttyytagakttgaagatgcctaggggtgkwagcccaaggttctgcagcagcgraccgctccagaaaatattccccgtgtgaatgccagagattcaacatgagcatacctatgcctggcatccagtgaacttctccagtgtcactstggagcaagcccgcagagatgtggagcaactggagcagctcatcgaaagccatgatgtcgtcttcctattgatggacaccagggagagccggtggctccctgccgtcattgctgcaagcaagagaaagctggtcatcaatgctgctttgggatttgacacatttgttgtcatgagacatggtctgaagaaaccaaagcagcaaggagctggggacttgtgttccaaaccaccctgtggcatctgctgacctcctgggctcatcgctttttgccaacatccctggttacaagcttggctgctacttctgcaatgatgtggtggccccaggagattcaaccagagaccggaccttggaccagcagtgcactgtgagtcgtccaggactggccgtgattgcaggagccctggccgtggaattgatggtatctgttttgcagcatccagaagggggctatgccattgccagcagcagtgacgatcggatgaatgagcctccaacctctcttgggcttgtgcctcaccagatccggggatttctttcacggtttgataatgtccttcccgtcagcctggcatttgacaaatgtacagcttgttcttccaaagttcttgatcaatatgaacgagaaggatttaacttcctagccaaggtgtttaattcttcacattccttcttagaagacttgactggtcttacatngctgcatcaagaaacccaagctgctgag

SEQ ID NO: 237918 - DNA, 1000 bp, Homo Sapiens
tggatattttttttcggagtttgsccmaagcyttcrtagmgggsgggtygcctcgtggcaggcrgkkggggraccgcggaaasccctgytgtggcattttggcctgrksctggsytgkaccccccgcmatgtataagaactgccacagcggsgaccggcccacgccyaacaagtgtggcatccgcagctgccagaagagctacagctttgacttctacgtgccccagaggarsyktgtctctgggatgaggatccctaccccaggctagggtgggagcaacctggcgggtggctgctctgggcccactgytcttcaccagccactagagggggtggcaacccccacctgaggccttatttccctccctccccactcccctggccctagagcctgggcccctctggccccatctcacatgactgtgaagggggtgtggcatggcagggggtctcatgaaggcacccccattcccaccctgtgccttccttgcgggcagagagggagagaagggctccccagatctacacccctccctcctgcatctcccctggagtgttcacttgcaagctgccaaaacatgatggcctctggttgttctgttgaactccttgaacgtttagaccctaaaaggagtctatacctggacacccacctccccagacacaactcccttccccatgcacacatctggaaggagctggcccctcagtcccttcctactccccaacaaggggctcactatccccaaagaaggagctgttggggacccacgacgcagcccctgtactggattacagcatattctcatctctggccccgaggctgcctgtggggcgagtggagacctcccatcactgagacagatcacagaccacgagtgcctttcccggacctggacgttgcctccagagcaggcaccagctctttccctctctagacagaaatatttttgtaaggttctggggcagggagggagcatgaagtacgaggaaaacttga

SEQ ID NO: 237919 - DNA, 1000 bp, Homo Sapiens
  misc_feature (992)..(992): n is a, c, g, or t
acagtrtkgcacmcgctgctaccttctgcagaagaaygaacktatccvwggaacgrggagcatccatcgcacaytgtcccaatyytaatttatcgctcagcagtggatttctaaatgtgctagaagtcctgaaacatgaagtcaagatagggctgggaacagacgtggctggtggctattcatattcccatgcttgatgcaatcagaagagcagtgatggtttccaatatccttttaattaataaggtaaatgagaaaagcctcaccctcaaagaagtcttcagactagctactcttggaggaagccaagccctggggctggatggtgagattggaaactttgaagtgggcaaggaatttgatgccatcctgatcaaccccaaagcatccgactctcccattgacctgttttatggggacttttttggtgatatttctgaggctgttatccagaagttcctctatctaggagatgatcgaaatattgaagaggtttatgtgggcggaaagcaggtggttccgttttccagctcagtgaaagaaacaattcacttaccagcctcctcaccccatcctccaccatttccttaatgttccatggtattttcaacggaatacactttgaaagacctgagtgtgaaagactgagagttgaggagttactttgtggatcttgtccaaatttagtgaaatgtggaagtcaaccagaccaatgatggaattaaatgtaaattccaagagggctttcacagtccacagggttcaaatgacttgggtaacagaagttattcttagcttacctgttatgtgacagtgatttacctgtccatttccaacccaaaagcctgtcagaaagcattctttagagaaaaccactttacatttgttgttaaactcctgatcgctactcttaagaatatacatgtatgtattcataggaacattttttctcaatatttgtatgattcgcttactgttattgtgctgagtgngctcctgt

SEQ ID NO: 237920 - DNA, 1000 bp, Homo Sapiens
  misc_feature (978)..(980): n is a, c, g, or t
  misc_feature (996)..(996): n is a, c, g, or t
gggcmcttcaakgtraaktccaccmacayttttraaaytdtaastttcaraaracgaktgatctcccaggcccacccagggtacgggsttgcacgggctyctkgcctggatggagtgctgcgcgtctccagcggcatctcggagaggatgctgtctctcttggtggtggacgtgggcaatcctgaggaggtcagactgttcagcaaaggctttctggtggccctggtgcaagtcatgccttggtgcagccctcaggagtggcagcgccttcaccagctgaccaggagactgctggagaagcagctcctccatgtcccttatagcctggaatatattcagtttgttcccctgctcaacctgaagccctttgcccaggagttgcaactctccgtcctcttcctgaggactttccagtttctctgcagccatagctgtcgtaattggcttcctctggaaggctggaaccacgtggtcaaactcctctgtggcagtctgacccgcctcctggactcagtcagggcgatacaggcagctggcccttgggttcaaggaccagagcaggacctgacccaggaagccctgtttgtttacacccaggtgttctgccatgctctgcacatcatggccatgctccacccggaggtctgtgagccactctacgttttarccttggaaaccctcacctgctatgagactttgagcaagaccaacccttctgtcagctccttgctccagagggcamacgagcagwgcttcttaaagtccattgcwgagggaatcggmcctgaagaacggmammaaamcmtgtwgcagaagatgagcagattctracttggcgtggggagctgggaaamaacatggcgggtcaaaaraagatcagcagcatcttacctgtgcgggagaraaaaagctgggcttaaacatggcagraaagtagggravaravvvgrgcbbkctgkttttttttkttttgtgatnnngtchwhawaaaaamanggcm

SEQ ID NO: 237921 - DNA, 989 bp, Homo Sapiens
agagmaaacyttcccayccmgggaccgcktgtctgagttsgctacwaagctagcartsaggcttgtktygcatccghtcccctmamacctcaaaracctckttctagatytttctagwatcagagaywtcwccaggtyatrwcccaaargcttaacccgtttacaaggagagagttkcycctracgcccaaaatggcagctaaaatggagataactttaagctccaacactgaagctyccwccaagcaagagagacacataatagccaaactagaagagaaacggggcccwcctctgcaaaaaaactgcccagatcctgagctctgccgccagacrccacagacgcttttgttatcaagaggtgtctggaccccaagaggcgctctcccagctccgacagttctgccgtcagtggttgcaacccgagctgcacaccaaggagcagattttggagcttctggtgatggagcagtwcctgaccatcctgcccccggagatccaggctcgggtcaggcatcgatgtccaatgagcagcaaggagattgtgaccctcgtggaagattttcacagagcatccaagaaaccaaagcagtgggtggccgtttgtatgcaggggcaaaaggtgytcttggagaaaactggatctcagcttggagaacaggaactkccrkactktcaaccgcagactcctaggagagatbtcagggagagktctccrgcagagccttcccaggcaggagcttatgaccggctgagcccccatcattgggagaaatccccmcscssccaagaaccaacccccamattggctgggacagaacttcttatagaaaagacagatccaaatatggccacagatgaacttccatgcaagctatggctgagtttcattgcttaaaatgctcctctgtttagaggggcctggtagaaataaaaacccaccctatatcttatatctttgtcctcctttgtgatkttkcttgtwyttt

SEQ ID NO: 237922 - DNA, 944 bp, Homo Sapiens
agtctcawcagatttttctcctattctgtgactttctcagtagtatcttttgaagcgtttaccttttgatgaagtcctatwtatcatttttaaaaattgcttttgcagttttatggttatctaagaaacattgcctaattaaaggtaatgaaaatttactcgtacgttttaagagttttataattttggctcctacatttaggtctgtgatctatattgttttgtttatagtgagaggtaagggtataatttatctttttgcatgtgggtgtgtgattattccagcaccttttattgaaaagactgtccctcccctattgaattgccgtagcatcttatgaaaatcaattgaccataaatataagggtttatttccggattctgagttctcttttgttctgaaggtgtatccttcatgctaatactgcactgtcttactgactgtagctttatagtgaattttgaaatttggaattataagccctctaactttttcaggaatgttttgactatgccgggacctgtacagwaccawacaaattgacmatatcagcaaaaaaaaaaamaaaaaaaamagmagraradatggtagraatwrcmtwgaacctatagatcaatttggggagactmactgtcaacaacgttgagwtwmccaatccatgacacagaggtctctaaatttaathtctctcagcagtgttttgtagttgttcggtgtacgagtcttgaattttttktgkwaaatttattgccaagtatkttattsktttgccatgctgtcttgaatggkggaagtgttktckaattttggktktcaggttgttaacgctaacctgtagaaatacaatcgatttgtccattgttcttgtatccttcgtccttkttttattcactagttgtagtagtttctttgtgaattccttatagttttctacatacaggat

SEQ ID NO: 237923 - DNA, 983 bp, Homo Sapiens
cctatgagtgcagtaaatgtgggaagtcatttaagcaaagctccagcttcagttcacatcggaaagtccacacaggggaaaggccttktatgtgtgtggggaatgtgggaaatcctttagccatagctccaaccttaagaaccaccagagagttcacactggagaaagacctgttgagtgcagtgaatgtagcaaatcctttagctgtaaatctaacctcattaaacacctgagagttcacactggagaaaggccttatgagtgcagtgaatgtgggaaatcctttagccaaagttctagcctcattcaacaccgcagagttcacacgggaaaaaggccttatcagtgcagtcaatgtgggaaatcctttggctgcaaatctgtcctcattcaacaccagagagttcacattggagaaaagccttagctgtactgagaatatgcaatttccttttagtgtaattatactgaaggagtacacctgtgagagagacaagtacctgatttggaagccccaacatctaaggatatacagtgggcggattccccttaagttccaggtatgtgttacactttctaacatgccatttagaaagtgttagactttctcacctgccatttatggctcttgccgtttatgtcactgacagtttctgaggcagaagccgtatcatgtctaccacctgtgaggtccacacagtgtgtatcatttacctcctgaacctgctcaaggaagcagacctctgcttctccccatttgctagaagaaatcatgaatagtctgagtcttcctctctgacaagttagggcatggacttgacccagctttgtgccagagaacccaatatgagtgttgttggcagcttgccaagaaggactgtctttttcaagacatactggtttcatgtgacacctccatggatttttttccagcctctaagtcaccaacttgggaactgcttgtctcacgttgctttgttttt

SEQ ID NO: 237924 - DNA, 926 bp, Homo Sapiens
  misc_feature (898)..(898): n is a, c, g, or t
  misc_feature (902)..(905): n is a, c, g, or t
  misc_feature (909)..(909): n is a, c, g, or t
  misc_feature (912)..(913): n is a, c, g, or t
  misc_feature (915)..(915): n is a, c, g, or t
ctttytctcagcaaacctatgctgttcmaccyccgctscctctgccagggtttgagtctcctgagggcccgccccatcgccytytsgcccccggcacccccatggcagggccgcagcgtggccagctccaagctctggatgttggagttctctgccttcctggagcagcagcaggacccggacacgtacaacaagcacctgttcgtgcacattggccagtccagcccaagctacagcgacccctacctcgaagccgtggacatccgccaaatctatgacaaattcccggagaaaaagggtggactcaaggatctcttcgaacggggaccctccaatgccttttttcttgtgaagttctgggcagacctcaacaccaacatcgaggatgaaggcagctccttctatggggtctccagccagtatgagagccccgagaacatgatcatcacctgctccacgaaggtctgctctttcggcaagcaggtggtggagaaagttgagacagagtatgctcgctatgagaatggacactactcttaccgcatccaccggtccccgctctgtgagtacatgatcaacttcatccacaagctcaagcacctccctgagaagtacatgatgaacagcgtgctggagaacttcaccatcctgcaggtggtcaccaacagagacacacaggagaccttgctgtgcattgcctatgtctttgaggtgtcagccagtgagcacggggctcagcaccacatctacaggctggtgaaagaatgagagactcggggagcagggaggggggaagagacgtgtgtgcaggaaacggggacgtggggaggggacctgcaggggcagccccctgaagtgccaagagagctgagaggagcagttgtgactctacccaggnacannnngtgntgnncntgagtcccaac

SEQ ID NO: 237925 - DNA, 859 bp, Homo Sapiens
  misc_feature (178)..(178): n is a, c, g, or t
  misc_feature (180)..(180): n is a, c, g, or t
  misc_feature (184)..(184): n is a, c, g, or t
  misc_feature (256)..(256): n is a, c, g, or t
  misc_feature (264)..(264): n is a, c, g, or t
  misc_feature (639)..(639): n is a, c, g, or t
tagctgggattacaggtgtgcgctaatttttgtatttttagtagagatggggtttcaccatgttggccagtctggtcttgaacttctgacctcaagtgatctgcccgcctcgccctcccaaagtgctgggattacagttgtgagccaccatgcccagcctatagctgtaccttctgantncaanctcaattcaacttagaaagtaatkdtatttcccattytggtragtaraataaggtaggacactgctctaggncattattnctttttwtgcaaaggaggatgagatattctggtgggacttgratctgracagtaggaggctacctttcctcatctccagcttctgcctttttttttttgaggcaaggtcttactcagttgcccaggctggagtgcagtggcatgatcttggctcactgcagcctccgcttcctgtactaaagcaatcctcccaccttagccccccaagtaataatatatgggacmacasgcacacamtatcatrcctagctaatttttaaatattttttgtgggracagshthtcaccatgttgcccaggctggtctcgaacvcctgggctcaactgatccaccaactttgvcctcccaaamtgttcagattacaggtgtgagcngctaccatrcctagccccagcttctactgcytgaggctmtctttggcatctccacacatcakccttagcagcccagactgcatttctgtagcaacctcttccchggtctcttctttcagtctctctgcctctaatccagtggctttaagaattttttgactgttacttccagtwwtaaatwtaattttcatttttaccttttaaatatttttttatattt

SEQ ID NO: 237926 - DNA, 932 bp, Homo Sapiens
  misc_feature (929)..(930): n is a, c, g, or t
ctgaggaccccagggcagcactggaaattgctgctggagcctggtgaagtgtgggtggtgagactccaagatgcaccccaagagcaggacctgcactggtggatgctgagcattctagaaacatcgttaacaggacacagggcagagctggtccctgcagcctcagccctgcagaagaggattcaccatagtctcttattcaccctggaccaacagggagagcaagaagggagactcagcctgtaagccacagtcctccagccaagaacaggatctcagcacccctgagacacagagcaggggtcctgaggaaagcctggctgttgcaggagcctcggccatgggggagctgccctgtttccagcctcagtccagggccccagaactgagagactaaggctcatgtagctgccattgtcctgggcacaccaggacatcagagactgggaagggctctgcaattgctgttccacaacagccaggggagcagttggcaaaggaaacatggggagcaactttaggggctgggagatagggcctgttgtggcctcagagggaagcattacaaatattcataacctggaaacaagttcttaccagttgattgtcacatagttctggatgtgttggcctgaatggctgttgtgctgcttgtgacatggggggcagggcacagaacttgtgcctatttcaccttggccatggggagggacattgcttgtaaaacacatgctctgcagaacacaccagaatctgtggtgacctggatgtgttctcgactttgccaggacaatctcaggggtgccacaagaccctgtcagcagcactaggatctctggtctacagtggagggagagctggttttaaatgttggccgttgatgcaatttaaccatttaattcctgttgctctatatgttgtttttaagnnta

SEQ ID NO: 237927 - DNA, 970 bp, Homo Sapiens
  misc_feature (944)..(944): n is a, c, g, or t
  misc_feature (958)..(959): n is a, c, g, or t
  misc_feature (962)..(962): n is a, c, g, or t
gcgctcsgraccytgrtsagtcctgctgcagkctcgccccgaaacaaggtggacgccaccctttcgcggctgytggagcgktaccggggccccgrgcyctttkacacggtggagatgttcgagggcgaaagagttctttgcggccttcgagcgcggcatcgacatggatgctgaccgccctgactgtgtggagggcagaatctgytttktcttctactcgcacctgaagaatgtgaaggaggtatacgtgaccaccactctggaccgggaggctcaggctgtgcggggccaggtgtccttctaccgtggcgcggtgcctgtgcgggtgcccgaggaggctgaggctgcccggcagaggaagggcgcagacgccctgtggatggccactctgcccatcaagctgccgagacttcgagggtccgaggggccacggcggggggctggcctctccttggcacccttgaatctgggagatgccgagaccggctttctgacgcagagcaacctgctgagtgtggctgggcgtctgggtctggactggccagccgtggccctgcacctgggggtgtcctaccgggaggtgcagcgcatccggcacgagttccgggatgatctggatgagcagatccgtcacatgctcttctcctgggctgagcgccaggctgggcagccaggggctgtggggctcctggtgcaggccctggagcagagtgaccggcaggacgtggctgaagaggtgcgcgcagtcttggagctcggccgccgcaagtaccaggacagcatccgacgcatgggcttggcccccaaggaccccgctctgcctggctcctcggctccacagcccccagagcctgcccaggcctaggccccacagacttttaggctggcccagatattccccagtggatagacaagaammmmmamaaaaaatctctccagtgtgngggacggtccctgnnahnamaatact

SEQ ID NO: 237928 - DNA, 904 bp, Homo Sapiens
agagcttcctgatgcascacctgggaaactgagaattgtcatggagatgtcttgacatttaaggtagaaaaggctttttcagaaagtcttaaaagaccctgggaagatgatccyccaaatgtacatattattggaawtctgccttttagtgtttcdactccactgattatcaagtggcttgaaaatatttcctgtagagatggaccttttgtttatggcagkactcagatgactttgacttttcaaaaggaagtggcagagagacttgcagccaatacaggaagcaaacagcgtagtcgcctctctgttatggctcagtacctctgcaatgttcgacacatctttacaattccagaacaagcttttgtccccaaaccagaggtggacgtgggcgtggtgcacttcactcccttgatacagcccaagatagagcagccattcaagctggtggaaaaagtggttcagaatgtatttcagttccgaaggaaatactgccatcgagggctcagaatgttattccctgaagcgcagcgcttggaaagcacgggcaggctgttagagttggcagacatagaccctactcttcggccccgccggctctccmtctcacactttaagagcctctgtgatgtatacagaaaaatgtgtgatgaagacccacaactctttgcatataatttcagagaagaactcaagcgaagaaaaagcaaaaatgaagaaaaagaagaggatgacgcagagaattacagactctagctgctgcctgggggcgagcagcctaccagatgtcgatttgcctacgtggagcttcttatataggtactcttttgtctttacagaatgacgatacaaatgccaatgaccagatgtgacttattttccttttactatacagcttggcaga

SEQ ID NO: 237929 - DNA, 1000 bp, Homo Sapiens
agrgctgtackraaccattwttcttctatttgywattgcaaagcttgtatctccctacatgarkggcagaaccttttcacatttarctacccytctaccttttgaagtgattkgcagtvactcatctgagacagcatcagtatttgactaaatcattkttcacaactgaatagtcttgttcttttagtagcaatgaaatcctaagctcttgaggccattcacctgccaacctgaccatactgctttcaaaagtcttttctcatcagtagaatctattttggtcacttctagtcaatgaaaaatgtaaacttttaggagagaatgtttcctagaactcacccactccattcaatgttacatataaaatagtgtgatcaatcacaatgtccatctttagacagttggttaaataaattatctggtctttgaaaagaccgtgctgggcgcggtggctcttgcctgtaatcccagcactttgggaggctgaggcgggcagatcacctgagatcgggagtttgagaccaagcctgaccaatatggagaaaccctgtctctactaagaawacaaaattagctgggcatggtggtgcatscctgtaatcccagcwacttgggaggccgaggcaggagaattgcttgaacccgggaggcagaggttgcagtgaggtgagatagcgccattgcactccagcctgggcaacaagagcaaaactctgtctcaaaaaaaaaaaaaaatgatggagctccgaatgtgcttaagtggaaagatatctatgaaatatggtggttttttaaaacacraaaattatagaatatgggatcccgtgtgtgtgtgtgtgtgtgtgtgtgtgtgtgtgtgtgtgtgtgtgtgtgtgtgtgtttgaatgaaaaatgcttatgtattgacagaacacttctagaatgatacccaaactcctggagtgggagtggggaatgccttctacgtacacaskgttctactgtttgaattttttaatat

SEQ ID NO: 237930 - DNA, 935 bp, Homo Sapiens
  misc_feature (896)..(898): n is a, c, g, or t
  misc_feature (902)..(902): n is a, c, g, or t
  misc_feature (905)..(905): n is a, c, g, or t
  misc_feature (912)..(912): n is a, c, g, or t
ccaatggtggaggcagtacttctgatacccaggaagacattctggatgagtgactgtgtaacatggtgttggccccactcccagatccgggacccccaagcctggctgtagcccctgagccctgccctcagcccctgcggagccccagcttggacaatcccactcccttcccaaacctggggccctctgagaacccactgaagcggctgttggtgccgggggaagagtgggagttcgaggtgacagccttctaccggggccgccaagtcttccagcagaccatctcctgcccggamggctgcggctggtggggtccgaagtgggagacaggacgctgcctggatggccagtcacactgccagaccctggcatgtccctgacagacaggggagtgatgagctacgtgaggcatgtgctgagctgcctgggtgggggactggctctctggcgggccgggcagtggctctgggcccagcggctggggcactgccacacatactgggcagtgagcgaggagctgctccccaacagcgggcatgggcctgatggcgaggtccccaaggacaaggaaggaggcgtgtttgacctggggcccttcattgtagatctgattaccttcacggaaggaagcggacgctcaccacgctatgccctctggttctgtgtgggggagtcatggccccaggaccagccgtggaccaagaggctcgtgatggtcaaggttgtgcccacgtgcctcagggccttggtagaaatggcccgggtagggggtgcctcctccctggagaatactgtggacctgcacatttccaacagccacccactctccctcacctccgaccagtacaaggcctacctgcaggacttggtggagggcatggatttccagggccctnnnaganctnamcctcnctcgctcatgttcttccaccccc

SEQ ID NO: 237931 - DNA, 947 bp, Homo Sapiens
  misc_feature (918)..(918): n is a, c, g, or t
  misc_feature (944)..(944): n is a, c, g, or t
ccagagatgcccaagtcgcgcaagtaccagaagctcaggcccaggctycttgttgtcckgtkksccckggtgcgtgccaaccckccgkccaatgtcacctggatcgaccaggatggsccagtgactgtcwacacytytgwcttcytktttttggatgcgcagaactacccctggctcaccaaccacacggtgcagctgcastccgcagcctggcacacaacctctcggtggtggccaccaatgacgtgggtgtcaccagtgcgtcgcttccagccccaggcccctcccggcacccatctctgatatcaagtgactccaacaacctaaaactcaaccacgtgcgcctgccacgggagaacatgtccctcccatccaaccttcagctcaatgacctcactccagattccagagcagtgaaaccagcagaccggcagatggctcagaacaacagccggccagagcttctggacccggagcccggcggcctcctcaccagccaaggaagaagaaatcaggacaaagacgcatcacagagggaagaccatgggaagacacagaagatggccaagaagagacccctcagaagaaatcaatcttggtggggcgtggtggcttcacgcctgtaataccagcactgtgggaggttgaggtgggcagatcgcctgagcctaggagttcgagaccagcctgggcaacatggtgaaattccatctctacaaaaaaattagccgggtgtggtgttgagtatctgtagtcccagctacttgggaggctggggtgggaggactgcttgagtccagcaggttgaggctgcagtgagctgagattgagctactgcactccagcctgggcatagagtaataccctgtaaaaaaaaaggaaggaagggagggagggaatcaaccatgccaacaaatngtcttgactactactggcactagccncca

SEQ ID NO: 237932 - DNA, 1000 bp, Homo Sapiens
  misc_feature (971)..(971): n is a, c, g, or t
  misc_feature (978)..(978): n is a, c, g, or t
  misc_feature (984)..(984): n is a, c, g, or t
ccaccactgtkccctttcaagaacgggggagtattttgcttctggaggctctgatgaacaagtgatggtttggaagagtaactttgatattgttgatcatggagaagtcacgaaagtgccgaggcccccagccacactggccagctccatggggaatctgccagaagtggacttccctgtccccccaggcagaggcaggagtgtggagtctgtgcagagccagccccaggagcccgtgagtgtgccccagacactgactagcacgctggagcacattgtgggccagctggatgtcctcactcagacagtctccattctggagcagcggttgacactgacagaagacaagctgaagcagtgtctggagaaccagcagctaatcatgcagagagcaacaccatgatcaggggagcaggaatcaggagctcggtggatttgcaggtggcaggccagggatttgtaccatgggacttgggtaaataaaggggactgaactctgtgggaatcacatccatactggagccctggatttttgcagttctgccctccaccttgctatctgcaccaggaggctctccacctggcagccagaggtccccagtgggccgggctcacacacaaatgatgcttcagacccgaatgagaggaccacattttgcttaatgtaaaggagccacttgaaaatgtctgctcttcggggtcctgagattgtggctccccctctggaggaggtggctccacgatgccttgattttcactcatcatttggacatgtgactggcttttcctacctctgccatggtgtagaaattgattgcacattgattggatgagccgggggttttctctaaatctgactaaaggcccaaagtgggcccatctgagtcaggtttgttgagaacaagccctctcaagtgggtggtggcttttcagtggccctgatttctgttccacacgtgttcactggagcnaggtgantcctcnttgcgtgagtgaggca

SEQ ID NO: 237933 - DNA, 1000 bp, Homo Sapiens
  misc_feature (569)..(569): n is a, c, g, or t
ggyccagtrgtctatgcrscatwtttaaaaatggagcacagtgacgrgaatattcaatyctggwggccatgtgaaacctataagaaaaattccctcacggtggagcagaatttctagggcaaagaagctttataagattaacatccagccacagycccctagagagattaacattgacagttcgacaagagasactatcatcaggaacattcaggaacccactgaaacatgttttgaagaagctcagaaaatagtctatatgcatatggaaagggattcctaccccagatttctaaagtcagaaatgtaccaaaaacttttgaaaactatgcagtccaacaacagtttctkactacaaytcaaaagtttaaatagaaaacagtatattgaaagtggtgggtttgatctttttatttagaaacccaywaaatcagaaacacagtacaaataaaacagaaatcaaactataagttgacttttagttcctaaaaagaaacatatttcaaaagcaatggaatctagaattcttataacatgaataacaaaatgtacrgcaagcctatgtagtncaattaatatataaggaaaaggaaggtctttcttcatgakacaagcattataaagtttttactgtagtagtcaattaatggatatttccttgttaataaaattttgtgtcataatttacaaattagttctttaaaaattgttgttatatgaattgtgtttctagcatgaatgttctatagagtactctaaataacttgaatttatagacaaatgctactcacagtacaatcaattgtattataccatgagaaaatcaaaaaggtgttcttcagagacattttatctataaaattttcctactattatgttcattaacaaacttctttatcacatgtatcttctacatgtaaaacatttctgatgattttttaacaaaaaatatatgaatttcttcatttgytcttgcatctacattgctataaggatataa

SEQ ID NO: 237934 - DNA, 663 bp, Homo Sapiens
ttaatacattccccaacccttccaagatcccccatcaattcttggttaaaagccaatttccccaatacaaataaaaccttgcatttcaatccttaaaggtccgtgtttgacccgatttttcttgaattctgaaaaaagagctcggaatacaaaaagctgtcccatggtcctttgcccttgtgaaaaagcagaaggtccattgagctggttaacactccagctgtctgtggtggccaagctgaaagagctttgtaacactggggttgcaggcacccacctctagacgctaccgcagagccagagcccaaagccctcaccccggcctctgcacttgcccatctgcgtgctccccctctcgcaaggggtttctgcagagggggctactgaacaggtgagccacacccctgtcgcacgccctgcaaggggaatcagggaactcttccgtttcattgctttgaccacatcctataaatcttgttctccttgtctttcagctccaatttgtttatacattcagtttttacttttgactttactcatgatttattatagaaagatgtttaacaattttcaagcaaatggaataatttttgctcctctttcgttgttaatttattattcattggagttagaaaattgtgctaaaataattcgcattttaaa

SEQ ID NO: 237935 - DNA, 903 bp, Homo Sapiens
tggggccgcgcaatgtgttttaattaagccaagggaaattcaaggggcccccaagccccaaagaatgggttaaggcacctttgggttccagtgtggtgggcagcttggcacctcaagcttccaaaaggaaaaagggctgggccaaggttcactggacttccagccctttctgctggtccgagtcagggcccaggtgcagctctccggtggacacaaaatgcagccatgctgagggcagccggagccaaggccctgagaaagccttcagccgggcttctccatgtgcctggaacgtgtgtgtcaccaggaagggcccccctgctggcctctgacagtagctcctctgggggctcccacagcgaggatggcgaccagaaggcagcgagtgccatggatgcggtgagcaggggtcccggccgggaggcccccccgctgcccacagtggccaggacagaggaggcggtcggcagggtcgggtgtgctgacagccggctgttaagccctgcctgccccgcgccaaaggaagtgactgctgccccagccgtggctgtgccccccgaggctactgtggccatcaccacagcactgagcaaggctggccccgccatacccaccccagcagtctcttctgcactggccgtggcggtccccctagggcccatcatggcagtcacagcagccccagccatggtggccaccctggggacagtgacaaaggacgggaagacagatgccccgccagaaggagctgccttaaatggcccagtgtgatgctgctgccgcccggccacggcccaccctggtcaggctgcctccttaatcgagaaaactacctggtgatgcaatctttttttttttaatttaatttaattttaaaataaatgctgcatggtaaagcggcag

SEQ ID NO: 237936 - DNA, 878 bp, Homo Sapiens
agcccagaaaaccgcggccaattgcccgtcttacattttcccgcgaagaagtgaaccacggggacatgtttttctttaccaaatgagggagaaaggcatatttaaacagaaaaaagggccggaaaaaggattccgggcttatgaatcccttttttcctttaggcaagaaagtcagaagcaaccaagggcgggccagaaaaagaaaggcttaccatttagtattccttggcccaacaacggcccaaatttcagtgtaaaatggtgccccctgtaggggcgcagccagaaaattaactggccgatgggaaaaaaaccagatgacaggaagctggggaatcacctcgcttcataggcagagcccgccctcctgggccctaggcaaactctccaggattgtccacaaatgtcctcagagggtccctaggtgggtcaactccaaggcaaatgtccaagcatcagcaagacaatgacactggaagggtccggcttggctagtcacatatcaagtcccgaggcagcaacaggaccaggagccaggtgtcctgactgtcctacaatatcattttcctgggagtgggagtcaagtgtgcctgctatccagccgcaaatccataccccctgccccagagaagcctcagtccctccctcctggctcacagccaccacctggatggatctgctccatgcagatctagccaggcctcccgcatgctgcctgcctccggccctgccccacacaggcctggcccagccagcaggttctctcctgtgagctccccaatccaacccatgcatggcctcccagccacccggatctccaggcccagcctggccccaaatgttctttcctttcatcctcagcaagtgcttagtcctgt

SEQ ID NO: 237937 - DNA, 857 bp, Homo Sapiens
ttctttgtttgctttattactaacttccattttctagttactcttaaatgctgccttcacaaggttaatttggctgttaatagtgattagaatttttatcacttaattgataattttaagcctactaactagggttccctatgaaattgaaagtaaaagtctaagaataatgcctgctggctctcgagatacttgccctacttaaaaatctataatttaaaattaattctatgtctacaattattaaaggaagtaaagttatttgggttcttccactcacccttttctcaaaaacaacaacaaaaaacaaaactcattttatttttctactttatagtaggcctgacagaaacatagtgaagcaatctgggaggcaacctgtggtagattttatgctaaatgttaatgtaacctctgttgattttttaaaaatgtgtttatatataagatttgaaataaaaactttaatacaggctagaataaggaattttacaaattctctttagagcaaccaacattaaagttttagagttgaattttgctctatttcaactcccttacctctctagttttcagtttatattaagttttaataactttgcggggccctgcaaattaataatctacatgaagtatattattagagggaaactaatcttactgctaagcagtgtgttgtactacatagtgaatgttcgtgttttggaatttaaaaattatttaaggtaatggtgttacgaatggtttaaaaatgtctggtgacttgcttatttttaagtgatcaccattaagtcagaaaaatgtatttttaaatgtttcttgaagtgccttttgaacatttcaaacagcggatttaa

SEQ ID NO: 237938 - DNA, 1000 bp, Homo Sapiens
  misc_feature (991)..(991): n is a, c, g, or t
  misc_feature (995)..(995): n is a, c, g, or t
  misc_feature (998)..(998): n is a, c, g, or t
ccccttgaagtgtcagacagtgatggccagcttccttcccttcaagctccagccaaagccagcttccccctggagctsccctccaaagatytggggatcctgagggccagaatccctgtttcctgcgctccttcgtccgtgcccacgactccgcaggggaaggcagtctggggagcagccaggccctcggggtctcctctggactgctgaaaacacgcccctccttgccagctaggttggaccggtgsccattctcagacccagatgttgaagggcagcttcccaggaaaggaggagaacagggaaaagaatcactggtgcaatgtgtgaagacattttgctgtcagctggaagagctgatctgctggctgtataatgttgcagatgttactgaccacgggactgcagccaggtccaatcttacaagtctcaagtcttctctgcagctttaccggcaatttaagaaagatatagatgaacatcagtctctgacggagagtgtcttacagaagggggagattcttcttcagtgcctgttggagaacaccccagttttagaggatgtccttgggaggatcgcaaagcagtctggtgagctggagagccacgcagatcgcctgtatgactctatcttggcctctctggacatgctggctggctgcacccttatccctgacaaaaagcccatggcggcaatggagcacccatgtgaaggggtttaacctggcatcttctcaggcagaggtgcaacctgtcggccaaacactggctagtgagaaaaaaaaaccttcaagaagtccttgcaagagccattcaacactgaagtcaagggggaaaccttcaatatactagctttaaaatgcctttctcctccctgaatggagggctgagttactatttttatttacaatgaagcctgccaractaaggtttscsttgtggtgcttctccacaaagagcgtgtakctttgbtatttttgataaawtaagncttnttnct

SEQ ID NO: 237939 - DNA, 1000 bp, Homo Sapiens
gctccctgggtacagcagscckttgkgmaccttactcccsgggcatgracagctgtgaagtcwtgtgctgtgggagaggctacracacctcccatgtcacccggatgaccaagtgtgggtgtaagttccactgtgtgtgcgccgtgcgctgtcagaactgcctggaagctctggatgtgcacacatgcaaggccccccaagaacgcttactgkacaaccgctacatkaccccwgcaggcgtcaccatccaccttcccttctacaagaactccattggatctgcaagaacactggacctttgggttctttctggggggatatttcctaaggcatgtggcctttatctcaacggaagccccctcttcctccctgggggccccaggatgggggggccacacgctgcacctaaagcctaccctattctatccatctcctggtgttctgcagtcatctcccctcctggcgagttctctttggaaatagcataacaggctgttcagccgggagggtggtgggcccagaccactgtctccacccaccttgacgtttcttctttctagagcagttggcmaagcagaaaaaaaagtgtctcaaaggagctttctcaatgtcttcccacaaatggtcccaattaagaaattccatacttctctcagatgggaacagtaaagaaagcagaatcaactgcccctgacttaactttaacttttgaaaagaccaagacttttgtctgatcaagtggttttacagctaccacccttaggggtaattggtaattacctggagaagaatggctttcaatacccttttaagtttaaaatgtgtatttttcaaggcatttattgccatattaaaatctgatgtaacaaggtggggacgtgtgtcctttggtactatggtgtgttgaawctttgtaagagcaaaagcctcagaaagggattgctttgcattactgtccccttgatataaaaaatctttagggaatgagagttccttctca

SEQ ID NO: 237940 - DNA, 810 bp, Homo Sapiens
caggagtagtgccaagaaaattctagtggtatgtcacagacatagtgtggaccctgtcctattcttgggaaaagacagctgtttgtgttgggacttcaccaatgggcgaggtgcttcggggtgaaccgaagtggctacacacttataaggaaagatagtgaggaagaagtttctgtgctgggaagccaagatatagaagaggggaatcgccaggtggaagatggatgtagaggaatggcgtgtgaagagtttaattttggagaaatattaatggcccaagtaatccattccatcgaggactgtctgggatgcatctccaacgccgcctcctacctgaggctctgggcgcttagcctggctcacgcacagttgtctgatgtcctgtgggccatgctgatgcgcgtgggcctccgcgttgacaccacctatggcgtcttgctactgctcccggttatcgcgctctttgcagttttgaccattttcatccttctgatcatggaagggctttctgcgtttcttcacgccatacgcctccactgggtagaatttcagaacaaattctacgttggtgcaggcaccaaatttgttcctttctcattcagtctactttcatcaaagttcaataacgacgacagtgtggcatgatcatattgctgtaaccaacaagctttcagatttatggagaatgaccatgttatagactttcacttatgtcagatttatgataggaaaaattccatcttcattactgccttatgacatagccaaataattctgtaagatatacctcttcctcatatgttaaatttt

SEQ ID NO: 237941 - DNA, 1000 bp, Homo Sapiens
aacarattatttktgcttgtgaagakgagtcctgagccagagcacagttctaatgctggacagatctggastgccctggaaggagaaactttcttggtgtgcagtcactcctagagcggcagtggagatgacccctgagaagttcagtgtcttaatggagaagctctgtaaaaaggggctggcagccaccacctccatggcctatgccaagctcatgctgacagtgatgaccaagtatcaggctaacatcactgagacccagaggctgggcctggctatggccctagaacctaacaccaccttcctgaggaagtccctgaaggccgccttgaaacatttgggcccctgaccatccaccaagggaccaccctcttggtgctccatcaccagcttcctgaagggcatttctttcttcaccaccttgtcttgagccctagcctgaggataaaggctgagcctggccatcccagattgcaactgcctccctgttacaggctgcatagggaatattggcttcccagccagcagggaggctcctgggctaagggagctcagctatattttctttttcatttcttttgtttttgagagaaggtattgctctgtcatccaggctggagtgcagtgatgcgattgatcatggctcactgtaacctctgcctcccaggctcgatcctcccatgtcagcctcccaagtagctgggactacatgcacatgacactatgcccagctaattttttattttgtagataatatgctggtcagggctggtcttgaactcctgagctcaagtgatcttcctgccttggcacccaaagtgttgagatttacaggtgtgagccaccacaccaggccagagctatatttccaaaggctgctggccccaggcacactcctcatcaattctcaggctgcagggacaaactttccgatagggctcagtaggatcaagccgacccagagtgggcatgggatgctccaggaggtctggggtaccag

SEQ ID NO: 237942 - DNA, 1000 bp, Homo Sapiens
aaatggtdgcaacmccatcmggttgkgaaaatggmcckgagarkcgatatctgactctytakagcatatttttttaaacaktatatcagaccttraaactcacaactttacgacatctataacggraaagargccttggactagatataaatatggattcaaggatcattcatgaaaacatagtagaaaaagagagagtccaacgaataactcaagaaacatttggagattatcctcaaccacsaactagaattkgcacaatataagcttgaaacgaaattcaaaagtggtttaaatgggagcatcttggctgagaggaaagaacccctccgatgcctaataaagttctctagcccacatcttctggaagcattgaaatccttagcaccagcgggtattgcagatgctccactttctccactgctcacttgcatacccaacaagagaatgaattattttaaaattagagataaataasacgtgcgtggtttcttaagcacagctcctccttcttgatattgcacatgcacttcagttcatggctagctgtatagcttccgtctgtaaacttgtattttcaagaatccttggtattgaatttttagaaaggctcacataattgttgggactgattcattcctccacgatatgcctcctctctctgatatcctgctaactgtagccgttgtggcatttgagatgacaggatatatatatatatggccccacacttgaccttgagtgcctgaatgctctgaaatcaagcatatggcacagcgctcaagacttttgggtttgtgtccttttttctatggctgtctcttctcaattctggagaggtctggttccagtggctggtttccagggattgattcttaagctctggatcacagagagaagcaacaaggaactatactcaactcaaaactttttaggagaatcatgaaattggtctattcaaaggatggagttgagtccattctgttattgttgcaagagg

SEQ ID NO: 237943 - DNA, 878 bp, Homo Sapiens
ggtgcccatgaagatcaagccgggcttttccttggcaactgtttcggccgtggtgccccccaaagataacaagcacttggttcaagccccctcctggggccgcccagccaccgagcggaaagaagagaaagcggggtgagcgatgacgtaccagactgcaaagtcctaaagccttgttgagcggttccatccctgtggagcagttcgtgcagaccctggagaagcatggcttcagtgatattaaggtggaggacacagccaagggccatatcgtcctgctccaggaggctgagacgctcatccagattgaagaagactcgacccatatcatctgcgacaatgacgagatgctcagagtgcgactgcgggaccttgtcctcaaattcttacagaagttctgagtgggccatctgagctacttccctgaaatcctgcagtccctcactggctgccctcacaagccacctgaggagtggcatgagaggccattaactgtgtctttgtggtgtcctctggcttaaggagtgaagaggtggctcttgagggaaatggtctggacttattcccagcactgtttcaggcaagaactttccctttcaacttcaggctcattttcttctcaactctggctctctcaaggagctggagggtggcagaagtgggacaggagaagttttccaagaggttcatgggaggcggaggtgactggctggctgtcttgcatcagtcccaggcctcggccaggggagccagcctttggtttcgtttacttgcctacagtgctgtacgcaataagatgatgatcccaaaatatggtaaagtgaacccatctgtctgcattttctactctgagcccattgttaataacacttttttta

SEQ ID NO: 237944 - DNA, 996 bp, Homo Sapiens
  misc_feature (989)..(990): n is a, c, g, or t
  misc_feature (994)..(994): n is a, c, g, or t
gtccccgmgcgtstcgacgcagttcacgacggcrcgastcgaacygctcsttcgcgacgamgtctaccccraccstgcgtgccgtgtgktcstcgtgaartsgttgttygacgacgcacasstgaccstcgaacaacgtgtacttgacsskcgagcccgtgcascgacgcstgcssctstacatccagaacctcgsccgcmgastgcgccacacactcaaggacgtgccggccagyttgcccccgcstgcctctcccatgagatcatcatccggagccactggacggatgtccaggtgaaggggacgtcgctgccccgagcactgcactgctgggacaggagcctccatgacagccacaaggccagcaaaacccccctcaaagggctgccccgtccacctggtggacagctgcccctggccccactgcaacccctcatgccccaccgtccgagaccagttcacggggcaagagatgaacgtggcccagttcctcatgcacatgggcttcgacatgcagacggtggcccagccgcagggactggagcccagtgagctgctggggatgctgagcaacggaagctaggcagactgtctggaggaggagccggcactgaggggcccagacacccgctgccccagtgccacctcaccccccaccagcaggccctcccgtctcttcgggacagggccccagccgtcccccctgtctgggtctgcccactgccctcctgccccggctttccctgcccctctcccacagcccagccagagacaagggacctgctgtcatccccatctgtggcctgggggtccttcctgacaacgagggggtagccagaagagaagcactggattcctcagtccaccaggctcagacagcacccaccggcsccacccrtcaagcccttttatattattttataaagtgacttttttattactttaattttttaaaaaaaggaaaataagaatatatgatgaatgatgnngtcntg

SEQ ID NO: 237945 - DNA, 896 bp, Homo Sapiens
ggtcaaaagactcacggacaaatggcattgagaccacgggctaacttggaaggtctgcaaattgaaacaaggtggtacctttaaacaagcttaacatggccgacaaccaagaaaacgtagtggatgtctgaaagcttggagattccaagtaaatgcagagaccttaaagaggtgttcacagccctggctcagagagctcctaggtctgggcttcccgaagggctgcagctcttctctccttcttctttccttgtcacctgcaacgtgactgaagtgaaatcagaaaaaggcccaggttggacgatcctacgtgatgatttcatgatgggagcatctatgaaagactgggacaaggaaagtgatgggccagatgacagcagaccagaatctgcaagtgactctgatacataaagcatcataggaaatacaattgcagtcgttttattttttctagaaaaatatgtcatcctctgatagttggggaattataaggataccatttgtaagaaagccaaaagacttttgccagatttcatatttccccttttcatgtacactttatatatacttcattaaaattatattttaaacccttgtataattttaagcattgttcctcagaacatttgtaaaaggatatatttctgcttgaccagcgagatgtgcattttgccaggatcatattggtcatgtctattggtgtattatttcagtatcaccaatgttttcagaaatacagtactaattcatcattaaactctttgaagttaatatttttctgccttctaacttatagactcaactatgtatctgtagtttttgggaaatggttggtgttttttgctttgtgttgggaaggttattgagaaaaccatatataataaaatttaaaatta

SEQ ID NO: 237946 - DNA, 860 bp, Homo Sapiens
agagtccccagaattcttctttaggaagtcttccagcaccaccaattccatattggagttttgggtgcatccctgccagaccttttaacaggacagcctctctttccctggagaggatgaaggaggcccagttggcctgcatgatggagcttctagggattccacccaccaaaacttctggagcaattcaaacgtgccaagtactttattaattccaagggcataccccgctactgctctgtgactacccaggcagatgggagggttgtgcttgtggggggtcgctcacgtaggggtaaaaagcggggtcccccaggcagcaaagactgggggacagcactgaaagggtgtgatgactacttgtttatagagttcttgaaaaggtgtcttcactgggacccctctgcccgcttgaccccagctcaagcattaagacacccttggattagcaagtctgtccccagacctctcaccaccatagacaaggtgtcagggaaacgggtagttaatcctgcaagtgctttccagggattgggttctaagctgcctccagttgttggaatagccaataagcttaaagctaacttaatgtcagaaaccaatggtagtatacccctatgcagtgtattgccaaaactgattagctagtggacagagatatgcccagagatgcatatgtgtatatttttatgatcttacaaacctgcaaatggaaaaaatgcaagcccattggtggatgtttttgttagagtagactttttttaaacaagacaaaacatttttatatgattataaaagaattcttcaagggctaattacctaaccagcttgtatggccatctgaatagcattaagacttt

SEQ ID NO: 237947 - DNA, 928 bp, Homo Sapiens
tctgcasctcattccttrktcccggrgctggcaaggctkgagccccgcctgggtcaracgccagtgacagaagctgtgagtgragacgaggattgccatcgcctatgaggatgagggaagcggctgataccatgtggggctggagacatagatggacttatgaatggctgctaggacctttagtgctccctgcaccaacctcccatccccctgccaagatccttgaaggaccctggaaggagggagagcaggcagcccttcacaggataggatccgtctctgtcctgtcctggcactggcacaagctcagcacatgcccagtaatgcgtgttgtttggctgatggaataaagggcttagggacttccctgaggcctctggacccatctgtcttcctgagggcagcccaggacctttggccaatcccagttcccaggctgcagttgagggtctgtccttgtcaaaaggcaggtgctagacagtctagaccagggtttctcaaactcgtacttgacatttggggccagataattctttgttgtggggctgtctggtgtatggtagggtgctcagcagcatccctggcctctgcccactagacatcagaagcactcccccagttgtgacaaccaaaaatatctccagaccttggcaaatgttatctgtgggggaaaattgccctcaattgagaaccactggtctagctagacctgcactgtccagtacagtagccactaaatacatgtggctaaacttaaatttaagttaattaagattaaaagctcagtttctcagtcacattagtcattcaagtgttcagacagccacatgaggggacagtgcagctacaggatatgccatcatggcagaaagttctattggttggacagtgttggtctatactgactcttatttctcagggagatcac

SEQ ID NO: 237948 - DNA, 809 bp, Homo Sapiens
ccccggcccagggtccggatctgacaatggtccaccgccggtataaaaaaagcgcgtcatttacacatcaccaaagggaccagcaagctggttgcgcagcgccgcccaggttccacaaaacaacagttgaagggccggctcgacgagctcctaaaaaaacagacagaccgcgccaacgacctcgcagacaaaacgggcgcagccctttgcgcaaccgccgggaccctggcccctgtcgagtccagggccaaggcttgtgttcaatcgtgtgaatggccggcgggccccctccacgtccccatccttcgaggggacccaggagacctacacagtggcccacgaggagaatgtccgctttgtgtccgaagcctggcagcaggtgcaacagcagctggatggtggcccagccggtgagggcgggccaaggcctgtgcagtacgtggagaggacccccaatccccggctgcagaactttgtgcccattgacctagacgagtggtgggcgcagcagttcctggcgagaatcaccagctgttcctagtggctgctgggagggggcgctgctacacggccgacctgtcgccaggagagaagcatggcgccctgcccacccactgcgcctggctgggtgccggccacacctgaagtgccagcatttggacttttgcacctttttttcccttggcccggctgtcccaaccaagctgccatggccaagggccgaacccgtctgacctcagccctgctcactgtgcccagggaccagcgaccagcccctgggcggcagggaggagctccaggcaataaag

SEQ ID NO: 237949 - DNA, 866 bp, Homo Sapiens
ggcattaaaataaagttgtaaatggcaccaaatatttccacttaaatgcatatacagtattagagtccaaaactattttatccctctttgctgtttttcccccttctgcccactttactgggtgtgggggggcccgctaacaacagtcacaaatccagcgacctaggaaaaaaaattgttaatatagaatgaaaaattatctttacaggactgaattttaagcccatctaaactcttctgccttagctatcactaatgatattcctctctggattttgtggtgagaagggcactatgagttccttaatttaaggaaaaaatgtaaacttaatcaatgtaatcaatgccatgcaaaattcattgcaagtcaagggggatgggagagatgcaatgccatacggtgatacggacctttaagaaagtacaatctttcctgaaattcaaacactatcatacttcaaaaggtcaaaacccattccggaatttggcttttttaagactttttctctcctgctcactggcagctgtgtgtcttaacagcattctttcaagtcctggtgtactctgctgacagcactttaaaactttaacagcacaatgataacttgtactacatacttgatctgaattactacagaaaaataattatgttgcttgcttaatgattcccaggaaacttcgttgtaggcatatattttataagagtattatacagtgttaactatgcaagtaagttctaaaattacacaattatctgtgtaatgttttagtccaattactgtgatttattcaactctgttctaaagttatctggaattgtcatgctgcctcaatttacagaaatctataaagatgtctaagaaatg

SEQ ID NO: 237950 - DNA, 902 bp, Homo Sapiens
  misc_feature (11)..(11): n is a, c, g, or t
  misc_feature (14)..(14): n is a, c, g, or t
  misc_feature (68)..(68): n is a, c, g, or t
  misc_feature (82)..(82): n is a, c, g, or t
  misc_feature (273)..(273): n is a, c, g, or t
  misc_feature (451)..(451): n is a, c, g, or t
  misc_feature (484)..(484): n is a, c, g, or t
  misc_feature (493)..(493): n is a, c, g, or t
ctgacaaggtnatnaagcgaccgaaggtcactaagaattgggcgggtgtcgctcgctcatgataaagnagcctggggaggtnccgccttgttaaagaaaatgaggaattatgccgagtgatgggtagagaggccgattatagacggcggaatagtttattctgtgaaagaaaagtcgcaaagccaaaaaatgctaagggaaataggaattcaggggagtgataatgatgctttagtaactggagaacaggataaaaagctcagccgatgggancaggagcagataaggaaaggaattaatatccctcaggttcaagccagtcaacccgcagaagtgaatatgtactaccagagcacttaccagacaatgccttacggctcatcctatggcattccttatagttatacggcctatggatcatcagatggcaaatctcaaagaacagataatncagtccctttcaaaactcacagtaatgagatgnctcccgttnctattgattttgtaaagaaacagcttaaagacaggtagggcagatcaacttcttaaagacctgtccgctagctttctgttccctcaggcaacatgtagtctggggtagcagatgcagaatatcagcaaagaagattcactggcccagcttcaaaagctaaacagaagatgacttcatactttgttctgctaccttcttggattacttctgtggaagcctcgaaaaattataaaaaatgccactccatgatcttgttgaagacatttctgagtttgtacctcttggactctgaaaaagtgtagtcacgctatggggggaagaagcaagaacaagtgagattttggttagcccacaaaactgtaaatctgtaaactgccatttttgttttttagaaaaaaagcagtacaga

SEQ ID NO: 237951 - DNA, 1000 bp, Homo Sapiens
  misc_feature (831)..(831): n is a, c, g, or t
gatccaagtggaatcctcgaaramttkgtyttgaaagacttaggraagcgattgtgaaagtgtcaagcaacgcctccattkaaaggagrgcaggtacaccccgtggccgtgagrtgctraaagagacscctccccgagkrgcttcgagacckgtgtcagagktcaacgtctgaagcagktaaccacccacatgtcatcaaattgtatggggcctgcagccaggatggcccgctcctcctcatcgtggagtacgccaaaatacgcgcctctkcsgggcttcctccgcgagagccgcaaagtggggcctggcttacctgggcagtggaggcagccgcaactccagctccctggaccacccggatgagcgggccctcaccatgggcgacctcatctcatttgcctggcagatctcaccaggggatgcagtatctggccgagatgaagctcgttcatcgggacttggcagccagaaacatcctggtagctgaggggcggaagatgaagatttcggatttcggcttgtcccgagatgtttatgaagaggattcgtacgtgaagaggagccagggtcggattccagttaaatggatggcaattgaatccctttttgatcatatctacaccacgcaaagtgatgtatggtcttttggtgtcctgctgtgggagatcgtgaccctagggggaaacccctatcctgggattcctcctgagcggctcttcaaccttctgaagaccggccaccggatggagaggccagacaactgcagcgaggagatgtactgcctgatgctgcaatgctggaagcaggagccggacaaaaggccggtgttngcggacatcagcaaagacctggagaagatgatggttaagaggagagactacttggaccttgcggcgtccactccatctgactccctgatttatgacgacggcctctcagaggaggagacaccgctggtggactgtaataatgcccccctcccacgagccctcccttcca

SEQ ID NO: 237952 - DNA, 874 bp, Homo Sapiens
  misc_feature (696)..(696): n is a, c, g, or t
  misc_feature (838)..(838): n is a, c, g, or t
  misc_feature (840)..(842): n is a, c, g, or t
  misc_feature (844)..(844): n is a, c, g, or t
  misc_feature (846)..(848): n is a, c, g, or t
  misc_feature (851)..(852): n is a, c, g, or t
  misc_feature (854)..(854): n is a, c, g, or t
tcccaggagaagaraaamacgatgtggccmagamgctgctctgkgcttctgccascttgcaggrgahtytggmacctacgtctgcactactagaaatgcttcttactgtgacaaaatgtccattgagctcagagtttttgagaatacagatgcttycctgccgttcatctcatacccgcaaattttaaccttgtcamcctctggggtattagtatsccctgacctgagtgaattcacccgtgacaatactgacgtgaagattcaatggtacaaggattctcttcttttggataaagacaatgagaaatttctaagtgtgaggggaccactcacttactcgtacacgatgtggccctggaagatgctggctattmccgctgtgtcctgacatttgcccatgaaggccagcaatacaacatcactaggagtattgagtacgcatcaagaaaaaaaaaagaagagaccattcctgtgatcatttcccccctcaagacmatatcagcttctctggggtcaagactgacaatcccgtgtaagcgtgtttctsgsaaccsgcacaccctyaaccaccatgctcgctggtggacggccamygacmcccacatmsagagcrcchacccccgmmgccgcgatgaccgcaggagrccacrccaggaataytcagaaaatcacatgagaactacatysaagcgccantgattgttgagcctgtcacaagagaggatttgcmcatggatbctaagatgtgttgtccmtaataccckgagttktcagamacttcgcacvacagtyaaggaagcctcctccacgcccbmcctcvvvcmcgccgctggccccncnnncncnnnccnncntggcattggggggmacatgg

SEQ ID NO: 237953 - DNA, 767 bp, Homo Sapiens
tgagggcaggagaatctcttgaacctgggaggtggcagtgagctgaaatcacaccactgcacttcagcctgggtgacagagcaaaactccacctcaaaaaaaaaaaagattctacttttagaaattcagacctagatagatttgcatttggataacaaatccctacctatagccatgtggaagcagcttgtcactgtattttaactgtgtaacaattattgaaggcgaaaatagaagttgggtcatctttgaacacctaccttttatcaatgaatatttttagactgttcttcagtatctgagtcagagtttattgtaatttgttatttacaccaaggtggcatcttagtctaccttcagtgagacttgcgtttcaggggaggggcgtatgtgcatcctcggtctcagttatgtaaacggtctgatctgtaaaatagtggtagcacatgccatgtgggatagttggtggagatgatagatggagttaagcacagggcccagcctgtcagcagtagctactattattgttgcccatttcccctgcaactgaggtgagaggttttcctgagtttgaagctgactggcccacagttaaacgtaacagaccagtttttcagggtgtcagccaacctctattagtgttcttaagtacagtttctgttataaaagttcagattattccttgaaaatttggatctacctcccattattatgagtaatacatgcttatagtaaaaacaaaattgataaggaagattaatattaag

SEQ ID NO: 237954 - DNA, 596 bp, Homo Sapiens
ctactggcagcctttgcttactttaaagcccacccagaagagagctgccctgctgttcgtgtccagtgtctgcatcggcctggccctcacactgtgcgccctggtcatcagagagtcctgtgccaagaacttccgcgacttgcagctggggagggagcagctggtgccaggaagtgacaaggtcgaggaggacagcgaggatgaagaagaggaggaggacccctctgagtctgatttcccaggggaactgtcggggttctgtaggacttcatatcctatatacagttccatagaagctgcagagctcgcagaaaggattgagcgcagggagcaaatcattcaggaaatatggatgaacagtggtttggacacctcgctcccaagaaacatgggccagttctactgaaaaccacatgcatcttgatgcgatcgcactttctgaagaaggaaggatcccaaatgcccctccagttctggttcacctgtaccttctatgaaggagaattcgtcatgtcattcaacactcgtgaggccaggaagctataaagggatgttcaagctgttttctagcacatcccaaaaggatgggaagggaa

SEQ ID NO: 237955 - DNA, 975 bp, Homo Sapiens
caacakagtkkgaccctktctcaaaacaaacaaaaacaaaaaaatktgacttgcaaaaataatgcattggagttactgctctcttaatacaaatgctttgaattgtgtctctgcttgtcacccctggcctcttttacaccctggggcaatgtgccattgttagacaaggaggagatgtataccttccttttggaaaaaggatgactgtaaaagcagaaataagaaaagagaagctgtgcccacaacactaacatgcttttaggcaagtcaattttaggaaagagtttatatgaaactgaagatctgggaattgatcccttaagaacaaagtctgagtaccctttgaagtccactggtatacccgtgcctttttgcctactcctttttattcttacaacctactccaattgcacctctgtctccacaactcaattgaacatactttacaaaggccatcaatgacatgcacattgctaaacatacacaaaaaatcatgagcaagtagttacaagctttaggacagatataaaaagaaattctaacgcagaaattttatccaaagtttcatccattttataatcaatattagtaaaaaagaccaagacacatgggctgggtgcggtggctcatgcctgtaattacagcactttgggaggccgaggtgggtggatcacctgaggtcaggaatttgagaccagcctggccaacagggtgagaccccatctctacttaaaacacaaaaattagcagggcatggtggtgcacacctgttgtcccagctacttgggaggctgagacaggagaatctcttgaacctgggaggcggaggttgcagcgagccaagatcacgccactgcactccagcctgggtgacagactgagactctgtcaaaaacaaaaacaaaacaaaacaaaaagacttaagacatggagtacattagtttagggacaggtctcctgatctagccggctcca

SEQ ID NO: 237956 - DNA, 851 bp, Homo Sapiens
gacaagatgtcatgagsyccagccytsvatggagassccascwgctggcaggctgggsgkacsgggtstgyyagtragctccaagygatggktgcgagscaagcagtggsscaasagaaaccaasattscccaaagasccascgcctgaaggagttcctsccccagcccccacccctgttcctgccmcccctacaacctcaggccactgggagacgcaggaggaggacaaggacacagcagaggacagcagcactgctgacagatgggacgacgaagactggggcagcctggagcaggaggccgagtctgtgctggcccagcaggacgactggagcaccgggggcccaagtgagccgtgctagtcaggtcagcaactccgaccacaaatcctccaaatccccagagtccgactggagcagctgggaagctgagggctcctgggaacagggctggcaggagccaagctcccaggagccacctcctgacggtacacggctggccagcgagtataactggggtggcccagagtccagcgacaagggcgaccccttcgctaccctgtctgcacgtcccagcacccagccgaggccagactcttggggtgaggacaactgggagggcctcgagactgacagtcgacaggtcaaggctgagctggcccggaagaagcgcgaggagcggcggcgggagatggaggccaaacgcgccgagaggaaggtggccaagggccccatgaagctgggagcccggaagctggactgaaccgtggcggtggcccttcccggctgcggagagcccgccccacagatgtatttattgtacaaaccatgtgagcccggccgcccascca

SEQ ID NO: 237957 - DNA, 907 bp, Homo Sapiens
  misc_feature (889)..(889): n is a, c, g, or t
agtataagtcatagtagaacagaagatgaaacaaggactcagatttgagcatcaagaaagttacctctgaggatctcaagcgcagctatgtctgtcatgctagaagtgccaaaggcgaagttgccaaagcagcccaaaatgaagcagaaaggtaatagatgcggtcagtgatgaatctctcagctccaaattaacattgtggtgaataaggacaaaaggagagattgagaacaagagagctccagcactctkactgacggcatctaacccatagtaatgaatcaaacttaaatgaaaaatatgaaagttttcatctatgtaagatactcaaaatattgtttctgatattgttagtaccgtaatgcccaaatgtagctaaaaaaatcaacgtgagtacagtgagacacaattttgtgtctgtacaattatgaaaaattaaaaacaaagaaaatattcaaagctaccaaagatagaaaaaactggtagagccacatattgttggtgaattattaagacccttttaaaaatcattcatggtagagtttaagagtcataaaaaagattgcatcatctgacctaagactttcggaatttttcctgaacaaataacagaaagggaattatataccttttaatattattagaagcattatctgtagttgtaaaacattattaatagcagccatccaattgtatgcaactaattaaggtattgaatgtttattttccaaaaatgcataattataatattattttaaacactatgtatcaatatttaagcaggtttataatataccagcagccacaattgctaaaatgaaaatcatttaaattatgattttaaatggtatacacatgatttctatgttgatagtactatattattctnacaataaatggaaattat

SEQ ID NO: 237958 - DNA, 1000 bp, Homo Sapiens
tatgcakggctgagattktgacatktaraatgctcttatgaagtgcaatatagagatcataatgaaatgacatactccttaatgaagcaccartgcagtcatgtgaagttgcaagagtcttttagatcatggtgcagcatcaacactcattctaatgaattcaaagaaagtgctctaacacttgcttgctacaaaggccatttggatatggttcgctctctacttgaagctggtgcagatcaagagcacaaaacagatragatgcacactgccttaatggsggbttttttttttttwcatgtagaggtggcacgtttgcttttggatagtggtgctcaagtgaacatgcctgcagattcatttgaatctccattgacgctagctgcctgtggaggacatgttgaattggcagctctgcttattgaaaggggagcaaatcttgaagaagttaatgatgaaggatacactcccttgatggaagctgcccgggaaggacatgaagaaatggtggcactactcttagcacaaggagcaaatataaatgcccagacagaagaaactcaagaaactgctcttactttggcttgctgtggaggattttctgaagttgcagactttcttattaaggcaggggctgatatagaacttggctgctccacacctctgatggaggcatctcaggagggacacctggaattggttaaatatttgctggcttctggcgctaatgtgcatgctacaacagcaacaggagacacagccttaacctatgcttgtgaaaatggacatacggatgttgcagatgttttacttcaagcaggggctgatttagacaagcaggaggacatgaagactattttggagggcatagatccggccaagcatcaggtgagggtggcctttgatgcttgtaagctactacgtaaagaatagatgttgtaggtaaccagaactctggatatctgaattccagccaagaagttccaggaccctgctgggt

SEQ ID NO: 237959 - DNA, 918 bp, Homo Sapiens
acattggccaaacagaggtttccctctttggaccccagaggcaaaaaaaatctgccaaggaatcccttacaagttggcttaggcccctaaaagtaaactgcccaagaaccccagtgactacaggtatttggcagctgctatggctgtcatgagaaatgtgactccagcagatcaccgaacgcaagcgacgtttagagaatattgacaagattgctcagtggcaggcttctgtcctagactgggagggcgaggacatcctagacaggagctcggagctgatctacactgggaggatggcctggatctaccagccctacggccgcaaccagcagcgggtcttcttcctgtttgaccaccagatggtcctctgcaagaaggacctaatccggagagacatcctgtactacaaaggccgcattgacatggataaatatgaggtagttgacattgaggatggcagagatgatgacttcaatgtcagcatgaagaatgcctttaagcttcacaacaaggagactgaggagatacatctgttctttgccaagaagctggaggaaaaaatacgctggctcagggctttcagagaagagaggaaaatggtacaggaagatgaaaaaattggctttgaaatttctgaaaaccagaagaggcaggctgcaatgactgtgagaaaagtccctaagcaaaaaggtgtcaactctgcccgctcagttcctccttcctacccaccaccgcaggacccgttaaaccacggccagtacctggtccccgacggcatcgctcagtcgcaggtctttgagttcaccgaacccaagcgcagccagtcaccattctggcaaaacttcagcaggttaacccccttcaaaaaatgatacctacagggaggcagataattttaaaataaagtaaataaaatta

SEQ ID NO: 237960 - DNA, 966 bp, Homo Sapiens
  misc_feature (815)..(815): n is a, c, g, or t
  misc_feature (895)..(895): n is a, c, g, or t
gcatgtctktktmtaaaacagcgghgtgaccaarggagawkgagwtgamrgggtggaaggttamtgagmmaatgamaatgatytctgtaatmaaamcaggaattcaaaagatwtmaagmaagggagaagggttattgtgatgmagggmatggaamatggaaamaatmagatatmatgmtttgtgmmttatcwacaggagcatcgcccattggamttcmtgacmtcttmtgtctttgagggamagagammaagctagatcmtttttctcacctttctgcctttggaacacatgaagatcatctcgtctatggatcatgttgacaaactaagttttttttatytttcccattgaactcctagttggcaattttgcacattcatacaaaaaatttttaatgaaatgatttcattgattcatgatggatggcagaaactgctgagacctatttccctttcttggggagagaataagtgacagctgattaaaggcagagacacaggactgctttcaggctcctggtttattctctgatagactgagctccttccaccagaaggcactgcctgcaggaagaagatgatctgatggccgtgggtgtctgggaagctcttcgtggcctcaatgccctcctttatcctcatctttcttctatgcagaacaaaaagctgcatctaataatgttcaatacttaatattctctatttattacttactgcttactcgtaatgatctagtggggaaacatgattcattcacttaaaatactgattaagccatgggcaggtactgactgaagatgcaatccaaccaaagnccattacattttttgagttagatgggactctctggatagttgaacctcttcactttataaaaaaggaaagagagaaaatnactgctgtatactaaatacctcacagattagatgaaaagatggttgtaagctttgggaattaaaaacaaac

SEQ ID NO: 237961 - DNA, 915 bp, Homo Sapiens
cagggagatctgatactggggaaccttagagcccagtgtttgaagttttaacagaggggccctaagaccggtaaacagtggggagggttcggtggacagtacccggtgctgttggtggacgcccctcagtgggctcctgagcctgggcatgggaccggtggttgtgctaaacttctttcaatactgcagagccaacgtgtgttgggaactaaagggaaacatgtgggtccctgtgcccggcagtggagatacgaagaatgaggagaatggcatcctgctgaatggcctcagtctcagaagccatctgatactgtgggctgagggcctggacactggcttctgcagggatgtgcacgggcagctgaggatcctgtggaggagaccatcgcagcccgcagtccaccgggatcagagcttcacttaccagtataagatacaggacaaaagcgtgtcctttttttgccaaaggaatgtctcctgctgttctgtgacctgatttcggagcagctggagctacataggactgtttttggacgtggaagatagagcaacatagcaagaatgggtctttctcctctgtagtaatatttcaggctggaccggcgactccactgtgaccagagggttgagtgctgcagtgatggcatgccttggctgccctgggccctgttcagaaaacacaagggaccacaatcctgcctttgctgagagagaggctggatgctagacccaagtgaaaggggtcctttggagcctttgtttaaatatgccttagccccagctgcccatttttggttgacaagcctttcagagccagagtgggtatagatgtgccagccaggagatggcaccggatggcaggtgtgcaaggtgacaactaggataatcaggctggaataaagtaagtttccacac

SEQ ID NO: 237962 - DNA, 1000 bp, Homo Sapiens
gatcatccasagytstcaacggatyataasscgccaccatccccagcctggcccctgggagtcctcactcaaaccytatgratacgcctgggggccaacggcstggatgccatcatcacacagctcctcaatcagtttgaaaacacaggccccccaccggcagataaagagaaaatccaggccctccccaccgtccccgtcactgaggagcacgtaggctccgggctcgagtgccctgtgtgcaaggacgactacgcgctgggtgagcgtgtgcggcagctgccctgcaaccacctgttccacgacggctgcatcgtgccctggctggagcagcacgacagctgccccgtctgccgaaaaagcctcacgggacagaacacggccacgaacccccctggcctcactggggtgagcttctcctcctcgtcgtcatcgtcctcctccagctcgcccagcaacgagaacgccacaagcaactcgtgagcccacgtcggccgtcgggaaagcacggggcctttcccacccaccctcagccagcgccacacggcacccacagactgggtgccccggcggcgccacgcttggctggtcagcgctgcaggtcccgcctgttccagggcaggacccgggcccggcccaccggccccctggcttgggaaggcgtgggccacatggtcccctctggggcgtccccagcctccccgtcctctgtctaacctcaccctctaaacgttcagcggtggaaagatttttataattttaaattattactgctttgaaataaacggacgtttgagctcacgtggcggccatgcatggtttgtggcggaagacggggcccagcggctcccccagcgctgaagcacggggttcagcggctcccccagtgctgcaggtgctgccaggacgggccacgtgggcccccagcctccccctcggccgcctccatcgacccggagtaggggggctcgggaccatgaggatgaccagcaaaattcaa

SEQ ID NO: 237963 - DNA, 899 bp, Homo Sapiens
acycagttgargaacagcgwggcaggcrgkktgctcaatttcagwtkaatacaccttratacaacctgccctttccacgtgattttaaamccaktttytatagagaaactataargggaaagactactgtcatacaakgctaaccaaaatgtttttcttccagctaacagtacctttgcagaaaattgggaagggataagatcacacagtagaacatgatacactacttttatatcacacaaatttattaagttatccattaccaattatatgggcaaatcaagaaaaaaaaccagtatgcatgctctatccctcgtggtaaagaaatttaagtggcataaatttggatacaattttgctcttctgtggcatatagattagcaagatttctcacacttaaaccacaaatatatgtgggtgtttagatacatacatgcatattaaatatcaccagttttttagattagctgcaagtcttttgaaacaagggaattcatgattcaaacacaagtttaatgacaaattatttacccatgtaatcaaacaaatggatatcccttataagtagttacatgatcacttcaggtattcttcagtaagtgatacatacaatcaatcatgattgcctcagacagcttctggcctttatgtataaaatcacaactagcacttaacgttactgagggacatttaataaatgcaatggctcctagttacaaagtagcagaatgaagcagctataagccctgtgcagttactatatgaacacaagaactagctcttggcagtagcaatgaactagactttctcctcaagcagaggtgtattaaaagctgctcagcaatgagaagtagtccctggatatattcataagtataaataaagttacagactccttt

SEQ ID NO: 237964 - DNA, 943 bp, Homo Sapiens
caggtcgaaacagtggggcctgggaaaccaagtcacctccaccagctgcaccattccccgttgccacgggccgggaaaaaaccaacgacaccactgaagacaactccagttgcctctcaacagaatgcttcaagtgtttgtgaagaaaaacctatacctgctgaacgccaccgagggtcaagtcacagacaagaagctgtgcagtcaccagtgtttcctcctgcccagaaacaaatccaccaaaaacccatacctctgccaagatttacagaagggggaaacccaactgtggatgggcccctacccagcttttcatctaattccactatttcagaacaggacgctggcgttctctgcaagccatggtatgctggagcctgtgatcgaaagtctgctgaagaggcattgcacagatcaaacaaggatggatcatttcttattcggaaaagctctggccatgattccaaacaaccatatacactagttgtattctttaataagcgagtatataatattcctgtgcgatttattgaagcaacaaaacaatatgccttgggcagaaagaaaaatggtgaagagtactttggaagtgttgctgaaatcatcaggaatcatcaacatagtcctttggttcttattgacagtcagaataacacaaaagattccaccagactgaagtatgcagttaaagtttcataaagggggaaaaaaaagatcaataccattgcttcagacactttcccaaagtttctccttttgagaaaaagtcccaaaacttcatattttggattatgaatcatccagtaataaaatggaagatggagtcagctattgaagtggtcatccatttctttttaagaagctcatgtggacttgttctattgcctgacctgatgaactgttaatatctggtgaggttgagttatcatgctactaatatttt

SEQ ID NO: 237965 - DNA, 1000 bp, Homo Sapiens
cttggagktaagkggrgracactgacctggaaawarrgytgcatgagccktgwkgcacmwtgmctccaccsgggtracagakgrgtcctctkttaccyccccccccaaaaaaaaaatccagtrggaattccwtcatagaataacatgttatttattggtattgacttcttattagacagagctcatagtatttgttttctgctccgaacacttaaaaaatactaagacgtgatagtgaaaatagctttgaaaagaaactacatatggcaaaggtggggaggggggaagatgatgcattctgatcattataaagaatacttttcagggctctatcattttctccctttctctaatcatccagaatatggcgggtgtcccagtgttcaacagtatcatgctaatattccatttgatcggtagtccaagttctttggccagatagtgcaatgttgtgacaccgaccgaagcctttgttctggatctttcttcctattgaaagtggctgctggtggcttcataattttctgttttttttctcacaaagtaaatggtgggcatccatgtttacattgcaccttcccgtgctgtaattggcttgacaaagacaagcaggcttctctgttgagacttattgtgtttttagttttcatagacacttatttaatctttttaaattgtacagcaaggtgctctaagtaatattcgataaaatatatttaatagaaatttgcgtttgatattcatgaacatgaatacatgtatttttttaagaaataagtattgtgtaacactatggcattgcttctatagccaaagtataaaaatttctggaatactgacatgtaaagactacagttaattctgacactgtatcttattaaaataggatgatttgcattttgtaaaattatcctgcacatcaagctgcatgccttaaagcggaaactctaggactgtgttcatgggagagcagttcatctgttcagaacagtgaggcaag

SEQ ID NO: 237966 - DNA, 1000 bp, Homo Sapiens
agaaattgcwgagmctcmracaswgagcrgcaaacccartgctggaaktcaratgagagagtgargggcartragtgytctttaggagctgatcaaaaccttarawkatctgsccacwtgtggcagactgagcacacactkggagagaaatggcccagraggagaggagagaggttcatccacaggacagtggatgactgggaatagaagccctcscccatggtgkaccaagaagtctgtgaagctgagagaaagacaaaagaaatcacgacttctgtaggtagctgggatggaaacctcaggggtgacagggtctttaaaggaaatctcaaggaaggcatcatgttctgggtgtgctccagggatgctgagtaagaaaagaccagcctttctgtgtgtgtctttactctgccacaaggcacctgggctcctaaatgaccaatacacatgtgctatactggtgccaagaaagaagggtgttttgtaggaaagtcaaggtgagaggaggtgcccaggacttggctcctttctttgaagggtgacggtgtaaattctccatgctggggatcctactgatggatggaggcatgtcgatctcatcatttcacagagtggggagctatggccacaacgtgcctatcacacaagtccagcctcacgtcagctggacaccagctgttctgacacttgtcagcacatggggcacccggaagttcatggtgttctgcaaagaacgccacaaaacagtgagctcaacttcttgaaagtcataatgtgttgctaagtccgatcccagatcctaaaaataatatgaggtagtggccattgaacagaaaaaatttacatcttaaacttgaagataagtacaagtgtacctttttctaccactgttgttcagttttattatattgacaagcacctctgcccaccctgtggggtaaaactgtttgaaagtgtttatgaaagttttatataaatattggttgatcaaatgtacaaa

SEQ ID NO: 237967 - DNA, 623 bp, Homo Sapiens
tgatattcgtatataatcatatctaagatctatatctggtataactattcttgttttatattttattatactggaacagctcgtgtcctctgtctcttgcctcggtgcctgggtggcttgccgcccacatctcccccctttttattaactagaatcgccatcgccatcattgcttgttgttgacttcggacttggtttcggactccttagaggcatctgcagactaaaaggagacaacataagcataccaatattaataatgccagtaacaacaatgatcctctgacgggtttgagccatttgaagggattaaaatcaggtaattgtttagttatgccttcaaaaatgtgtgagccaggaactgtggataaatgggcttgtgaagcctcaaagatttgctctttaagttgtgaaatatccaaggttaagttatcatcccaggcttttaaatgtcttgagacattttcccagctatgttgatcttgattataagcataaggcgttatgcaataatcagaagtattccaatcacactgtaattgcatacggtgttgcaagttcataactctatctcccagccaggttacactttggcggagatcattaatctgattagctaattt

SEQ ID NO: 237968 - DNA, 1000 bp, Homo Sapiens
acagaacagtgatatcgaagcgttggccaggtgtttggaaaatgtcctggktgcacttctctagacamaaagaccatcacccaccatggctgaagacatgtccccmaggaccacccaattttcaacagtgcgatggccaggacccaagatgaaacgcatgagggaatcagccatgcagaagctggggacagaagtatttgaagaggtctataattacctcaagagagcaaggcatcagaatgctagcgaagcagagatccgcgagtgtttggaaaaagtggtgcctcaagccagcgactgttttgaagtggaccagctcctgtactttgaagagcagttgctgatcacgatgggaaaagaacctactctccagaaccatctctaggcaactatcaaaaagaagcagaagttcaagtggacaaatttatgtgaaaattcatttaacatataagctgaactctattatggggaatggatacaaaagcagagctcccatcttgactttcaattcctcatcagaagtactggcttctttagagagtagtaagcatggctgcctatgcttggagtcataagtgttatttggactataccctgagataagcttatagatcaagtttggctcccttgaaaagcatttctctcatgtgcgccctcagggcttccagcaggattgagtcaccctgacgatgaccggggagaagccgtgtgctcttcattattttcagctggaggacagagctcagtgcctgactgcctagggtctcatggactgtaggcagcctgccagtgaaggtcactggactctagcctacaacatgctgagctacagcccagaagccagacatgcctgtcttagctgacctgtttttggtccacttttgcccttccatgactaataaggaagatatgtgtgtatttcatacacacacaaggacctggattaaaaatccaaaaagtgattctcttctatgatttatttcaaactcatccatagata

SEQ ID NO: 237969 - DNA, 721 bp, Homo Sapiens
aasagygccctscttscaaacatcaacctgscaaaaatscaacaaatgaattttccacgcagttctttccatgcscatagctaasctgtgccttcagctgtkscagatgaaatgttctgttcaccctgcataacatgtgtttattcatccagcagtgttgctcagctcctacctctgtgccagsgcagcattttcatatccaagatcaattccctctctcagcacagcctggggagggggtcattgttctcctcgtccatcagggatctcagaggctcagagactgcaagctgcttgcccaagtcacacagctagtgaagaccagagcagtttcatctggttgtgactctaagctcagtgctctctccactaccccacaccagccttggtgccaccaaaagtgctccccaaaaggaaggagaatgggatttttcttttgaggcatgcacatctggaattaaggtcaaactaattctcacatccctctaaaagtaaactactgttaggaacagcagtgttctcacagtgtggggcagccgtccttctaatgaagacaatgatattgacactgtccctctttggcagttgcattagtaactttgaaaggtatatgactgagcgtagcatacaggttaacctgcagaaacagtacttaggtaattgtagggcgaggattataaatgaaatttgcaaaatcacttagcagcaactgaagacaatt

SEQ ID NO: 237970 - DNA, 823 bp, Homo Sapiens
  misc_feature (196)..(196): n is a, c, g, or t
gggatttcaccgccagaagggccccctggcccagggttaaatgtttcttaatcccaattcctttgggcagggcagccagctcccccaggcgttttcttcaagcagctgaagtgtttagcccttctgggttaagaggcaaataaggaaaattccctttcctaggtttgaaatgtgttgtgaaaaaaaagagaaatcncctggctcctggagctggtgggagacaagattaagcaaacctcccctgacatgtatccctttgaccccaagctctgcctcctccctgaccacccatgccctttcctttaacttctcaaacagataccagggcctaaactgctttacctcccctcctactgagtcaggttaggtggtgggaggtcacccatttccgagttaaaccaatgcaatatgagtaaaacaaagtcatgtgggtatgtctggggtagagagaggggtagcaagttcatgtgtcctccttggtcacatatctcccaaagctctgatccctgccatgggaagtggacaggaaacatgaggtcatgacctgcaggcatctttactgcagctctgccggcctggagggggagagggggaggaagaagtatgcgctgcacatttctgaggctactgcatttgctttcaaggcagaaatcttgctctgagcagtcagcggctccagtttgggcccgataaggaagttctccgtggcctccctcaggcagagcagggaggaggctgacattgccagtctcttctggggcccaaggcaggttgcaggagatccaatcccatagacagctctgggcctcctgcatttagtttt

SEQ ID NO: 237971 - DNA, 1000 bp, Homo Sapiens
gcaagattrtgcccactgcagcctcaacyttytgggtacaagtgwttgyccacctcagcctcccgagaagcttggacwacagacawgcagtactatgcctggctaatttttgattattgatagagacagagtctcactttgtgcccagtctagtctcaaacttctggctccaaatgatcctcctaccttggtctcccaaagtgttgggattataggtatgagcctgttcacgccagccagtattcttaaatttaataagatttgttatgtgtcctaacagaatacacaagtgcaaataagaatgttgtgtattctcttgcttttgactgaaaagttttgtacatgtctgttaatcctagttggtctgtgatgtggtttagatgttcgtgttcttcaaatcttatgctgcaatgtaatcctcactgttggatgtggaacctggtgggagatgtttagatcatggggcaaatttctcatgaatggctttgtactatcctcttggtaatcaaaaagtttacactctgttaattcagatgagagctgcctcattaaaagaacctggccccttcacctcacatttggttctgtcttttactatgtgatatgtccagttactgttggccttccaccattgtggaagcttactgaaaccttccaccagaggcagatgccggcacacacttcttgtacagtctgcccaacgatgaaccaaacaagcctttttatttataaattatccaststcaggtattcctctatgtgcaaaataatatattctgtaacgttgtctaagttttctgttttcttattgatcttttctctgaattttctatttattattaaaaatggggtcttgatgtctacaattattatgttgctatgtatttcttgtttcacttttgtcaatatttgctttacgtattttggagccctaatgttgtatatacatatacacataaataaataggcataatagttttagattcctggtaaattgatc

SEQ ID NO: 237972 - DNA, 924 bp, Homo Sapiens
aaagatagccttcccaaaataacaaccgcgactttttggcaccccccgaatagctcattctttcgatcccttagcgcacacaccctttttagccgccgggcactacctcgggtcctcgggatagggtgttttaagaaaagggacccgctgtgaatctcacccgccgccaagggttagcaaaggggggccctgcctggcgggcctttccttccccctcgaaccggccccaatgtccccctgcgctcctggtcccgtcccgcggtagtgctttccctttgttccaagaaatagcgctccaggcttcttgctgcggcccctggggcctcactctgaagcgagccggccgccctctccttccagccagccagcccctcccatgtacatttggacgctgtcctgcgctccagctgcaagctgggctcctgttacacactggacagaccacccactgccgccgctgccaagccctctcctccccaccagactgccagacgactacatcattctgcccacagacctgcgctgccacagccatcgccatccatcgcatcccaccgacagactgctgctcctagtgatctggactcacctcggaggtatctgggctggccacagtccctggacagtgatccagacagctggccgccccccaagggatctgtcaccttcagcgagacctatttcctccccacccccagaaacctcttgtgttcttgcctaggcccaggtgttcctggcagccaaatcgagtctctcattttctcttgtggaccagttagttttgcccataacgcagtattctgagtttgcaactgtctctctgatgtgtgccttttgttcaacacagtaacccctgcattctgctctgctctaatacactacctgagaaagtcttttccttattttcaataatgtcagacatta

SEQ ID NO: 237973 - DNA, 839 bp, Homo Sapiens
taatttctgtcatttattcacgtcataatcccccaaagctacctttattccacgactctttccaccattttcctacagtcagctttttttaaggctatagcctttaaaaacttgaaacagaaaattttaaggatgcaaccattagaaaatgttcccatactaccatttaacattccccatttatcattatgtttactatcgtgtaatttccaacataatattatgaggtcaaaggctctacgaacgccgttttacaatctacctagggaggcaatggctgtgaaacacaccacaccaatgacaggaatgcgggtcactgtgacacaacggatccctctgcaaagtcaaagctaagagttcactttacgctgacggagcttctttccaggacccccacccccacccaaggacaggagagtgtcgatttcccaaggtgtctggcactgcttcttgaaaacgcagctctcatctggttcctggaaggtcatactggttcgcgcagggctcgggacggggcgcttggcttctgaggcacccgcgctggctcctcacccggtgaccttcaggcctctgcgcttggcctgaccctagaagggccaccgcccttcacagcgggcgggcaccgtccctcccacggccccgccgactstgacgcggtggccccaagggtccaggcccgcacttgccccactcccgcggcgccgtcccccatagtcggtccccgagggccgcgcccagctcctgctcggatttcagcccgcaccgcaccccagccgccagggaaccttccagaaccctgcccctctggctttctcccgaaagcccagggtcgccgtcca

SEQ ID NO: 237974 - DNA, 926 bp, Homo Sapiens
  misc_feature (46)..(46): n is a, c, g, or t
  misc_feature (149)..(149): n is a, c, g, or t
  misc_feature (246)..(246): n is a, c, g, or t
tctgggacaatttacataatggtcatgagctccctttaaagctaanaagcgtagcctgagctcccgaaaagttcctgccagatttaagctgttttggagatgcagcagtacaatggggagtctctctcactctttctctctctctcttnttaagcaaataagagatgctaaaactaagttcaggggccatggaaaatgacaaagtccgctatattgtgatttgggaagagaaagttatcaagaganagaggttagtatggaagcatggagagaaacagactgtgggaaggatcagaaggaatccaccgaggcagggatgggtgtgcccatgtgtgcctttacaggacttcatcttataggctgttaaactgtcacacacaaacaggctttccacccctgctctgagagcaccacgcacagatttccagttcttagtgtggctgtttaaagtagaaaatctgggggctgggtgaggccactcatgcctgtaaacccagggctttaaaaggctgaggctgggggattgcttgaagtcaggagttcaagaccaacctgggcaacatagcaacaccccccatgtcttcaaaaatgaaaaaccaaaaagctaaccaaaagaaaaatctgaaatttccatctggggattaacttctgtctttctggtgaacaatatagcaattcacgcattcttcaagcagcaaaagttcccggaacaattagggaagacgtatggtctgaatttatccaggcagtgggtctgctttggtttttgctggaaatttatatcagtgtctgggctcccaagaacataaatgtaattgccaaagcaagcagtgatgtggtgtgtttattttctttgactcatctaggaacttgacgcagctttatatttaataaacataatagtagaattgcatgtattctatagg

SEQ ID NO: 237975 - DNA, 544 bp, Homo Sapiens
gctcactcggtacctgcgcgcggcgctcgctccctacaactggcccgtgtggctgggcgtgcacgatcggcgcgccgagggcctctacctcttcgaaaacggccagcgcgtgtccttcttcgcctggcatcgctcaccccgccccgagctcggcgcccagcccagcgcctcgccgcatccgctcagcccggaccagcccaacggtggcacgctcgagaactgcgtggcgcaggcctctgacgacggctcctggtgggaccacgactgccagcggcgtctctactacgtctgcgagttccccttctagcggggccggtaccccgcctccctgcccatcccaccacccggcctttccctgcgccgtgcccaccctcctccggaatctcccttcccttcctggccacgaatggcagcgtcctccccgacccccagtctgggcgcttctgggagggctcttgcggtgccggcactcctccttgttagtgtctttccttgaaggggcgggcaccaggctaggtccggtgccaataaatccttgggaatc

SEQ ID NO: 237976 - DNA, 873 bp, Homo Sapiens
gtatgttccggccgccgttagccgagctttctgatacccgcgtttatcagagtcgcagctttcgttccaccgctcgccgacaaagtcctcgctggataaccgtcgcctgcccgatgcccattccgataacgcacgctattcgggctcctataatgattacctgcgggcggctcagatgcactctggctaccagcgccgcatgtagggccatcctgggatggggcaccacagggagggagggagaaaagaggtgggtagggttacagatccaggttataactactctggcccatacctttcctggttgtggtttttcatgccctctaccatgtgggccttccccaggagatgatcctgttaagtgttcggcagtaacctactttgttccttcgcctcagcagcaaatcttgctactggctctagatctgcggtttcccctctaccctgcctcctgtctccccagaatgggaatttcttttatgtttttatttttttcctggctcccttttatttttgtgcgcgatatttaaggtcgtctggatggggaagcaacctgcagctgaggtcgccggcgcctttttctttttagatgggaaggaggccaggaaagggtcagcttaaccatttcctatgtgccaagctgtgccagcagtccagggtaccctgactgtccctctgtagactgttgagactgagttcctgttgggacagtcagttggtatgtatccaagtccctgctgaccactaatgttctagctgatggtgagcggcacagtcccacttccccatctccccaagtaggtggtgttagaaaaccttaattttttttcccttttgtagggactacaaataaaactggggcaatttgcagtt

SEQ ID NO: 237977 - DNA, 1000 bp, Homo Sapiens
  misc_feature (997)..(997): n is a, c, g, or t
gaaactacgactcctccctgactccygctgttggaggaacgaaggtttgcacaggtggtagcggtgggcagcaatgtgaccggstgaagccaggagactgggtgattccagcaaatgctggtttaggaacctggcggaccgaggctgtgttcagcgaggaagcactgatccaagttccgagtgacatccctcttcagagcgctgccaccctgggtgtcaatccctgcacagcctacaggatgttgatggacttcgagcaactgcacccaggggattctgtcatccagaatgcatccaacagcggagtggggcaagcggtcatccagatcgccgcagccctgggcctaagaaccatcaatgtggtccgagacagacctgatatccagaagctgagtgacagactgaagagtctgggggctgagcatgtcatcacagaagaggagctaagaaggcccgaaatgaaaaacttctttaaggacatgccccagccacggcttgctctcaactgtgttggtgggaaaagctccacagagctgctgcggcagttagcgcgtggaggaaccatggtaacctatggggggatggccaagcagcccgtcgtagcctctgtgagcctgctcatttttaaggatctcaaacttcgaggcttttggttgtcccagtggaagaaggatcacagtccagaccagttcaaggagctgatcctcacactgtgcgatctcatccgccgaggccagctcacagcccctgcctgctcccaggtcccgctgcaggactaccagtctgccttggaagcctccatgaagcccttcatatcttcaaagcagattctcaccatgtgatcatcccaaaagagctggagtgacatgggaggggaggcggatctgaggggctgggtgcaggcccctcagttggggctcccaccttccccagactactgttctcctcactgcctcttcctattaggaggatggtgaagccagccacggttttcccncag

SEQ ID NO: 237978 - DNA, 901 bp, Homo Sapiens
  misc_feature (218)..(218): n is a, c, g, or t
tgtgggtttgatcatcaatgcagtcatgtaaggctgcattttcatgaaaacagctcaggctcacagaagggcagaactttgattttcagccgccatgctgtgatgcccgtccgaaatggcaagctgtgcttcatgttcgaagtgggtgacctgaggaaaagcatgatcattagtgcctctgtgcgcatccaggtggtcaagaaaacaactacacctgnaaggggaggtggttcctattcaccaactggacattcctgttgataacccaatcgagagcaataacatttttctggtggcccctttgatcatctgccacgtgattgacaagcgcagtcccctgtatgacatctcagcaactgacctggccaaccaagacttggaggtcatagttattctggaaggagtggttgaaactactggcatcaccacacaagcacgaacctcctacattgctgaggagatccaatggggccaccgctttgtgtccattgtgactgaggaagaaggagtgtattctgtggattactccaaatttggcaacactgttaaagtagctgctccacggtgcagtgcccgagagctggatgagaaaccttccatccttattcagaccctccaaaagagtgaactgtctcatcaaaattctctgaggaagcgcaactccatgagaagaaacaattccatgaggaggaacaattctatccgaaggaacaattcttccctcatggtaccaaaggtgcaatttatgactccagaaggaaatcaaaacacatcggaatcatgacagcaagataaccccaagacagtcttttatcaagttttgacggtttatgctgggcactgccagactgaaccagagctggaacacaataatggtccttctacattttattacactaaa

SEQ ID NO: 237979 - DNA, 889 bp, Homo Sapiens
  misc_feature (262)..(262): n is a, c, g, or t
  misc_feature (861)..(861): n is a, c, g, or t
caggacccttaataaatagggttaaaaatttgtctattgagccccccctattttagtccagattttggctttattgcccaaaaccctccttgaaggggacggaggagtcccctctgtgggctggcagtgtgaatgagatctgtttagtctcgtgcaaaaagtgcttgttttttaaatgaacacagttgagtatttgaagtgaatttgaaaaagaaatgttacttaatctttccctaagcccatgggttacagaatgctaggnaggcattttggttacctgcaatggctgctttgccagcgaggccaccattcattggtcatcttggtatttgtgtgtgaatctcactttcctcaatgtaaaaaggaatcaagtatggatttcagaggtgctcttagattccccatacacccaagggtaataaacgtgtacaagtacagtgttcatgatacgtgccttggtgggagtccgtggtgccacagggaaggggctcccactgcttctggtctccagggacagtgctgctggaaaggctagtgatgagcttcaccctggagctcctcccgggaccttgcaagcctctccatccagcatcttctctatcttagttgaatgccttctttctgaacatttgttttaagaattattttataaagtcaacaatactttgcttgaattctttcttaatttacgattttttattataaaaatgtatagtgatacaatgggacatgtgaagaatacagaaaagtaaccactttaatgcaataactgttatcataatattgtatttcgtggtagtcctttcctgtagatatttttaatgccatttaatgccattgtcaccttggatttatgagtanaaagtgtttctaaaaataagaaataatg

SEQ ID NO: 237980 - DNA, 629 bp, Homo Sapiens
ggggcttgcccgccccacccgacgacttcctgccgccgccgccaccgccgccgccgcccccggacttcatggagccgcccccagacttcgtgcccccgcccccgccgtcgtacgcagggatcgcgggctcagagctgcccccgccgccgccgccgccgcccgcgcccgcgcccgcccccgtccccgactccgccaggccgccccccgcggtggccaagaggcctcctgtgccccccaagaggcaagagaacccagggcaccccggcggagcaggaggcggggagcaagatttcatgtcagacctcatgaaagctttgcaaaagaagagaggcaacgtgtcctagggacgggcatgatgagtgttccagagggagaagcatcgctgaccccgagcgcaggttttgctagcagattgccctgacatcttgttcatttcagataaaatgtgatgggaaacttctcactgatgtgctcaagtacaggcataaccattaacccagtagagttcagaatatctgcccaaatgtacatatcgttcccatgtattttaacctaaatggaatgtatcttcccttccaagctgcctaagcgctgttttaggttcatttattttattttgtttagaagca

SEQ ID NO: 237981 - DNA, 799 bp, Homo Sapiens
agctgtagtacaacgccgggccctggaccatttacctgaagctcgtgcgtgttcaaagacctggggtgcatgcgattgcaccgtgcaccttggtaacccctgtggtccagggtggggccactcatggggttcaggtgcccgaggagaaggtgaacgcaacaggactgccatggcacaggccctgcaatggctggagaacaagttcctgggggacaggcccttcctcgctggccagcaggtgacactggctgatctcatggccctggaggagctgatgcagccggtggctctcggctacgaactgtttgagggacggccacgactggcagcatggcgtggacgagtggaggctttcctgggtgctgagctatgccaggaggcccacagcatcatcttgagcatcctggaacaggcggccaagaaaaccctcccaacaccctcaccagaggcctatcaggctatgctgcttcgaatcgccaggatcccctgaagggtctgggatgggggccaggagattagcaacaaggattcattctgttacttacttgcccctttttatctttccctcttgccccagtcccttctctccagcttcatgtgaagctctgcacagacaagacactcagtgtccttggcagtgctgctactcctcaggtgcagcatacataaccagtaagagactaaatctgcaatatataaagagctcctacaaatcagtaacatgaagaacactcaaaaattggcaaatgtcatcagtgttttaaacagaataaagattccaaacactttgaatagagaa

SEQ ID NO: 237982 - DNA, 436 bp, Homo Sapiens
gaaaacatccactttaagctttattacaacacattgtctccaaatacaaagggaggggccgggagcagaaggtgcggctgtggcgggaggggctccaaggggggctgaagggccggcagcccagtctacagagactggaggctcagcgggggacctgcaccctctcctccgctggacttcccagcaaataacaggaggggccgggtccattttggggcgatcccaatgccaggcagtggccaggtgggaggggccggagagaggcttggagaggactcagggctgggtcaggtgaaagccaccaggtggggccctggcccgcctcccgcagcactggaggaggcagtggccaggtgggaggggccggagagaggcttggagaggactcagggctgggtcaggtgaaagccaccaggtggggcctcagcccgcatcc

SEQ ID NO: 237983 - DNA, 455 bp, Homo Sapiens
ccagattaatgtgtattaaattacatgtccacctgtgggtctttttcacccaaggcagcattgaatatgatcactttgtaatctttgctattttggtaggcagaaacaatcttattattttaatttgcatttctttggttactagataaattgaacttagatttaccagccatgtgaggttattttttttttttgtactgcattgtctcttctggtcctttgccagattacctactggggtcttagtgttgaatccgaagtgaattttttggttttcaactttacttcccttttattcttccttttaaaagatgaaaaaagaaaaaggccaagtgcagtggctcacacctttaatcccatcactttgggaggccgaggagggaggatcacttgagcccaggaattcaagaccagcttgggcaacatggggagaccctgtatctatttaaaaaaaa

SEQ ID NO: 237984 - DNA, 823 bp, Homo Sapiens
  misc_feature (810)..(810): n is a, c, g, or t
acagagggtaatgtctcaaaaaggatttaaataaaaaaataaaggctaaaggaataactggtttgaatgcggggtgattgcatttcaagcacgctagtttacatcgggatcttaactaatgaaaccatttgccatcttacagtgagtgatacatcacgttggcttgccgcagtttttggttctttttttttacactattcaacatgtcttcgtaatatcttccttcctctcgtatctgatagacaaagaaatgatataaaattttggttgaaaaaagccagttgattgggatgactagaaatgttaactttttcagtaaaaagctttcaccgaatcactgggcagttagtaatgcagcttacaaataaataaagctgaggcgagaggtttaaacagcaagaaaagctgcagagcatattgaggaagggaagcagtgaaatggtggttttaatacatcccaaactggaagcaagaaccctaacacaaagaggattggaatactctaccatctgtaaggaagtagctagctacaagccacctcacacaaaacacccactaaggcctttcaccgagatcctcttgttatattctcattatgaatccccagcaggtgcacctcaataaataggtgtggaggatactgctgaggacctctaggtcacctaagcagaaactgctgccatcaaagcagactgccaccatgcatccgcggagaactccctgcctacaaatgaaactggtagcgctcatcccctgtgcccgaggaccgtccacaacggaggtgctttcctgcaagagaagcagcaaatnagacagcgggcca

SEQ ID NO: 237985 - DNA, 781 bp, Homo Sapiens
  misc_feature (43)..(44): n is a, c, g, or t
  misc_feature (63)..(63): n is a, c, g, or t
  misc_feature (104)..(105): n is a, c, g, or t
cgtgaacttgaccctctggaggtgtccatcttgatgtgatctnntgactgcaacctcatcctntgcctttcaagagctgcctcccccctgtggcttctgccctnnaggcatgggaggcgttggtgccaggagcttggggtttgagtcaggttggctcggggataagacccagcctttccacacattagtttgtgatgctgggtcatagtgcgtctgtttgctccctgtcaagggaccagtaacatgaggggtcagagaagggatcagaactctcgtgggcctccagtgtgtcgcaagtttttgctgttctgcttttcctcagctgctggtgggaatgcaaattgctgtgctgactttggaaaaactctccggcagtaaagcctaaagttccacatccacacaccgtactgtggcccagctgatttctctcctaagggtatcccggagtaacttctgcacatggatgcctgggacttcacagcccttctgcacacaataacagaaacctggaagccacccagatgcccatcagtgggagaagggatgaatacacgaagacacgatcacacaatggaatattatacagctgtccaaacacattaactgcagcataacttcagtgatgtaggtggactctggcaatatcataaatattagtaaaaatagcatgttcccaatgatgacttacagcactatgccttttaaaaataaagttaaaagcaactacaatgactgtactctctaggaaaatttacaggtgcaataaaactacataaaaaag

SEQ ID NO: 237986 - DNA, 863 bp, Homo Sapiens
ttagggggggaaaaaataaagtgtacctaagaatctcggggaaaagaagggtccctcgataaagaagttttttcaaaaggaattcttttttattgttaagcagccccgtattcaggggcctgccaaaaggggggatgtttaccaccagtttaaaagtccctggcccccaaggaagccagccacagcccgcaagcttccgaccggaattcaaggaagccccttcaagccactgggtccctcaacagccccatttgccactgttgacagccctccccagtctccagcagaacctggccatgccagctcagagatcttctgcagaaaccaacgagctgagggaagcccttctgaagatcttccctgactcagagcaaagactgaaaatagaccagatcttggtggcccacccatacatgaaagatctaaatgcgctttctgccatggtgttggattgaagattgtgctgagcgctgagcttgcgctcagggctggctgatcaaactcaagctcacacctgtacctgatgggaatgaacataatgtgaagaaacttatttcccagtgtaaacgcagttgtacagaaaaaaaatgttttgggtataaatctgggttttcaaaaccagcttttttctatatataaattatgctgctattacagatttaacattttctgttaaaggaaagtctacattttctgcctgttcagaactgtttaatagcagttactcttgagtgtatttacctttttatgttttttaaactattttccttaaagccgaaaatattgacaaatggatatggttagcctttataaataaataaaaaagaaagtgtgctttcttaaggaaagcaagacgtcttaaa

SEQ ID NO: 237987 - DNA, 873 bp, Homo Sapiens
ttttctacccccccagtttaagggcttaaacccttttgtttccagatcccccctcccaaaccatggggcttttctgggactttcttgcaaaagatgttttagcccctcagccctctcctgggaggggggttcaggacaaagtttttctttacaccctccccttagccctaaagctaaaggagccccccttttcttcatgttatccagatcgctgtcatcggcatctttaagtcctacccgacagtggggacgtgggctctacatggcctcttccccgtgtggaaccatctctacagattcctgagaaacatctttgtcctcacctgcatcatcatcgtctgttccctgctcttccctgtcctgtggcacctctggatttatgcaggaagtgccaactctaatttcttttatgccatcacactgaccttcaacgttgggcagatcctgctcatctctgattacttctatgccttcctgcggcgggagtactacctcacacatggcctctacttgaccgccaaggatggcacagaggccatgctcgtgctcaagtaggcctggctggcacagggctgcatggacctcagggggctgtggggccagaagctgggccaagccctccagccagagttgccagcaggcgagtgcttgggcagaagaggttcgagtccagggtcacaagtctctggtaccaaaagggacccatggctgactgacagcaaggcctatggggaagaactgggagctccccaacttggacccccaccttgggctctgcacaccaaggagccccctcccagacaggaaggagaagaggcaggtgagcagggccttgttagattggtgcctaccttaataaatgttttttgttat

SEQ ID NO: 237988 - DNA, 872 bp, Homo Sapiens
cggcacctgtgcttcagccccggccccgagaaccatctcttcacggccctcctatgacaagcggatcatcctctgggacatcggggtgcccaaccaggactacgaattccaggccagccagctgctcacactggacaccacctctatccccctgcgcctctgccctgtcgcctcctgcccggacgcccgcctgctggccggctgcgagggcggctgctgctgctgggacgtgcggctggaccagccccaaaagaggagggtgtgtgaagtggaattcgtcttctctgagggctccgaggcatctggacggagagtggatgggctggcatttgtgaatgaggacatcgtggcctccaaggggagcggcctgggcaccatctgcctgtggagctggaggcagacgtgggggggccggggcagccagtccacggtggcagtggtggtcctggcgcggctgcaatggtcgtccaccgagttggcctacttctcgctcagcgcctgccctgataaggggattgtgctctgtggggatgaggagggcaacgtgtggctctacgacgtcagcaacatcctgaagcagccacccctgctgccggcagccctgcaggcccccacacagatcctgaagtggccccagccctgggcccttggccaggtggtgaccaagaccatggtgaacacagtggtggccaatgcctccttcacctacctcaccgccctgacggactccaacatcgtagccatctgggggaggatgtagcctcacaccatcgcaaaggaccagggacacagctaactaacttattcagctttgggccgatgggggtggggggggtgctttcagtgaaattttaataaacgctactgggaca

SEQ ID NO: 237989 - DNA, 914 bp, Homo Sapiens
  misc_feature (128)..(129): n is a, c, g, or t
  misc_feature (143)..(143): n is a, c, g, or t
  misc_feature (252)..(252): n is a, c, g, or t
  misc_feature (909)..(909): n is a, c, g, or t
ctttggtttgggaagatctcaaggacgggctgccctcaccgtctatgtacagcccatagtatcccttcactacaaattctctgaagaccacctaaaatatcacttgctctgccactgcccgccagccnnccatggtcttctgnaaggtcctcggtcaggggattgaaaatagtacagtgactctgtctcacccaaatgggaccacatctgttaccagcatcctccatatcaaagaccctaagaatcaggtgnggaaggaggtgatctgccaggtgctgcacctggggactgtgaccgactttaagcaaaccgtcaacaaaggctattggttttcagttccgctattgctaagcattgtttccctggtaattcttctcgtcctaatctcaatcttactgtactggaaacgtcaccggaatcaggaccgagagccctaaataagtcacacagcaccctgaaagtgattccctggtctacttgaatttgacacaagagaaaagcaggaggaaaaggggccattctccaaaggacctgaaagagcaaaagaggtgggagcgaaagccttaaggatcccacgactttttactgccatctgagctactcagtgtttgaatcccaagaggaagtcagtttacctctcaggtctgttgtaggacttgattttgtaaagcaatgccatgttatgtggttgaaagggcactggacttagttagtatcaggagcactgagctcacagactgacttgggctcctactggtggggacctctgttagtcactttacctcatccaaagtataaaggaattggaccaaataatttaccacatagctctaaaacttaatttaaaatgtaattccagaaaaaaaaaagggaataagcaaagggggaagaattaaaaagagatataanaaaga

SEQ ID NO: 237990 - DNA, 862 bp, Homo Sapiens
gtgaaaaacatgcataaatcccaaaggttattctcccttgagattcaagcccatttggacttccaggggtgccaatttcccaaaagaaaaatattgtatgccccaagaccgtaaaagatggccagtctaaaaagggaaaccgcccgtgttgcaatctaccaagcctcagggaaaatccccagctacacacttgaatgcaactacaacactggacgctcagtaaacaagcatccctgctgattgccatgacaatgggcgtgccagcccccctcccccgccggctttcccctccagatacactgtggaactatttgagcaggtgggacgagctatggccattgcagccctggacatggcggaatgtaatccgtggccccgaattgtactgtcagagcacagcagccttactaatctacgggcctggatgctgaaacatgtacgcaacagccgaggcctaagcagcactctgaatgtgggtgtcaacaagaagaggggccttcgaactccacccaaaagtcacaatgggttgcctgtctcctgctccgaaaacaccttgagtcgggcacgaagttttagcaccggcacaagtgccggtggtagcagcagcagccaacaaaattctccacagatgaagaattcccccagctttccttttcatggcagtcggcctgcagggctgccaggcctgggctctagtacccaaaaggtcacccaccgggtgctgggccccgtcagaggtaagccagtctgggagcccctgcaacatgtgttcggttgtctggggcattgtgggggaagtaagagcttgaagatatactgtggccccaggaccaagggggaatccaataaaattagtttgagc

SEQ ID NO: 237991 - DNA, 1000 bp, Homo Sapiens
  misc_feature (462)..(462): n is a, c, g, or t
  misc_feature (898)..(898): n is a, c, g, or t
gcwttggaaaaacctttrtdatggggackgygsttytwhagaagacytwggaaaaarcaccamttttyccccsttaamatcagcttttagtamcckctgtgtcarcatagctacaggaaaaktcagcccttaactgrgggcvagatcatccctggagtgcacytctactargattttatgaaaagataacatgttgggctgcatgataaaagttaattataaaaattaaaagattttttttttgagatggaatattgytctgttgcccaggctggagwacagtggtaactgcaacctccatctccctggttcaagcaattctcctatgtcagcctcccaagtagctggractatagtcacttgccaccatgcccggctaatttatttttagtagagatgagtttcaccttgttggtcaggctgttctcaaactcctgacctcaggggatccacccgcctcgncctcccgaagtgctgggattataggcgtaagccaccatgcctggccaaaaattaaaagattttatgaaacgaaatggcttcccattctttctattcagcttctaagtgggctattcatttgtgctctcctcttttttgttttgttttgcactttgtcaatcatttggggaaatagcctggaggtctttcctgaatctgtttgtagacataataaaatttgtgtgctgtgtacacaaaaacataatgtatcttatgaaagcattacccaacctgtttgagttgagaatgcatttgtccacctttgatttgaggctttagtttgctgatttcctaaatgctaccctttgatcatttcctggccaccatcacaatactaaggggctcagatgtgtcttgtgcccacctcttcctgagaagagatggaagtggagctgtnactagtacaagcagcccaagaaactctgaacggggcccaatggaggcaaacttgagcaaataattgggatgataagaaacaaaaataatcccaactgtttga

SEQ ID NO: 237992 - DNA, 518 bp, Homo Sapiens
caaacagaattaattcatccatgatgattgatgaagaaacttccctatggaaagaaaatatggattccattcaaagcactttattttggttatttagaatattaaaatatacatatcctctagctgtcttagaattctgattgattacttatgaaaacattttctccttctatggtacaatgttaacaataatacttatgaactaggctgctgtttgaagatagacagatgtgtgtatgtatctagaaagttatagttacatatagagtgtgtgtgtgtgtgtgtgtgtgtgtgtgtgtgtgtattcctttaatcctgtcatcagctctagaaagtataagttatcatctccagtttatagttgaggcacaaaaaggttaaatgagtagcccaaatcaaaaaagactatagccaggattcaagtccaaagagccccagcccaaagcttgtactcttggccactcttgtatatacttcttgagaaaaataaatgtattaaaaaggacaccaaccataaa

SEQ ID NO: 237993 - DNA, 581 bp, Homo Sapiens
cataataattttatctataaatgcgtatatacatatatatatatatatacacatacactcacatgcagatatttacatatatagatattctcttttccttttataaaatcaaagtctaggctcaattggaaaatggaaatatttgcaccaaaagaaaaaagtgccattgttgtgatcaatggagtaaagctggggtatagtagaggctggggaagccctgcccatgttctctccaaggccacagcttgcacaccgtgaatggtggccccactggctccatggagtgtgccttcacgcgggggaatgtccttgtccaacacgctgtaatctactccatgggaactgactgtcctgcttttcacaacattgagaaacaggcccagagcctgtctcatgtgccaggtgcagtcacattattgttaaaataaagtggcttctgacaaatcagttcttcaaaatagcatcctatgtacttttcatttcttccaacaaccctcaggcccccttttgccagttttctcccccaggggagattttcaagactactggagaaaaatctgttaataaaacatttgctctga

SEQ ID NO: 237994 - DNA, 422 bp, Homo Sapiens
ccccccccccccccccccccacacccacacaaaatttccccagagtgaactttgcccaactgtaccagactggaccattcttcacacaaaagaactttacccagaaatgactgtgattcccaagctagcctcaatcatacctctctagtgccctctacgggaaatttttaggaaaactatcttgggaatgtatttttccagtcccagagagtgttaaattggtgagtttggaattcttaggatgctttttctttttaatgagggacaaataaatgccacatatttaaccgtggttaactaggaactgcttgactttgagtttcttttttgttttcttctaaataaaacctggttaaaaaaggagtgctttttcgttgtgcacaagtaccctagaacttaaagtataataaaaaataaaaata

SEQ ID NO: 237995 - DNA, 889 bp, Homo Sapiens
gaaaccaccggaagcggggtatctcagagctctaagtctcctatgggcattttcgcccaaaaggcggtcgtggcccccataggcgcccttatcttctgaattgcacttgcctctgggtccccggttatctgttgggccgcagaagccaccttggaaccagcttgagttcccctccaacaggtgttttccaaggagaaagcaagccagcccacagaaacccctgtggccagccagagctccgacaagccctcaagggtcctgaggactcccagatcttcaggtacagaatctaaggcaagatgcagggaagataaactagcataatgttttgggataaggtccatgggtgagtgtggcaggaataaactgtaagtcctagttttgggtccttgctttaacgccttacccaccccaggttctatgcgcaatagatggaaaccaaacagcagcaaggtactagggagatcccccctcaccatcctgcaggatgacaactcccctggcaccctgacactacgacagggtaagcggccttcacccctaagtgaaaatgttagtgaactaaaggaaggagccattcttggaactggacgacttctgaaaactggaggacgagcatgggagcaaggccaggaccatgacaaggaaaatcagcactttcccttggtggagagctaggccctgcatggccccagcaatgcagtcacccagggcctggtgatatctgtgtcctctcaccccttctttcccagggatactgaggaatggcttgttttcttagactcctcctcagctaccaaactgggactcacagctttattgggctttctttgtgtcttgtgtgtttcttttatattaaaggaagtaattttaaaggttacttaaaaag

SEQ ID NO: 237996 - DNA, 715 bp, Homo Sapiens
  misc_feature (37)..(37): n is a, c, g, or t
  misc_feature (595)..(595): n is a, c, g, or t
tcggcacgaggttcagcgcccattcttctcttgtacntcataagagaacacacagtggagaaaaaccgtataaatgcaaggaatgtggaaaagccttcagtgcgcactcttcccttgttactcataagagaacacacagtggagagaaaccctatacatgccatgcctgtgggaaggcctttaatacttcctccacactttgtcaacataatagaattcatactggtgaaaaaccctttcagtgcagtcaatgcgggaagtcctttagtcctttagctgcagctctcaccttactcgacactgtagaatgtgtaatggaaaatttagcaaataaccaaaactcaaaatgttaattctgattattctgtatcatcaccagtactttgtactttgagtctttttaaatatgctctgttagtttgtatggaatgatatttcattgcacttttaatttaacttaaaaatgccttcccttgactgttgatatgtattttttgtgaagtgtgtgttgaagccttgcagattattttttaaattagaggtttatcactaggtatatctcctaatgctatccctcccccctccccctaatgtnaaatgacgagttaatggtgcagcacaccaacatggcacatgtatacatatgtaacaaacctgcacgttgtgcacatggtaccctaaaacttaaagtataattaaaaaaaaaaaaaaaaaa

SEQ ID NO: 237997 - DNA, 574 bp, Homo Sapiens
ggcacgaggtgggaggtggctgtactgaaactcatttggctgcatatatcagacacaagactcacaacgacccagaaagcattctcaaagatgatgaatgtactcaaacagaacttcaattaattgctgaagcattttgcagtgccctagaatctgttgttggctctttagaacatgatggaggtgaaattctcactgacatgaagtatggacacctttggtcagttcaggcagattctccctgtgttgctaactggccagatttgctttcacagtgtggctgtggattatacaatagccaggaagaactcaactggtctttcttaagaagcacacgtcgtccatttgtgccacaaagctgccttccacatgaagctgtgggctcagccagcaacctgaccttggactgtttgactgcaaagcttagtggcctacaggtggctgtagagacagccaatttgattttggatctttcatatgttattgaagataaaaactaagagaatagcatgttcgtattacaagagaaacaaataaactagtctgttggcaattgaaaaaaaaaaaaaaaaaa

SEQ ID NO: 237998 - DNA, 732 bp, Homo Sapiens
  misc_feature (10)..(10): n is a, c, g, or t
  misc_feature (93)..(93): n is a, c, g, or t
  misc_feature (104)..(104): n is a, c, g, or t
tctagtcatntgtctcatggcagtaagcctcatgtatactaaggagagtcttccaggtgtgacaatcaggatatagaaaaacaaacgtagtgntgggatctgtntggagactgggatgggaacaagttcatttacttaggggtcagagagtctcgaccagaggaggccattcccagtcctaatcagcaccttccagagacaaggctgcaggccctgtgaaatgaaagccaagcaggagccttggctcctgagcatccccaaagtgtaacgtagaagccttgcatccttttcttgtgtaaagtatttatttttgtcaaattgcaggaaacatcaggcaccacagtgcatgaaaaatctttcacagctagaaattgaaagggccttgggtatagagagcagctcagaagtcatcccagccctctgaatctcctgtgctatgttttatttcttacctttaatttttccagcatttccaccatgggcattcaggctctccacactcttcactattatctcttggtcagaggactccaataacagccaggtttacatgaactgtgtttgttcattctgacctaaggggtttagataatcagtaaccataacccctgaagctgtgactgccaaacatctcaaatgaaatgttgtagccatcagagactcaaaaggaagtaaggattttacaagacagattaaaaaaaaattgttttgtccaaaaaaaaaaaaaaaaaa

SEQ ID NO: 237999 - DNA, 602 bp, Homo Sapiens
  misc_feature (35)..(35): n is a, c, g, or t
ttttcccaggaggcgccgacggcggcggcgggggnagaggaagagaaagaagcgtctccagctgaagccaatgcagccctccggctctccgcgaagaagttccctgccccgatgagcccccgccgtgcgtccccgactatccccaggcgggcgtggggcaccgggcccagcgccgacgatcgctgccgttttgcccttgggagtaggatgtggtgaaaggatggggcttctcccttacggggctcacaatggccagagaagattccgtgaagtgtctgcgctgcctgctctacgccctcaatctgctcttttggaatcatcacattccacttctaaaaggagctttaaagatggcctggttgaacgtccttcctttgtgagtgaggaaattaagtgcagattaagtgacttgccaaagatcagatagtccaatggtggcagtgccaggaacagaattcagctttcttgcccctagacagtgtctttcacttgacccttactgagttttgaaccttagaattactaagattgttgttgttgttgtttaataaagaataaagctttgaaaaatttgttaatactttaaaaaaaaaaaaaaaaaa

SEQ ID NO: 238000 - DNA, 582 bp, Homo Sapiens
  misc_feature (17)..(17): n is a, c, g, or t
tgcatgctgaagtgctntacggtttctgccatggacaaattgccttcccaacactgaggacatcatgaagcaaaaacagaagttgccttgggattcattttaatgtaagctggactttgtcatgccagaaacaaggctcggtcaccgtcagcagtttgcagttttccacctcctcccagttcctccgtgtggttgacccagatatctccgttatgcagccgcctccgggggaccacctccctccctttgagtcagccacagacagcctacttgacggccccgctggcccccacattccactgaactgtgcggatgccacagtgaccccctctcaggcacagcatgacctcctgaagtcgagcctgcttgctttgaacctaccagttaaaatctcctcaaaatgtttggataccgcccattggcccctcacagccacgagctccctgaccagtgtgcgtgtgtgtgtgtgtgtgtgtctgtgtgtgtgcttgggacgggtggggaggtcacctttgggtgtgcggtgtgcccccaggacctgtaagtaataaaatctttatttccaaaaaaaaaaaaaaaaaa

SEQ ID NO: 238001 - DNA, 712 bp, Homo Sapiens
tggacacaatggagaccagaaaggtgtcagaacacatttgcctgtcagagcttccttttgtcatgagagcaattggcttttacccatctgaagagaagattgatgatatatttaacgaaatcaaatttggtgaatatgtggacactggaaagctaatcgacaagatcaacttaccagatttcctaaaagttaccttaaccacaagccaccttttggtaacaccatgagtggcatccacaagagctttgaggtgctcggttataccaactccaaagggaaaaaggccattcgaagagaggacttcctgagactgctcgttactaaaggtgagcatatgacggaggaggagatgttggattgctttgcttcactgtttggcctgaatcccgagggatggaaatccgagcctgcaacctgctccgtcaaaggttcagaaatttgccttgaagaagaacttccagacgaaatcactgcagaaatattcgcgactgaaattcttggcttaaccatttcagaagattccggccaggatggtcagtgaagttaccaggaatgtttaaagcacaaaggactttgggtgtgtgtgcatgcacatgtgtgtgttttccatgaggcactgctttttatgcatttccctcccccctctcatctttagaacatttagacattaaagcaagtttctggtgagcaatggaaaaaaaaaaaaaaaaaa

SEQ ID NO: 238002 - DNA, 699 bp, Homo Sapiens
gacacagtgcttctgttggacacacgtacccagcaatatcagttgtaagcacagatgatgatctagcttgacttctgtgacaaatgttgacctttgaggtctaaacaaataatacccccgtcggaatggtaaccgagccagcagctgaagtctctttttcttcctctcggctggaagaacatcaagatacctttgcgtggatcaagcttgtgtacttgaccgtttttatattacttttgtaaatattcttgtccacattctacttcagctttggatgtggttaccgagtatctgtaacccttgaatttctagacagtattgccacctctggccaaatatgcactttccctagaaagccatattccagcagtgaaacttgtgctatagtgtataccacctgtacatacattgtataggccatctgtaaatatcccagagaacaatcactattcttaagcactttgaaaatatttctatgtaaattattgtaaactttttcaatggttgggacaatggcaataggacaaaacgggttactaagatgaaattgccaaaaaaatttataaactaattttgtacgtatgaatgatatctttgacctcaatggaggtttgcaaagactgagtgttcaaactactgtacattttttttcaagtgctaaaaaattaaaccaagcagcttaaaaaaaaaaaaaaaaaa

SEQ ID NO: 238003 - DNA, 555 bp, Homo Sapiens
aatgcagcccacataaacataaaggaggatgtccctggtctgttccatccccacggatggtgttgctgctgggcaacagtgttgcttcttttaagtaccccctttcctcctcacccacctccaaactgactagcactcagagggacttatgataaaggttcagctccaggggtagtacctgagtgtgtgccatgccccttcagaccagctgcttccatcagaattccagggtcacagccccaacagaagcagcagtgcctctgtaggaggggtgctgggctctggccttctcatgcagagaggtccgggacagggtcagtatcgtgggcatgtgtatagcttcccaagttcttttacagtccctgctgggactccctgacttactttggttggttcctagtgctacttgttttacaaactacactttgtagaattgattagattaccttgtttatttaatgtgagtttgtgcctttttgtctcaatcttccaatacaggtatattgagaaaaaaagcagtctaataaaatcctagacagaaaaaaaaaaaaaaaa

SEQ ID NO: 238004 - DNA, 548 bp, Homo Sapiens
gaagaggaaatgaaggtattgccgctgttactgatatacctttaggtaaagttcacttagaagctttaaaaaaaaaagtaattaaattcttttacaagtttccattgaggtgtgatatacatacagcacaggtgctgtatgtcttagatatacagcacaggtgctgtatgtcttagatatacagcacaggtgcacaggtcttagatatacagctcagtgaagcttcagaaatgcatgcatgcatgtagccatgactcagatcaagatacggaagagcccagcactccacgatgctccatcatgcccctttgcagaaaatactgcctcctccagtaaacactattctgatgtcactatagattagttttgcctcttcgtgaactttgtataaatagaactgaacaatatgaactgtcctgtgtgatttcttgtatttcattatgggtggtgtgctattgtatcaacagggtatttgggtggttttcagatttgtgatattaacaataaaggaattataaatattgtagtacaaaaaaaaaaaaaaaaaa

SEQ ID NO: 238005 - DNA, 774 bp, Homo Sapiens
  misc_feature (75)..(75): n is a, c, g, or t
agaggagaaagcacatgccaagtcagcaaagaaaagtagaattcgaaaactttttaaaaatatacgtaaggattntcacaatgctgcactgggctagaaactgaagctaaaacagatacgtggtccctgctgctatggggcttccgttctagaggcaaggacaggttgtgatgagggttctgaaggatagagaccaagcagggagggtgttgaggaggcttctgcgagacctgaaggatgggaagccaggaagtgggaggggtgggggtccaggctggaggggcccaatgtaggtgtagagggactacagccctgaggggctgctccatgcggcattcttggaggtccaagaggggcagcgccaccttgggccaggctcctctccagcagccttggtatggggtgggggtgggaagacccctgatgcagcctgtcctctgggtgtgggggtggaggagagggctccaggggacccagccagccttgaccctggaggaaagtcaggtgggctcagagagagccctcaaatctgggccctgggtcagggtggggtcaagtccagccttgaagagaatggactctggaatctgacgtctgggtttgaatccagcttccaacactcactggctgtgtgactttgggcaagataacttatcctcttgtccccatgtgtcattggagataaactacccacctaccagattgttgtaccatgctgggcaaacactaagtgcttaataatggtagcccactgctaaaaaaaaaaaaaaaaaa

SEQ ID NO: 238006 - DNA, 774 bp, Homo Sapiens
  misc_feature (18)..(18): n is a, c, g, or t
  misc_feature (20)..(20): n is a, c, g, or t
  misc_feature (43)..(43): n is a, c, g, or t
  misc_feature (92)..(92): n is a, c, g, or t
atgatcagatgacagcananggaaatgaagaccaatcagctgntatgggaatcagaagcagatgacaacatgaaagcaagctccaagagacncaggacagggcaaaacgacaagaggatctcatcatgaaagtggaaaatctggctctcaagaacagatttcaggctgtactggatgagctcaaacaaaaggaagaccgagaaaaggagcaactcagctctttgcaagaggagctagaatcactcctagagaagtaaaaagaactgatatttaatttcagtcttcagactggtcagcattagaaaattcttggctttattgtactgggtattaagaccttgctcttcctagtccttttaatgctgtgtgttctgttaagttctttcatttgtttgtaattttgtttttcagcaaatttatattgttttgctaggtgttcatcctataagaagcaggattgtataggcagaaaaatgattgtaggaaagttgcaggattagcggaatgtatggttcaaccttaattatagcttcattgcaggactttactgtttctccattttctagaagctgctgttgctgctttgtgatgacgtgagatcaataagaagaacctagtctagagacaatgatgctagtttgcatatgttttcctatgcaatagttgttttcccagttattcaaagcagctttctatatgtagagatgcaaattattaagttgtttccaatacaataaataaaagcatctgtttttcaaaaaaaaaaaaaaaaaa

SEQ ID NO: 238007 - DNA, 636 bp, Homo Sapiens
tcttcaaccaaaaaagaaagaaattgcaaaggaccaaaaaaatgttggggaatctatacattataagggacttaacaactaaagggcaacatatagactttagatcctaatttgagcaaaatctaaaatcaattattaggcaatcagaaaaatttgaacacagactagatatttgaggatattaaggtactatattattgaagattccatggttatgttttttaaagagttcatgccttttagagatacatactaaagtatttgtaaataaatgacatgatctagaatcagtaattttgtgtttggggtgtgggggtggtgaaagggaagtagaaccgaaacaagattagtcctgagttaacaatggctgcaagctggatacatggaattcagcacacttttctccctcttactgattatgcttttgaaattttctcttgtaaaacatttagaaaacaaaaacaaaaaaaatgtgatttgtttctgtcttcaaaatctcattagaattttttcactggaggaagattttcccttgcttctgcataaaattttaactccataacttataagctcactctttattgttactttctaattgacaaataaaaattgtatattaaaaaaaaaaaaaaaaaa

SEQ ID NO: 238008 - DNA, 709 bp, Homo Sapiens
  misc_feature (22)..(22): n is a, c, g, or t
agctcccacttcctctctgctntagttcattttctttagagcagcccgagtgatcatgaagtgcaaatcttgccatgtcagtcccctgcttagaaccctccaatggctcactttctctttaggcaaaagtctttaccccatgccttctcccatctcatctcaaccccctcatttgttggctgtctgctgtcagccactcttctttcaggtcctcagatgcactgcaccctctcctgcctgggggtctttgctcctgctactacctctgcttgaacagctcctcaccttccttcctccaaccctacccttgtataggtgacttttgttcatccttcagaattcaactcacatgtctcttgcatggagaaccctcacctactgtgttgagaccctgtccagcccccaggtgggatcctctctcgacttcccatacatttctttcacagcatttacatagtccatgatagtttacttgtgggattatttggttaatctttgcctttaacaccagggttccttgggtgaaggagcttctttatcttggtaacagcattatttcaagcataacttgtaatatagttatattacatatataacatatatatatataacataacatatataacatatataacaagcataacttgttatatagtcttgtatatagtaagacctcaataaatatttggagaacaaaaaaaaaaaaaaa

SEQ ID NO: 238009 - DNA, 670 bp, Homo Sapiens
atgctccacccacacctccatgaccaagggcgccagagtgctgcaactggggcgtgggccgctctctgcttttcctgtctgactctgacaagtcctccctcactgaatgtagaatcgttgccaagtttctgagaagtgtcgattccctgttaacatggatatcagttctgcctcacatttcccacttgaggttgaggcgtactggagacaacacctcagaccatctgaaccccatcagtggatgaaaatggggctgttaatatactctaaaagccatactaaaaatgctctgagggaactggctaagaatagtgggcctggtgattgtctatcacgcaaggctttgttttgtactgttcagaaatctgtcacctttctgcctgcccttgtttcctgaatgaaatgcttctggggttatttatgaaaggagtgatcctggggcaggcaggaggcagtgggcttcatggctccttgaagttattactgatcttgaccttctctttggctacctttagacaaagaatacgccaatcaatacttggggctctaagttttacaattgatatttatttgtatcatctctttgtctaggaatgtaaaagtgattctaaactaagatgtgtaataaaaatcaatcagatttattgtacctacaaaaaaaaaaaaaaaa

SEQ ID NO: 238010 - DNA, 659 bp, Homo Sapiens
cgacagccaagcacgatctactcagggttcaggagcagctgcacatggctgaaaaggaattagaaaagaaatttcagcaaacagcagcttatcgaaacatgaaagagattcttaccaagaagaatgaccaaatcaaagatctgaggaaaagactggcacaatatgaacctgaagattaaaactgaagatttcctctggaagctaccacatgcaaacatacaagcagtctcacctcaggcatgtattttgaaaagcattttgtcatatcccctctccttatttttctaatatttagactttgaatatttagaactagagttcctattttcagctagttgaaaacagagaaaacctagtgattctgtctggtcatcccacacacctctctactgagtgctccagagtcttagctcacatgcactgagaattctttacagcaaagaagagatttttagagtgggaagaagaggcttatccttctgcattagtataaagagtctgtatttttaataaatgttaaataagctaacaatgtttgtacttatgcattccccatgggtaaaaataaataatagcattgttaaagatagttattaccaaaaaaagagagttattacaaataaatatgtctctttatttttaaaaaaaaaaaaaaaaaa

SEQ ID NO: 238011 - DNA, 628 bp, Homo Sapiens
aaattgattccctatctccccctcctcctaccttttctgcctttgtgattccattgttcctatctcattgaggctttcccaggcattcgaatttagttagtaggtcatttctaatctctgggccttgtcttttctctctccgttcccctccttccctaccacatattttttgtttattctgaggtggtttgtttctgaaagttaatctaggtcaccttctatatcctgtgctttctagttggctttagacatcttgttctagcaacaatgatggtagcagctctctccctgaccttgccccatgtgctctccttctgtcaaggccatttgtgtgtgtactgcggcaggtgtgtgtgtggggggatgcgcccagactgttctcacaatgtcctcagtttttcaggttgtctgacagctttatgtacagcgtatttttagaaaaacttaaatatacttctttatttagggttttattctgatgagcaagtttgtgtgtatatgtgtgtatgagcatttgtatgtatatatacttatacagatctatattatatatacagtttttgtactatcatttaaaataaaaatgtttctcaataaaatgtcaaagccgaaaaaaaaaaaaaaaaaa

SEQ ID NO: 238012 - DNA, 665 bp, Homo Sapiens
tggattctgatgaggatcctcttccagattacagacttccagcttcttgctgtgtcctcacatggtggaaggaacaagtaatctctctggagcctcttttaaaagcccaccaatcccattcattgaggattccaccccagtgacctaatcacttcccaaagggccatctcctaatgctataaccttagaggttagggtttcaacatatgaattttgaggggacagaaacattcagcccatagcaggatgagaaaaagaaaggaaagtacaacaaagaacatcaaccataaggaacaccatgacttctgatatttaatatcatggatcacagattgtaggagtcgagaaacagaataaaaagacaaggcccaggcccagtgagcttttgatgcttgaggctcctcatgcccttgctctcccactgacctcagtgctcagcactggctttcttctcctggtgatattttccatttatcttttggtgtaaacattttagagatgagagaagtagggagcttatcattatttagtctgatcagacaatatcttcacttttaagttatgttcagaatttcattgtcctgttctttttaagaatcatatgagattatttttgtgtatgtgaataaactatgaagcattttcttacaaaaaaaaaaaaaaaa

SEQ ID NO: 238013 - DNA, 748 bp, Homo Sapiens
  misc_feature (10)..(10): n is a, c, g, or t
  misc_feature (37)..(37): n is a, c, g, or t
  misc_feature (77)..(77): n is a, c, g, or t
  misc_feature (93)..(93): n is a, c, g, or t
  misc_feature (195)..(195): n is a, c, g, or t
tacaatgctntggacaaagtgctgtctgtcatcggtntgaaattgaaattcttgatcccaacaatattcccaaggcntcaatgacaagtggtnggttcagcagttccaacacacagtccttccctcagtgactcccttggcaaccctcatctgcacactgattgccatattgccctctattttctgtctttggtntaaaccccaagggcccagaggctttctccgatgtctaactctttgtgccttgagctcctttatgtttgggtggcatgttcatgaaaaagccatacttctagcaattctcccaatgagccttttgtctgtgggaaaagcaggagacgcttcgatttttctgattctgaccacaacaggacattattccctctttcctctgctcttcactgcaccagaacttcccattaaaatcttactcatgttactattcaccatatatagtatttcgtcactgaagactttattcagaaaagaaaaacctctttttaattggatggaaactttctacctgcttggcctggggcctctggaagtctgctgtgaatttgtattccctttcacctcctggaaggtgaagtaccccttcatccctttgttactaacctcagtgtattgtgcagtaggcatcacatatgcttggttcaaactgtatgtttcagtattgattgactctgctattggcaagacaaagaaacaatgaataaaggaactgcttagaaaaaaaaaaaaaaaa

SEQ ID NO: 238014 - DNA, 741 bp, Homo Sapiens
  misc_feature (14)..(14): n is a, c, g, or t
  misc_feature (55)..(55): n is a, c, g, or t
caccactgcatacnttggatcaacataatcagaactgcctttataagaattaatntggaagagattcacgatttcaccatgaggacacttatctctttcagtggtcctcccaagaaattatttaacaaactgaaaggagattttgattaaaattttgcagaggtcttcagtatctatatttgaacacactgtacaatagtacaaaaaccaacatagttggttttctagtatgaaagagcaccctctagctccatattctaagaatctgaaatatgctactatactaattaataagtaaacttaaggtgtttaaaaaactctgccttctatattaattgtaaaattttgcctctcagaagaatggaattggagattgtagacgtggttttacaaaatgtgaaatgtctaaatatctgttcataaaaataaaaggaaaacatgtttcttcaaattgcataatggaacaaatggcaatgtgagtaggttacatttctgttgttataatgcgtaaagatattgaaaatataatgaaataaaagcatcttaggttataccatctttatatgctattgcgtttcaatatttaagatttaaagtgattttttggtcacagtgttttgttgataaaatttttttagaattgaagtttgaattctaagacttgaaacaacctgatcactgaagccaactttgtcccagcacattccttaagtcctaattgggaaaaaaaaaaaaaaaaaa

SEQ ID NO: 238015 - DNA, 823 bp, Homo Sapiens
  misc_feature (14)..(14): n is a, c, g, or t
  misc_feature (83)..(83): n is a, c, g, or t
  misc_feature (98)..(98): n is a, c, g, or t
  misc_feature (183)..(183): n is a, c, g, or t
atctatgtctcatntcatatctaactcatgttatgatacgaatcaatatatatgttgatatcatgagttatataatatgagtntgacatgatcatcanacatagtatatacatatcaacataactatgttgatgattcatatcaaattctcaatgcaggtcattactgtaagttttccatttntgttacaaataataagtaagatgatactgtaaaatctctgttcttcacaaggtacctctttaattcatagccttttatgtcagcattattcttcttttgggggttggtcagcaactttgagtgccattgcaagcagcatcatttaagtagttttataaagaaaagaagtctgatatcttgggcagcttgctgcttactggggagaccagcatgcttagacacttattgccagggttaaacatatgctctggcaccaagttcaaatctttcctccccatttgtgagctgtgggactttaggcaagttatctaaatgctgctatgctatagtctccccacctgtaaaacagaggatgataccaataccttcctcatagggtacataagattaaataaatacaaacttgtacttaaaatgtagctctcaataaatgtgcattatgatttacatacgaaataatagcatttaacaaatgtaggtagaattttaagtatcatgttaaaattaggatacgaaatgcctctgctgacattcttgttactcttttctccacagtcaaaacctgaatcagaatatttcaaaagagaggaaataaaagttcagcttaaaactgttctgccctaaaaaaaaaaaaaaaaaa

SEQ ID NO: 238016 - DNA, 671 bp, Homo Sapiens
  misc_feature (69)..(69): n is a, c, g, or t
tcagactaaagagattgtgcagaaattacaaggccatacagatgttgtgatctcagcagcttgtcatcntacagaaaacctcatcgcatcagcagcattagaaaatgacaaaacaattaaactgtggatgagtaaccactaatccctttgaaaatcaagtagtagagccaagttggccaaaaaacttggatatttaaaaagacggtttcttttaattttggcagtttggtattttaaaaattgtctattgttaaattttgagattcatacactacatttacaaaatgagatagttgaaaaagcacatctagaattcagcttctgactaccaatcttttttgagcaactttttgtaatttttatggatttatgtcacttttattacagggatatattgcatagtggtgaaatctgggcttagtataccctcacccaaatagtatacattgtacctagtaaatactttcccatctctcaccccactcccacctttgaaggctctagtgtctatgattctgctctccacgtccaggtgtacacattgtttatctcccacttacgagaacatgtggtttttgactttctgtatcattacttcacttaatggcctccaggtccatccatgttgttgcaaaagataagatttcattattaaaaaaaaaaaaaaaaaa

SEQ ID NO: 238017 - DNA, 662 bp, Homo Sapiens
  misc_feature (39)..(39): n is a, c, g, or t
  misc_feature (174)..(174): n is a, c, g, or t
gaggccatggctgatctgcacaccctcagcaaggactcntacaaagacagcaccctcatcatgcagctgctgcgagacaacctgacactgtggacggccgacaacgccggggaagaggggggcgaggctccccaggagccccagagctgactgttgcccgccaccgccccgccntgccccctccagtcccccaccctgccgagaggactagtatggggtgggaggcccccacccttctcccctaggcgctgttcttgctccaaagggctccgtggagagggactggcagagctgaggccacctggggctggggatcccactcttcttgcagctgttgagcgcacctaaccactggtcatgcccccacccctgctctccgcacccgcttcctcccgaccccaggaccaggctacttctcccctcctcttgcctccctcctgcccctgctgcctctgatcgtaggaattgaggagtgtcccgccttgtggcttagaactggacagtggcaggggctggagatgggtgtgtgtgtgtgtgtgtgtgtgtgtgtgtgcgcgcgcgccagtgcaagaccgagattgagggaaagcatgtctgctgggtgtgaccatgtttcctctcaataaagttcccctgtgacactcaaaaaaaaaaaaaaaaaa

SEQ ID NO: 238018 - DNA, 830 bp, Homo Sapiens
  misc_feature (82)..(82): n is a, c, g, or t
gaagaagcatgatactgtgtagtacaagaaatggaaagattaaccaatttaattataactatacgtaacactctacggaccnttgaaaaagctattaagggtgtggttgtgatggattctgcattggaggcactctccagtagcttacttgttggaaaggttccagaaatatgggccaaacgttcatacccaagccttaagcccctgggaagttacatcacagatttcctagcccggttgaactttttacaggactggtataattcaggaaaaccttgtgtgttttggctgtcaggtttctttttcactcaggcctttttaactggagctatgcagaattatgccagaaaatataccacccctattgatttgctaggatatgaatttgaggttatcccatctgatacatctgacacatcaccagaagatggtgtttatatccacggactgtatctcgatggcgcacgctgggaccgagaaagtggattgcttgctgaacaatatcccaaacttctgtttgacctgatgcccatcatatggataaaaccaactcaaaaatctcggattataaagtcggatgcctatgtctgtcccctctacaagacaagtgaacgtaaaggaactctttccactacgggacattctactaactttgtcattgcaatgttgttaaaaacagaccaacctactcggcactggatcaagcgcggggttgctttgctttgtcagttggatgactaaattggacaaatttataaaacatccaaaagtttaaaaaaaaaaaaacctgtcctacttaaaatatatacattataaaaaaaaaaaaaaaa

SEQ ID NO: 238019 - DNA, 787 bp, Homo Sapiens
  misc_feature (16)..(16): n is a, c, g, or t
agtcatcccctccacntgatgcctgctgtgtctgatcttaaggtctatatattgcacctcctcattcaacacagggctggaggttctacaacaggaaatcaggcctacagcatcctgtgtatcttgcagttgggatttttaaacatactataaagtctgtgttggtatagtacccttcataaggaaaaatgaagtaatgcctataagtagcaggcctttgtgcctcagtgtgaagagaaatcaagagatgctaaaagctttacaatggaagtggcctcatggatgaatccggggtatgagcccaggagaacgtgctgcttttggtaacttatccctttttctcttaagaaagcaggtactttcttattagaaatatgttagaatgtgtaagcaaacgacagtgcctttagaattacaattctaacttacatattttttgaaagtaaaataattcacaagctttggtattttaaaattattgttaaacatatcataactaatcataccagggtactgcaataccactgtttataagtgacaaaattaggccaaaggtgatttttttttaaatcaggaagctggttactggctctactgagagttggagccctgatgttctgattcttcaaagtcaccctaaaagaagatctgacaggaaagctgtataatgagatagaaaaacatcaggtatggaaggctttcagttttaatatggctgaaagcaaaggataacgaattcagaattagtaatgtaaaatcttgataccctaaaaaaaaaaaaaaaaaa

SEQ ID NO: 238020 - DNA, 696 bp, Homo Sapiens
  misc_feature (43)..(43): n is a, c, g, or t
gcacttggtctgcttcgagatggaaggacacttataggctttntaagaagcattgatcaatttgcaaacttagtgctacatcagactgtggagcgtattcatgtgggcaaaaaatacggtgatattcctcgagggatttttgtggtcagaggagaaaatgtggtcctactaggagaaatagacttggaaaaggagagtgacacacccctccagcaagtatccattgaagaaattctagaagaacaaagggtggaacagcagaccaagctggaagcagagaagttgaaagtgcaggccctgaaggaccgaggtctttccattcctcgagcagatactcttgatgagtactaatcttttgcccagaggctgttggctcttgaagagtaggggctgtcactgagtgaaagtgacatcctggccacctcacgcatttgatcacagactgtagagttttgaaaagtcacttttatttttaattattttacatatgcaacatgaagaaatcgtgtaggtgggttttttttttaataacaaaatcactgtttaaagaaacagtggcatagactccttcacacatcactgtggcaccagcaactacttctttatattgttcttcatatcccaaattagagtttacagggacagtcttcatttacttgtaaataaaatatgaatctcaaaaaaaaaaaaaaaaaa

SEQ ID NO: 238021 - DNA, 735 bp, Homo Sapiens
ttctgtctcaggactgaaggacaaaatccaccatgtggacagcctccaccagctgttttctgccatatcaccagaacagattgactttcctccttttgtccttgaatatgatgccagggtaagaagtaccagaagttctccctcacctggtatggtatattaactgttctatagagcagcacttacgagcacaacatcctgtcattaccagatattaatgtaaattagtgagtcttaataaacttggtaatatcatttaacatactttccctatgataactttaggaaaaggatttgtcccaagagaggcattttctccagataaacgtttcagtgggagatctctctgctgtgagttcagaaccaattttcgtttgtattgtaagttttctaccatatttaaaacagatacctctgcctaattttcttaagattgaatggctttccatctacacagagccagaagaatttattggtgatcacttttagaattaattgcaaatcatgtggcctatctcagtagtctttaccctgctaaaagtttcatttatctaaaaggttgtataatgtttttaagagcatcatctgataatattattgttgttatttatagatgcgtttatggatctgttacataagcactagtcacaggactactcgtgaatttcatcaatttattctattgtgtttattcatgatatcaccttagtaatttttgaaaaaaaaaaaaaaaaa

SEQ ID NO: 238022 - DNA, 701 bp, Homo Sapiens
  misc_feature (40)..(40): n is a, c, g, or t
ggaatttagtgtctgagcctctgtctgttactgtagtatntaaaatgcatgtattataatcatataatcataactgctgttaattcttgattatatacctagggacaatgtgtaatgtaagattactaattggttctgcccaatctcctttcagattttattaggaaaaaaaaataaacctcctgatcggagacaatgtattaatcagaagtgtaaactgccagttctatatagcatgaaatgaaaagacagctaatttggtccaacaaacatgactgggtctagggcacccaggctgattcagctgatttcctaccagcctttgcctcttccttcaatgtggtttccatgggaatttgcttcagaaaagccaagtatgggctgttcagaggtgcacacctgcattttcttagctcttctagaggggctaagagacttggtacgggccaggaagaatatgtggcagagctcctggaaatgatgcagattaggtggcatttttgtcagctctgtggtttattgttgggactattctttaaaatatccattgttcactacagtgaagatctctgatttaaccgtgtactatccacatgcattacaaacatttcgcagagctgcttagtatataagcgtacaatgtatgtaataaccatctcatatttaattaaatggtatagaagaacaaaaaaaaaaaaaaa

SEQ ID NO: 238023 - DNA, 718 bp, Homo Sapiens
  misc_feature (122)..(122): n is a, c, g, or t
taggatggcttgaggacttcttgatgggcatggacagcaccctggagccaagtgcaggagcaccactcgccatgtcctcaggcacaacccaactcagggccacagccaccaccctcatcctntgttgcctcctcatcatcctcccctgcttcatcctccctggcatctgaggagagtcctttagagtgacaggttaaagctgataccaaaaggctcctgtgagcacggtcttgatcaaactcgcccttctgtctggccagctgcccacgacctacggtgtatgtccagtggcctccagcagatcatgatgacatcatggacccaatagctcattcactgccttgattccttttgccaacaattttaccagcagttatacctaacatattatgcaattttctcttggtgctacctgatggaattcctgcacttaaagttctggctgactaaacaagatatatcattttctttcttctctttttgtttggaaaatcaagtacttctttgaatgatgatctctttcttgcaaatgatattgtcagtaaaataatcacgttagacttcagacctctggggattctttccgtgtcctgaaagagaatttttaaattatttaataagaaaaaatttatattaatgattgtttcctttagtaatttattgttctgtactgatatttaaataaagagttctatttcccaaaaaaaaaaaaaaaaaa

SEQ ID NO: 238024 - DNA, 679 bp, Homo Sapiens
gattgcctaacgtgaaacaagcaaacatctggagcacaaagacaatgaacttagacaaaagaagaaggagcttcttgagagaaaaaccaagaaaagacaactggaacaaaaaatcagttccaaactaggaagtttaaagctgatggaacaggatacttgcaatcttgaagaggaagagcgaaaagcaagtaccaaaatcaaagaaataaatgttcaaaaagcgaaacttgttaccgaattaacaaacctaataaagatttgtacttctttgcatatacaaaaagtagatttaattctccaaaatactacagtgatctctgagaagaacaaattagaatcagattatatggccgcatcttcacaactccgtcttacagagcaacatttcattgaattggatgaaaatagacagagattattgcagaaatgcaaggaacttatgaaaagagctaggcaagtatgtaacctgggtgcagagcagactcttcctcaagaataccagacacaagtacccaccattccaaatggacacaactcctcactccccatggttttccaagaccttccaaacacattggatgaaattgatgctttattaactgaagaaagatcaagagcttcctgcttcacgggactgaatcctacaattgttcaggaatatacaaaaaaaaaaaaaaaa

SEQ ID NO: 238025 - DNA, 700 bp, Homo Sapiens
  misc_feature (60)..(60): n is a, c, g, or t
cattgggtcatccgagagactgtcctgtgaaccctggaagacagaaggccactccaaggngaaggatccctctcctctctgccatttcttggctgggagctgtggtccacctcaaaaaaaaaggagcactctggaggacacgttttcccacctgttggctcccgtgtctgctgactgagggcattcaggagtaaatgcacaggtcggtccaggcccgtctgggtttgggatgcactgagttggaggttatgaaagctttgatcctcttcttcctctgctgggcctcgcagcattcccaagggtcacatgccctggcatgggcagaaactgggctaatgattctttgcccacttcacccctcgtgtctctctttgttgctaagttctttccctcttggaaggacagatctgccgggctgctatttatagttgcctttgtcctttcactgctctgcgatttggcaggaaataaggcgattaaccctatgtgtccacaagcctcaagccttgtttcaggtcaccctcaaatcacactctctttaggcaaaacaggaaacttcttaagtgacaaattttaatgccagacatttaaggagaggattattgttgattccatttactcatgcttgcaaaactagagacccctaaggcagaactgagaataaacatgtttactttgggccaaaaaaaaaaaaaaaaaa

SEQ ID NO: 238026 - DNA, 726 bp, Homo Sapiens
  misc_feature (14)..(15): n is a, c, g, or t
  misc_feature (18)..(18): n is a, c, g, or t
  misc_feature (88)..(88): n is a, c, g, or t
tgccccacgcagcnnccntgcaggaaaactgaggcccttgggcacctcgacttgtgaacgagttgttggctgctccctccacagcttntgcagcagactgtccctgttgtaactgcccaaggcatgttttgcccaccagatcatggcccacgtggaggcccacctgcctctgtctcactgaactagaagccgagcctagaaactaacacagccatcaagggaatgacttgggcggccttgggaaatcgatgagaaattgaacttcagggagggtggtcattgcctagaggtgctcattcatttaacagagcttccttaggttgatgctggaggcagaatcccggctgtcaaggggtgttcagttaaggggagcaacagaggacatgaaaaattgctatgactaaagcagggacaatttgctgccaaacacccatgcccagctgtatggctgggggctcctcgtatgcatggaacccccagaataaatatgctcagccaccctgtgggccgggcaatccagacagcaggcataaggcaccagttaccctgcatgttggcccagacctcaggtgctagggaaggcgggaaccttgggttgagtaatgctcgtctgtgtgttttagtttcatcacctgttatctgtgtttgctgaggagagtggaacagaaggggtggagttttgtataaataaagtttctttgtctctttaaaaaaaaaaaaaaaaaa

SEQ ID NO: 238027 - DNA, 670 bp, Homo Sapiens
ccaagaattcggcacgagggtatttaaagctgctgactctaagcacacaaatatggtggattataatacattcagagacatattgatgtctttgactgttggaaaccttgcagagcaagaatttgtaaccattgcacgtcactaccgtgtgcctgagggcacatgttcagatatggatttcttaatcgcactggcccacgaaaagttcaagaaaaatatgtttgagaatttcgacactttcatttattcctgtgtgtatgaagatcgagaaaaaaaaaatgtattacccaccaaagacattaaaaggctgtgcaaatcctccagattacctttgagtgatgatcttctagaatccttattgtcaaggtttgaagacagtgaaaaacaaatagattataagtcatttttctctgccctgaactggagaaagaatccagtgcctgaattgcaaccagcatcataccttaaagagagatgtgaagatgtttggcttggtatgccatcacctattcctgcgaaatacattgactactggacctttttgaaggacgcgtttggcttagaggaggaataaccatgccagttttggtcaattctctatgatttacttctctcattttgccacatttactttagtagatataatttcattaaaaaaaaaaaaaaaaaa

SEQ ID NO: 238028 - DNA, 443 bp, Homo Sapiens
ggcacgaggctttaactgagtccatttaacttgctttcttttttttttttttttttttgaggcagagtcttgctctttcgcccactgtactccagcactccagcctgggcgacagagtgagactctgtctctacaaaaaaaaaaaaaaaaaaaagtaacccaagggagggagctaccctctagtcgggcagctgatactgcttccttgcatggatacatgggagggagacgttatagattaagaaatgatagcaagataaacaaaatgatttgttgggtatcttttactttacatttgttatttgcagaggagtgttgtatatatagatgttattttatgtcacactgcttcaatgatacctatatccatgtgtttgtatccatgtttttatccattcaactgtattaaaaggtgttgggacaggaaaaaaaaaaaaaaaaaa

SEQ ID NO: 238029 - DNA, 658 bp, Homo Sapiens
gcggctgtaggcttttttttttttttttttttttttttgctggtgtctgagcttcagtataaaagacaaaacttcctgtttgtggaacaaaagttcgaaagaaaaaacaaaacaaaaacacccagccctgttccaggagaatttcaagttttacaggttgagcttcaagatggtttttttggtttttttttttttctctcatccaggctgaaggattttttttttctttacaaaatgagttcctcaaattgaccaatagctgctgctttcatattttggataagggtctgtggtcccggcgtgtgctcacgtgtgtatgcacgtgtgtgtgtccattagacacggctgatgtgtgtgcaaagtatccatgcggagttgatgctttgggaattggctcatgaaggttcttctcaagggtgcgagctcatccccctctctccttccttcttattgactgggagactgtgctctcgacagattcttcttgtgtcagaagtctagcctcaggtttctaccctcccttcacattggtggccaagggaggagcatttcatttggagtgattatgaatcttttcaagaccaaaccaagctaggacattaaaaaaaaaaaaaagaaaaagaaagaaaaaacaaaatggaaaaaaaaaaaaaaaaaa

SEQ ID NO: 238030 - DNA, 792 bp, Homo Sapiens
gatcggactcaaggacaaaagaaagtgctagcatgatggaaagtaaagatgtacacaaaagatacttcagattgagtgggaacataagaaaatggagatggaaagggaagatctaaatcagaaggcttgggatattcagatgctatttttttcaagagatcgtcaaaagtacctaaatgaaccaaactatgaggctctgattagtattcagattggaataatggaacaaaccattgctgttttagataagatgcacaaaaagaatgtggaaaactgcaagaaactactcaaaaaacttggaaagttcagcaatcaaaaagatatagcaaattatgccctaagctgcaatctacgagaagagttggtagctgtctcagagagaaaagacatctgtaatgcaatggggtctaaactgacttgtgaaaagattgtcaaagaacggtatgaaaacatgatgcaacagcagaagttaacaaatatttcaaaacaacaagctgaacagatttcaatactacagactgaagttgaaagattaagaatgaaaacatttcctgctcttgttcaaatgtaaaaacgctggcaggaaaacacaaggccaaatcaatcatttaaaaaatcatttcatttgggtaaaatgatttccttttctttcttactgggaaattgaagtagcatgtcctctgagttgcatgttttagataaaaaattgtttaattttagccttaattgtatacaaatttttgtcctgcatgaataaatgtgtaaaataccatgaaaaaaaaaaaaaaaaaa

SEQ ID NO: 238031 - DNA, 587 bp, Homo Sapiens
gagtggagtatggaaagggaaacatagtaactctacaggggagaaaaatgacaaatgacgtcttcaccaagtgatcaaaattaacgtcaccagtgataagtcattcagatttgttctagataatctttctaaaaattcataatcccaatctaattatgagctaaaacatccagcaaactcaagttgaaggacattctacaaaatatccctggggtattttagagtattcctcaaaactgtaaaaatcatggaaaataagggaatcctgagaaacaatcacagaccacatgagactaaggagacatgtgagccaaatgcaatgtgcttcttggatcagatcctggaacagaaaaagatcagtaatgaaaaaactgatgaagtctgaatagaatctggagtatttttaacagtagtgttgatttcttaatcttgacaaatatagcagggtaatgtaagatgataacgttagagaaactgaaactgggtgagggctatctaggaattctctgtactatcttaccaaattttcggtaagtctaagaaagcaatgcaaaataaaaagtgtcttgaaaaaaaaaaaaaaaaaa

SEQ ID NO: 238032 - DNA, 770 bp, Homo Sapiens
acatgcgacacacaatgagggtgtcatgacaatgcatgacacgtacggttatatgtggcagtgtgaccccttgacatgtggcgttacatgaaagtcagtgtggcacgtgttctgtggcatgggtgctggcatcccaagtagcaggatacatgattgttggtctatatatgacacatgacaaatgtccatgtcacaggactcatggctggccagatgacctcaggctggcccaagatctaatttattaatttttaaagcaaatacatatttatagattgtgtgtatggagcagctaagtcaggaaaagtcttccgcccgagctgggaggggagagtgtccatgcactgaccagtccaggggctcaagggccagggctctggaacaagccagggactcagccattaagtcccctcctgcctcaatcctcagcctacccatctataaacttgatgactcctcccttacttacatactagcttccaaggacaggtggaggtagggccagcctggcgggagtggagaagcccagtctgtcctatgtaagggacaaagccaggtctaatggtactgggtagggggcactgccaagacaataagctaggctactgggtccagctactactttggtgggattcaggtgagtctccatgcacttcacatgttacccagtgttcttgttacttccaaggagaaccaagaatggctctgtcacactcgaagccaggcttgatcaataaacacaatggtattccaaaaaaaaaaaaaaaaaa

SEQ ID NO: 238033 - DNA, 739 bp, Homo Sapiens
acgaggtgacatatagaactttacaaacatatgtccaaggactctaaattgagactcttccacatgtacaatctcatcatcctgaagcctataatgaagaaaaagatctagaaactgagttgtggagctgactctaatcaaatgtgatgattggaattagaccatttggcctttgaactttcataggaaaaatgacccaacatttcttagcatgagctacctcatctctagaagctgggatggacttactattcttgtttatattttagatactgaaaggtgctatgcttctgttattattccaagactggagataggcagggctaaaaaggtattattatttttcctttaatgatggtgctaaaattcttcctataaaattccttaaaaataaagatggtttaatcactaccattgtgaaaacataactgttagacttcccgtttctgaaagaaagagcatcgttccaatgcttgttcactgttcctctgtcatactgtatctggaatgctttgtaatacttgcatgcttcttagaccagaacatgtaggtccccttgtgtctcaatactttttttttcttaattgcatttgttggctctattttaatttttttcttttaaaataaacagctgggaccatcccaaaagacaagccatgcatacaactttggtcatgtatctctgcaaagcatcaaattaaatgcacgcttttgtcatgtcaaaaaaaaaaaaaaaaaa

SEQ ID NO: 238034 - DNA, 651 bp, Homo Sapiens
tgagcagttggtaatgagttgccctatgtgcttgtcgcaagcagtcacagagatgagccctattacttgatattcaggaacaaaggtacctgaacattctgataattatctcagcatacttgaggtttccttttttaagtgttcgaggttataacaagagacagccaaggacctacaagacagttgacttgattttgcacagtgtaacagcgcagttgcattctggccactttgaccttatagctcccaaatgatgagtttgtcatctttatgaactcatgacaggataataagcttgaagacctgctgtagttagatatgggctttaatccttcccatgcaccagtcagctgaacaaaagcataagccaaacatcctgtttaaactgtagaataaccagatattcccatcaggttaaagacttcatctagatgatgccccccagagatgcctttagtgtaagtagctggcttggggtatcagcaaatttcaggtatagttagataaacaggtacagggcctgcatactattaaaccatagtttgtggcacccgcttttctaactccacctgttagaagctatgtgtttgaaggaatgaatcagtgcagtataaataaaattcttttgtaaggagaaaaaaaaaaaaaaaa

SEQ ID NO: 238035 - DNA, 686 bp, Homo Sapiens
ggaatgcaatgctttatggttaccaagttgggctgtttaagaactcaaatgaaaatcttttacctggatacctcaaaccagaaacaatggttatgatgtggaccccagtccctaacacagagatgtcttgggataaagagggtaaatatgcaatggcgtggggtgttgtggaaaagaaacaaacgtatggttcgtgtagaaagcaacggcattatgcttcacatactggaggggcagtgggtgccagtagtgtcctgctggtccttcctgaagaactggatacagagactataaataacaaggttcccccaagaggaatcattgtttctatcatatgtaacatgcaatctgttggcctcaatagcaccgctttgaagattgcccttgaatttgataaagacagatcagactgataaccttaacaccataggtgcaaaatgagttgttctgaggtttttttgaaacattaaagttccaaaacatgacatttttaagaataaatttgaaatagagtataattgaatgcagagaattatgtacctctaattgcttaattttgtaatggtcttttattgtagaattggttctttatactcagggaagtaattatattgtttttactttttgaaaaaagtgttaactcttgaaataaaatattctgataaaataaaaaaaaaaaaaaaaaa

SEQ ID NO: 238036 - DNA, 656 bp, Homo Sapiens
  misc_feature (10)..(10): n is a, c, g, or t
agaatcggcnacgaggagaagggctatgtccaatccaaggagatgattgacatctattccacccgagagccccagctagccttccaccagcgcatctccttctgcctagatatccacaacatgtctgtcaaggccatgaggtttcctcccaaatcgtacaacaaggacttggagtctgcagaggaacggcgtgagcgagaacagcaggacttggagtttgccaaggagatggcagaagatgatgatgacagcttcccttgagctggggggctggggaggggtagggggaatggggacaggctctttcccccttgggggtcccctgcccagggcactgtccccattttcccacacacagctcatatgctgcattcgtgcagggggtgggggtgctgggagccagccaccctgacctcccccagggctcctccccagccggtgacttactgtacagcaggcaggagggtgggcaggcaacctccccgggcagggtcctggccagcagtgtgggagcaggaggggaaggatagttctgtgtactcctttagggagtgggggactagaactgggatgtcttggcttgtatgttttttgaagcttcgattatgatttttaaacaataaaaagttctccacagtaaaaaaaaaaaaaaaaaa

SEQ ID NO: 238037 - DNA, 704 bp, Homo Sapiens
aataacttaagtctttctccaaaagtgcatgcagtcttttgcgatacctcattcagccgagtattttactcttcctcattcagtataaggaagctttcagtttgcttagaaggcaacattggaatgttagagttcatcagaaacatagaattttaaactgtgagttccactgaatacattttaatgtctgtaggaagaatcaaaacacctatttaaagatggcaatatataataatcattttaaaagtatttgattcaacctaattttccagaaatgaaaaaaaaaaaaatcagctctaaaaccaaagctgatttcagaaaatttgaaaatgtaaatcagccctatccataatatagtttctctaaaactttatcttagtcattttaaaataatataactattaaaaaatgtaactgctatcttaatgttctgaaataatttaaaacattttaaaatatgaatactgtagtataaaagaaagaaatggtgggaacgaaaagcagagaaagaaatgccaattccagtccaaagttttatttgccaagttttcttagaatgaattttaccagtttatgaattattgtaaacagaatgtgtcatggaaatactgaaagatttttccctagagtggccttattgactgctggtgtgatgccactgtaatgtaataaattattaaattgttaaaaaaaaaaaaaaaaaa

SEQ ID NO: 238038 - DNA, 699 bp, Homo Sapiens
  misc_feature (9)..(9): n is a, c, g, or t
  misc_feature (42)..(42): n is a, c, g, or t
  misc_feature (49)..(49): n is a, c, g, or t
  misc_feature (65)..(65): n is a, c, g, or t
  misc_feature (169)..(169): n is a, c, g, or t
aaacttatntctcattggcaaaaatgtgttgattgtaatgtntcctatnttaattaataaagatntgtgtgaacctagttataatgacttaaaattcatggtcccaaacagcaattacttttgcaccaaactaaaaatataagttaaaatggaagagtctaggagcaanccaagaaaagatcacctacttcatcatctctggtcaaaaacaaaccaaaaaacttaacagctatcacttaagtttgcttcctagcaattatttagcttccagtctagattacaggatatataaaactttctttctttctttcttaactatgacactggcaccaatgagagtcctgtgactgactttcacatttccaccattactcaattactggtaccataccacctctaatcccctaaatcaaactgcaattcaacaataaagggcgtacagagatgactttgtcctgaaggaaaatgaatatccttgtaccctctatatagctaacttccaaatgtaagagaactatggggtaaccttttgtttctattcctatcaagatgagcctttaagagagggacttttattaagctcttgaccaagaagaatacacttgattcagagtttctgatgctcttaatcagaactatatgtattgtctcaatattaaataaagtcaaatgtttccatacaaaaaaaaaaaaaaaaaa

SEQ ID NO: 238039 - DNA, 684 bp, Homo Sapiens
  misc_feature (29)..(29): n is a, c, g, or t
aatcctacataatgaaaaagaaaaacagnccatttaaaaactcagacaagattatatttaatatattaattactaaaaaggcataagattacactgaacatattagctactaaaaaggcactgctaagacattcaagcaaatagctattacacactactgcagattttacaggtttctaattctaacatatgtttgaaaaatccgtgagtattccaaaatatatttaataatggaatatctgcattaatataccatccatgtgtttttaccatttgccttaatattgaatatactgtttacctcacactaaaaagaaaaccagaagccttatttgtgattttgggagtggaagcttccatttttgtgtcaaaaatgaatcctgattcttatggaaatctctgttattaagatatttcaagatgagacaacactgaagatcaaattgtgtttagtatcactatcttctctcctcgtttctctcttactcctcatcctcccagaatctaccagtttatggtagaaagatgggaaccttatttgaatgtgttttttttttccatgatgtccaattttgttgtgggaaaggatttggataaaatttttgtttaaattttggtagatttttatctatacaaatttaaataaaattatgttttgtaagctgtaaaaaaaaaaaaaaaaaa

SEQ ID NO: 238040 - DNA, 648 bp, Homo Sapiens
  misc_feature (11)..(11): n is a, c, g, or t
ggtcactcttntgatggtggccctgaacctcattctggttccctgctgcgctgcttggtgtgacccacggaggatccactcccaggatgacgtgctccgtagctctgctgctgatactgggtctgcgatgcagcggcgtgaggcctgggctggttggagaaggtcacaacccttctctgttggtctgccttctgctgaaagactcgagaaccaaccagggaagctgtcctggaggtccctggtcggagagggacatagaatctgtgacctctgacaactgtgaagccaccctgggctacagaaaccacagtcttcccagcaattattacaattcttgaattccttggggattttttactgccctttcaaagcacttaagtgttagatctaacgtgttccagtgtctgtctgaggtgacttaaaaaatcagaacaaaacttctattatccagagtcatgggagagtacaccctttccaggaataatgttttgggaaacactgaaatgaaatcttcccagtattataaattgtgtatttaaaaaaaagaaacttttctgaatgcctacctggcggtgtataccaggcagtgtgccagtttaaaaagatgaaaaagaataaaaacttttgaggaaaaaaaaaaaaaaaaaa

SEQ ID NO: 238041 - DNA, 739 bp, Homo Sapiens
  misc_feature (91)..(91): n is a, c, g, or t
gcactgggctcaaccagctccattgctcatcttttctccccacaggatccctcaaggcatgctgcagcctataccactcaccctagcactntggtgcaccaggtccctgtcagtgttgggcccagcctcctcacttctgccagcgtggcccctgctcagtaccaacaccagtttgccacccaatcctacattgggtcttcccgaggctcaacaatttacactggatacccgctgagtcctaccaagatcagccagtattcctacttatagttggtgagcatgagggaggaggaatcatggctaccttctcctggccctgcgttcttaatattgggctatggagagatcctcctttaccctcttgaaatttcttagccagcaacttgttctgcaggggcccactgaagcagaaggtttttctctgggggaacctgtctcagtgttgactgcattgttgtagtcttcccaaagtttgccctatttttaaattcattatttttgtgacagtaattttggtacttggaagagttcagatgcccatcttctgcagttaccaaggaagagagattgttctgaagttaccctctgaaaaatattttgtctctctgacttgatttctataaatgcttttaaaaacaagtgaagcccctctttatttcattttgtgttattgtgattgctggtcaggaaaaatgctgatagaaggagttgaaatctgatgacaaaaaaaaaaaaaaaa

SEQ ID NO: 238042 - DNA, 604 bp, Homo Sapiens
gacgttcgtgattcctgcccgccgggagtctttccccacaccccagccatcgccgcccgctcccaggaggccagggcaggcctgcgtgggctggaggcgggcgaggccggcccaccccctcgctggcactgactttgccttgaacagaccccccgaccctcccccacaagcctttaattgagagccgctctctgtaagtgtttgcttgtgcaaaagggaatagtgccgtggaggtgtgtgtgtccatggcatccggagcgaggcgactgtcctgcgtgggtagccctcggccggggagtgaggccaccaaccaaagtcagttccttcccacctgtgtttctgtttcgtttttttttttcttttttttctatatatattttttgttgaattctattttatttttaattctctcttctcctccagacacaatggcactgcttatctccgaaatggtgtgatcgtctcctcattgagcagcggctgccaccgcgctgtgggtagtgtgtgaccgtggctgtactgtatagtgaacatagttggcatatctttgtttgaagtttgttggtgactccaccaaactggtgtgaaaaaaaaaaaaaaaaaa

SEQ ID NO: 238043 - DNA, 706 bp, Homo Sapiens
  misc_feature (13)..(13): n is a, c, g, or t
  misc_feature (36)..(36): n is a, c, g, or t
accaatgcccctntaagtgctgcaggggtctggggntggcaactcctgaggcctgcatgggtgacttcacattttcctacctctccttctaatctcttctagagcacctgctatccccaacttctagacctgctccaaactagtgactaggatagaatttgatcccctaactcactgtctgcggtgctcattgctgctaacagcattgcctgtgctctcctctcaggggcagcatgctaacggggcgacgtcctaatccaactgggagaagcctcagtggtggaattccaggcactgtgactgtcaagctggcaagggccaggattgggggaatggagctggggcttagctgggaggtggtctgaagcagacagggaatgggagaggaggatgggaagtagacagtggctggtatggctctgaggctccctggggcctgctcaagctcctcctgctccttgctgttttctgatgatttgggggcttgggagtccctttgtcctcatctgagactgaaatgtggggatccaggatggccttccttcctcttacccttcctccctcagcctgcaacctctatcctggaacctgtcctccctttctccccaactatgcatctgttgtctgctcctctgcaaaggccagccagcttgggagcagcagagaaataaacagcatttctgatgccaaaaaaaaaaaaaaaaaa

SEQ ID NO: 238044 - DNA, 720 bp, Homo Sapiens
tgcgcccctcgccctcctgctcgcgccccgccgccatggccgcctccccggcgcggcctgctgtcctggccctgaccgggctggcgctgctcctgctcctgtgctggggcccaggtggcataagtggaaataaactcaagctgatgcttcaaaaacgagaagcacctgttccaactaagactaaagtggccgttgatgagaataaagccaaagaattccttggcagcctgaagcgccagaagcggcagctgtgggaccggactcggcccgaggtgcagcagtggtaccagcagtttctctacatgggctttgacgaagcgaaatttgaagatgacatcacctattggcttaacagagatcgaaatggacatgaatactatggcgattactaccaacgtcactatgatgaagactctgcaattggtccccggagcccctacggctttaggcatggagccagcgtcaactacgatgactactaaccatgacttgccacacgctgtacaagaagcaaatagcgattctcttcatgtatctcctaatgccttacactacttggtttctgatttgctctatttcagcagatcttttctacctactttgtgtgatcaaaaaagaagagttaaaacaacacatgtaaatgccttttgatatttcatgggaatgcctctccatttaaaaatagaaataaagcattttgttaaaaaaaaaaaaaaaaaa

SEQ ID NO: 238045 - DNA, 746 bp, Homo Sapiens
  misc_feature (28)..(28): n is a, c, g, or t
  misc_feature (76)..(76): n is a, c, g, or t
  misc_feature (145)..(145): n is a, c, g, or t
tgtgacaccccaggagatagcgagcgcngcagcacaggcccggcctcagtcccctccgcacccgccggggtaggtnccggcagtgacctgggcaggggcctcgctttcccacctccctccagactcctttgaccccaggaagttntgcccctccttcttctccagacagccccctccccaggtgtctgggtcccctttcccgcccctttccagaactcagagtcagacaagaacccagagcatccgatggtagaaacaccaggaagacaattgttgctgtgtggtatggaatggagtttgcggtgactctggggccagcacccaggggacgacgttcaaccctagcctgaagggacccgctcccagctcagaagccgtctctgacttctcgtgcgtattttgaccctgatttcaatcttctacccttgggagttctggcgtttggcacaaagtcccctttgcctgtttggagctcagtgctagaccaggtcccctgccccgagctttgtttttggggttatttattgaaacaaagtgtggggagctggttgtgggtgtgagtgggggtgtggggtccaggctgggcccagtgaaaaggaggaaggggttcccatgcgggggaggctctggggctgaggggaacaattctcacgtgtttggtgcttagagacctgccccggggcgttgggcaggccctccgggggctgaattaaaaatgctttatttccaaaaaaaaaaaaaaaaaa

SEQ ID NO: 238046 - DNA, 657 bp, Homo Sapiens
  misc_feature (82)..(82): n is a, c, g, or t
aaaagactgtggacttaaattctagcattttagactaggactgttctactgtgaagaaagttctgtctcctttagcccggtntgtttctccctgctcaggtctagaatcccaagcagtgttcttttctggtgaacactgtgagccgcagatgtgacttttttttaaagtcatctcttcagcaatccagaggttccttgacctcattatttgtcctatctctcccttatagtcctaagccaagacatttgacctttgacatttgacctttgcagtgtcatgtgagggcgtcagtatagaggcctttgcatctgggcctggcacccgctctctgcctctggaggctaaaccctgtctggatttctcttgggatctaacgtgggatcttctggacagacaaccgtgacatcagcagtgctggtgctgctgtgtgtggactgaacacctgcactttgcagaggacacgctgcatgggccccgcttgcggttcattcaggcctgctgcaggagctctgagaacaagaaagagtggacacccgttcccctgcatcatctgtcttgcgtgctatttcagagtggggaagtgataaactatttgccttctggagctctttgtgaaaaattaaaaaaaaacttagctcaaaaaaaaaaaaaaaaaa

SEQ ID NO: 238047 - DNA, 666 bp, Homo Sapiens
attttcctgtctgtcaaagacagaaataccaggagatagggagggttttttagcatctctttcaaaagatgtatgtcagaatttcctttgcacaccaagaactggagcttagagccccactattctctaagccaggttctagtgccttacactccagaatgtcagatggtgggtgcagatgggaagaaagagaaaagttcatctcggtgtgtgggttcccatccgccccacatagcctctccttcttcggaacaatgggcgtggggtagaaagctctttcagtgaagggtgttctagcagctcagttaacactttactctccagtcaacacttgggacatataaaaatgccattgtaactactgtagagtcctgtgactcatcgtttgtgtttgtcagtgtgcagttcagcttagcccttccctgttcctgtgtagttacaatctggccctgaagacatccgaggcacttcagtaagtgggatcttttctagagatcctgggtgactttgggtgcacagggtgaccgagcatttctgcccctgtgaatgtggcactaacactgtgcactgtctccaccaagcaaggtttccactgagtttcttctcatgttactgggtttgtaaatgaataaacacattttaactactaaaaaaaaaaaaaaaaaa

SEQ ID NO: 238048 - DNA, 701 bp, Homo Sapiens
  misc_feature (665)..(665): n is a, c, g, or t
ggaatatggctgagttctgtagtttccagagttggctggtagagccttctagaggttcagaatactagcttcaggatcagctgggggtatggaattggctgaggatcaaacgtatgtaggtgaaaggataccaggatgttgctaaaggtgagggacagtttgggtttgggacttaccggggtgatgttagatctggaacccccaagtgaggctggagggagttaaggtcagtatggaagatagggttgggacagggtgctttggaatgaaagagtgaccttagagggctccttgggcctcaggaatgctcctgctgctgtgaagatgagaaggtgctcttactcagttaatgatgagtgactatatttaccaaagcccctacctgctgctgggtcccttgtagcacaggagactggggctaagggcccctcccagggaagggacaccatcaggcctctggctgaggcagtagcatagaggatccatttctacctgcatttcccagaggactagcaggaggcagccttgagaaaccggcagttcccaagccagcgcctggctgttctctcattgtcactgccctctccccaacctctcctctaacccactagagattgcctgtgtcctgcctcttgcctcttgtagaatgcagctctggcccccanataaatgcttcctgcattaaaaaaaaaaaaaaaaaa

SEQ ID NO: 238049 - DNA, 745 bp, Homo Sapiens
  misc_feature (46)..(46): n is a, c, g, or t
  misc_feature (115)..(115): n is a, c, g, or t
  misc_feature (141)..(141): n is a, c, g, or t
aataaaagctagatactggaaacctaactgcaatgtggatgtttancccacatgacttattatgcataaagccaaatttccagtttaagtaatgccctacaataaaaagaaattntgcctgccattttcagaatcatcttntgaagctttctgttgatgttaactgagctactagagatattcttatttcactaaatgtaaaatttggagtaaatatatatgtcaatatttagtaaagcttttcttttttaatttccaggaaaaaataaaaagagtatgagtcttctgtaattcattgagcagttagctcatttgagataaagtcaaatgccaaacactagctctgtattaatccccatcattactggtaaagcctcatttgaatgtgtgaattcaatacaggctatgtaaaatttttactaatgtcattattttgaaaaaataaatttaaaaatacattcaaaattactattgtatacaagcttaattgttaatattccctaaacacaattttatgaagggagaagacattggtttgttgacaataacagtacatcttttcaagttctcagctatttcttctacctctccctatcttacatttgagtatggtaacttatgtcatctatgttgaatgtaagcttataaagcacaaagcatacatttcctgactggtctagagaactgatgtttcaatttacccctctgctaaataaatattaaaactataaaaaaaaaaaaaaaa

SEQ ID NO: 238050 - DNA, 697 bp, Homo Sapiens
  misc_feature (28)..(28): n is a, c, g, or t
agaattcggcacgagggaggaaatgagntacgagctggatacccaagaggcatccacaccctaggtttccctccaaccgtgaggaaaatcgatgcagccatttctgataaggaaaagaacaaaacatatttctttgtagaggacaaatactggagatttgatgagaagagaaattccatggagccaggctttcccaagcaaatagctgaagactttccagggattgactcaaagattgatgctgtttttgaagaatttgggttcttttatttctttactggatcttcacagttggagtttgacccaaatgcaaagaaagtgacacacactttgaagagtaacagctggcttaattgttgaaagagatatgtagaaggcacaatatgggcactttaaatgaagctaataattcttcacctaagtctctgtgaattgaaatgttcgttttctcctgcctgtgctgtgactcgagtcacactcaagggaacttgagcgtgaatctgtatcttgccggtcatttttatgttattacagggcattcaaatgggctgctgcttagcttgcaccttgtcacatagagtgatctttcccaagagaaggggaagcactcgtgtgcaacagacaagtgactgtatctgtgtagactatttgcttatttaataaagacgatttgtcagttaaaaaaaaaaaaaaaaaa

SEQ ID NO: 238051 - DNA, 716 bp, Homo Sapiens
  misc_feature (58)..(58): n is a, c, g, or t
tgcgtagttcggcctgagtttgtgcagcttgttaagacaactcttgtgtacgctatgntgaagctcaacaaaaaagtcatgggaccacttctagaaatctttcagctgtcaggcctgtcagtctcatgacagtttgttggttgtgccaaacactttatttgggaaaggaaagcccagatttgaatgggtctttcccctgggccttatcctatagaggcatttgtaatatggagaaaataatttttcatttttgctcatttaattctataaattctctttataaatgaattttgtgttctttagttctccttaaaagaacttttgaattataaaaataaaatctttacctgtcgaattgttgctgcagatgattgttgtggaaaatctggatcattgacctctgtgctttcattcctagagatgttttatagttacatgagcaaaagctgttgccccaaagtgatggccctggaggcggggctgaggaacagggaaatgccgctgtgaagtcttaaagcacttctgcttaaactcccatgtgtgaggagtgtgcctccctgtgccctctcagctctgaggctggccgtctttcggggtgttccttttggcaaatatacactgtaatcttgagtctaaatttatatgttgaaatgctaccttttttaaaataagaaactaaataaaattattttactatcaaaacaaaaaaaaaaaaa

SEQ ID NO: 238052 - DNA, 612 bp, Homo Sapiens
ctccccacagcagctccttggggcagggggctcacctgtgcagccacccttactcacagtagcatcccatttttcacactgcaaccccccagcactgtggacccttccagggaggtgacaggagccagcagacacatgacattcccagaaagccccatcttatccagacaggcttccctccatacttctttccacagttttaccctcagaaaaatgttggctgcagtcttcccttccttcacctccaccctggggaagggtcagtaaccaatgccgagggtcggggaaggaggaggcacaggcaagacagggactcagcgcagtgctcccgccatcatcggggacaggtgccagggtcagctgcagctctccttccgggagcagggtgtggtggccctggatggtcccagggagcagagggaggcaggcagctgtcacagccacagcggctctgaatggcttgagcttttagtatgtgttcaagtgcaggatactacaaactggtaaagacttccaccatgtgaaaaatgtatgtaaattaaagtttattgtaatgaaggtttttactttttgcaattaaaagtgttggttggtaagaaaaaaaaaaaaaaa

SEQ ID NO: 238053 - DNA, 668 bp, Homo Sapiens
actcaatgacagaggcagttactgtgagagacttctaggaatcttttcttctcatagcaaagtcaaagctctctctgaatgtactgtgtgatgatgcatcatgcatgaaccttcggtcagggatatcattggtgaagtgatttcaaaaagtattcaaaatttgatatgctgtttagtcactacagtgccctcaaagggcagaagttgcagccttttttatattgcctgccaaaatttgaagtattagaagaaagtgtgccatgagagaaaaacttaaggagttttgaaaagtaatgcaaataacaaaactgcaacactatttttaaaaagataaatatctgagttaaaattactgaatctttattttacacctaaaaaaatatgagaacaaggtacatgcattatgtgtcacattactgggcaaactgttcaagtatttttttttaaacctccctgtatagaaaaaaatcattaaggatgtaaaagccatgcttgcctatttgctgtatacatgtaatgaaattgtagataaagtgtagtgcattgaaacaaatgaacaaaaagtagatacttttactatacaagggtgctggtgcagaaaaaaaatatatatatttttggaaatgtagcattttatactttcaagtgttataaaaaaaaaaaaaaaa

SEQ ID NO: 238054 - DNA, 703 bp, Homo Sapiens
  misc_feature (22)..(22): n is a, c, g, or t
  misc_feature (54)..(54): n is a, c, g, or t
gatagattgcaggtgtggaatntgctggagtttggtgacttcgtcaaattcctntggattctgttccgccaaatcagcagtctcgtcctgtggatgcagtgactggaatttcccatctgcaaagcatctctgtagcccagattttgtggagccttaagacactccctcaatgccaccctgaccccacggctggagaaccctgtgcttatgtggtgggcagggccactgttgatggaggatggcggggacggggtggtgctcaaaggatctgtggtgctggaggtctacacgcctctcaggacagcgtgtcaggaacctcagagcagcttcacatctgccaaagctgagagggagcgaacttgggaagcattttgctcattgtcctacccaagtattaatagcataatagttgatgccaaaggagatggtgacgtcccttccactgtagttgctgtcacaaccttgacgtctttaagctaatggccgtttgcatctgtgtcttcaaacagatcctggttacagccattttgtgtgattcacttcgggggttaagtaatgcaggattctgcaaacaaggtgtcgccgtccaaatgtactgtcctggcatagagagcactgctttgttttccactgttgtagagaaaactagggagaactttatttttcaataaacttttcttgtgtgaaaaaaaaaaaaaaaaaa

SEQ ID NO: 238055 - DNA, 718 bp, Homo Sapiens
  misc_feature (34)..(34): n is a, c, g, or t
tatagatatatttatttttattaaaatggcagtntacatcataattggcatttctcaagactgtctttaccagaatctgtgtgaaataaggcaatctagtctccttgaaaagaaaatcccttggatgtttaggaaggaagacttggccgtgatgtggtgtcctggctttgtggtgtagtgctgtgtgtatggagttagtgtaaaaacatggattacaccaagtggaagaaacgtcttcttgccaagctcattcttagaacttacacatctagaacagcttccactttggcagtgaggtcgtagccttttaggtggaagaagtgagggtgcagcgtgtcagacacaacattcatgttactcttacattggaatctgaaggtagttcagacttcgtgggttttgtttttaagcaaaacaatgtgaaaacatttaagtttgaaatgttgcatttgaagttatgatcatttaatatattcatattaccaagactattatactggaagtggtttttgtgttataaaggtttaattttacataaggcagttacttaatgtgatttttaacccttaaaaaagtggagatgtatacatttgttaacaatgccatgaaagcattttctttctcctaaggaaaagtgaatttcttatcagaatatctggctggccctgtaatttaaattaaaataaaattttggagaaacagaaaaaaaaaaaaaaaa

SEQ ID NO: 238056 - DNA, 592 bp, Homo Sapiens
ctttatgaattgataaaggactgaagtgcaactgaaagctgctagtgatgatctggtaatatacaatttgtccagtagccagtttgtttttattgtgttttctaaccataagagatcattaaaggcaaagcctgtatgacgctgtacacacacaaaaaaatggtcaccgcaggccatactaccaatgaaatggtaggtaaacaaatcttctggtcaagagaaaaaaaaaagaaatagcactctgcatgctttgctctacaagatgaatttccctagaaagaatccaatgaaggccgggcatagtggctcactcctgtaatcccagcactttggaggccgaggcgggtagatcacctgaggttaggagttcaagaccagcctggccaacatggtgaaaccccttctctactaaaaatgcaaaaattagctgggtgtggtggcgggcgcctgtaatcccagctactcgggaggctgaggtgggagaattgcttgaacccaggagacggaggttgcagtgagccgagatcacgcctctgcactccagcctgggcaacaagagtgagactccgtctccaaaaaaaaaaaaaaaaaa

SEQ ID NO: 238057 - DNA, 619 bp, Homo Sapiens
ggtcccagggaaagagaatggatgaacagagattcttttacaaagagatcaaaacagagacactgactttgggctaaaggactttttgcaaaataatgctttgttggagtttaaaaattcagggaaaaaatcggcagaccattagttactatggatttattttttttcctttcaaacacggtaaggaaacaatctattacttttttccttaaaaggagaatttatagcactgtaatacagcttaaaatatttttagaatgatgtaaatagttaaccttcagtagtctattaaggcattaatacttctctggacatgcgcgtttgagggtggaggggtcctgtaaggtgcttcatcgtctgtgattactgcttgggatgtgttctttggcagcttgtgagattactttacctagtgtttataaagtaggaagttaagtgaatcatagattagaatttaatactcttatggaaataattttttaacatcttaattgacaatggcgtttttttatacataaccatggatgtagtgggaaacaatgttgtttggtaaaaataatgtacttgatcaatgtaaaaaagtatataaaatagtcttactaaaaaaaaaaaaaaaaaa

SEQ ID NO: 238058 - DNA, 625 bp, Homo Sapiens
  misc_feature (537)..(537): n is a, c, g, or t
caggacagctccagcttctacgtggtcatgtggaagcagatggagcaaacgtattggcaggcgaaccccttccgtgctgtggccgagcctggcatccaactcaaggctgtgaagtcttccacaggccccggggaacagctgcggaacgctctgtggcatacaggagacacagagtcccaggtgcggctgctgtggaaggacccgcgaaacgtgggttggaaggacaagaagtcctatcgttggttcctgcagcaccggccccaagtgggctacatcagggtgcgattctatgagggccctgagctggtggccgacagcaacgtggtcttggacacaaccatgcggggtggccgcctgggggtcttctgcttctcccaggagaacatcatctgggccaacctgcgttaccgctgcaatgacaccatcccagaggactatgagacccatcagctgcggcaagcctagggaccagggtgaggacccgccggatgacagccaccctcaccgcggctggatgggggctctgcacccagcccncaaggggtggccgtcctgagggggaagtgagaagggctcagagaggacaaaataaagtgtgtgtgcagggaaaaaaaaaaaaaaaaaa

SEQ ID NO: 238059 - DNA, 540 bp, Homo Sapiens
tggagctcaagcaggagcaagagagggtgatgttccggagggcgcagttcctcatcaaaaccaagtcgcagctgagcgtgtcccaggacagtgacatcttgttcggaagtgcctcctcggacaccagagacaataactgagcgcggaggacacgcctgccctgcctgccatctgtggcccgaagccattgccatccactgcagacgcctggagagggacaggccgcttccgagtgcagtcctggcgcagcaccgactcccacgcacccggggaaggacaccctcactcccacaccccgggaagaacactagaacatcagcagaggggccctgcccctccgcctgcagccgtgaaaggaagctgggtcatcagcccagccccgcccaccccagcccctatgtgtgtttccctcaataaggagatgccttgttcttttcaccatgcaaataacatgcccagcaaaaacttgctttatgggtctgcctggagaaaaaaaaaaaaaatacaaacagcagaaacagcaaaaaaaaaaaaaaaaaa

SEQ ID NO: 238060 - DNA, 718 bp, Homo Sapiens
tcttgggggggtattgaggacccccagcctggaatgagaagggtccccggttccatgtcagacccagaaaggtggatccccccactgttggctgcaggaggtttttggtacccccttttgttccagaaccgtcctgcctctcgcttggggacaggggggctttggatggcactggtgtgcacctggacccagccccggcctggcaggatccagggatgggtgcctgggatcctggggggagggaggcaggggacgcccttctggagctgggctcggagggtcctgccccatccagccctcggctctctgtgttctctgtccctagcctcaaaccctcttctggcagcgctagtgagatgccttagtctgtgggggtgggtgggggactggggccccgttttcctttgtgagtcttggttggccccagccctggcaggggcctgtctggagcaggggtaggtagggctgtgggttccagaactctataactgggcccctctccagtgtccaggggcttggagagacctgcgcccacccctccactctcccaggagtcgctgatcactgggacctggttccagccgtttgcaggggaggcggctccgagaggcgtgtgctttccgtgggtggcgcccctcccccgccctgcctggcctcatccttgtatttaattaattaaacaagcccctttttaaaccctaaaaaaaaaaaaaaaaaa

SEQ ID NO: 238061 - DNA, 678 bp, Homo Sapiens
  misc_feature (62)..(62): n is a, c, g, or t
gcatccattctctctttctcttgatgacgcagctgtcatttggctgtgcgtgctgacagttntgcaacaggcagagctgtgtcgcacagcagtgctgtgcgtcagagccagctgaggacaggcttgcctggacttctgtaagataggattttctgtgtttcctgaattttttatatggtgatttgtatttaaattttaagactttattttctcactattggtgtaccttataaatgtatttgaaagttaaatatattttaaatattgtttgggaggcatagtgctgacatatattcagagtgttgtagttttaaggttagcgtgacttcagttttgactaaggatgacactaattgttagctgttttgaaattatatatatataaatatatataaatatataaatatatgccagtcttggctgaaatgttttatttaccatagttttatatctgtgtggtgttttgtaccggcacgggatatggaacgaaaactgctttgtaatgcagtttgtgacattaatagtattgtaaagttacattttaaaataaacaaaaaactgttctggactgcaaatctgcacacacaacgaacagttgcatttcagagagttctccccaatttgtaagttatttttttttaataaagatttttgtttcctaaaaaaaaaaaaaaaaaa

SEQ ID NO: 238062 - DNA, 636 bp, Homo Sapiens
  misc_feature (32)..(32): n is a, c, g, or t
gcagacccaaaccacagccacatcccagcttntgtgccagcactgtgacagtacctcgctcctctgtgcaccagatccggcctcaggacttacacctcctgcctgacccccaggcttctctctcctttctcccagcaaactgcagtggcagaaaggaggttcagaggctgggaaagtgggcctccccttgcaactcagagctgctgcactcaggagggccccatccaatcccgggcccctgcagggaaaagcgctgggtgtgtgtcagaggcgcagggtgggtggggctgccagccaggaccctggcctgcagcctgatccaaaccaaagactgtagaaccctggggtgtggctaacggcccctccagcacccatagccaggtcttcctggcccttgaggctgggctggcggacaggcacctacctcttccttaagctgaagctcccacactgtcttccagggctgaggagatgctctccttttctactgaccatcttgatacttatttatacgagaggcagttgctggacggggtagtactgggaagcaggaggcagaatggctctgctgagcctcctacccatgacaacaccccaataaacagaacattcagagccaaaaaaaaaaaaaaaaaa

SEQ ID NO: 238063 - DNA, 690 bp, Homo Sapiens
  misc_feature (11)..(11): n is a, c, g, or t
gtgtccccgantaccacaagcagtacgccccgaggtgctccgtctgctctgagcccatcatgcctgagcctggccgagatgagactgtgcgagtggtcgccctggacaagaacttccacatgaagtgttacaagtgtgaggactgcgggaagcccctgtcgattgaggcagatgacaatggctgcttccccctggacggtcacgtgctctgtcggaagtgccacactgctagagcccagacctgagtgaggacaggccctcttcagaccgcagtccatgccccattgtggaccacccacactgagaccacctgcccccacctcagttattgttttgatgtctagcccctcccatttccaacccctccctagcatcccaggtgccctgacccaggacccaacatggtctagggatgcaggatccccgccctggggtctggtcctcgcccatcctgcagggattgcccaccgtcttccagacaccccacctgaggggggcaccaggtttagtgctgctgctttcactgctgcacccgcgccctcggccggccccccgagcagcctttgtactctgcttgcggagggctgggagaccctccaggacattcccaccctcccccatgctgccaagttgtagctatagctacaaataaaaaaaaaccttgttttccagaaaaaaaaaaaaaaaaaa

SEQ ID NO: 238064 - DNA, 736 bp, Homo Sapiens
ctcccagtagctcagactgcagggcatgccatcacagctggccagtttttacgtcttgcgtagagatggttttccctgtgttccctaggctgggctcgaactcctgggctcaagtcctcctgcctcggcctcccaaaatgttcagattacaggcatgaggcagcatgccaatcctgtttttgcattttagtaacaccaaattgtaatgttaactttttaaattatgaaagcatctaaaatataaaattatttgtaaccccactgtccttttgggcttctataaatgaatatacatctaaaatgtgggggtttagcttaattgattgttttccatagaaactaggttttatgggaagatggttggatagacttgtttcacttaaaggtctgatttgtgtaggacaaacccacatatgtaatcgtgccagtctgttctctgcatgacataattttccagcaatagctgtgtggtttttgtaatcctatcatctagtcagttcaagatcttgcaacactgtgtgattctttgctccgtagttcagtcttgttgaacatgacacaggtgtttactttcctgttcttgcatctagtttcattctaataatgttctctgttgaaaaagctggcttcaatttattgagcaagatgctggtgttatcatctaacataaaacctatcttataataaagtgttgacacatgtaatgagtactgtactgaaaaaaaaaaaaaaaaaa

SEQ ID NO: 238065 - DNA, 733 bp, Homo Sapiens
  misc_feature (103)..(103): n is a, c, g, or t
agatgattcaaagattatttgatcatttctgattatgatcaaatgatcaaaagattatctgatcattgagaaactgaaggactgattgttgggagtaggtctntgggtgagtctgtgagaagagttcttaatgagaactaaaaaggttatttctgttcttggtgtcccaaactgttctggtattttgccaaatactacagatagtaaaattcttaattaaagctgacatggttatatttttaaaaatttaggtgcaattagtctttcaagatcagaagatatttagttagtatcatagttcagtctgttccaagctgtaaagtcagttatttcagtaatgtaatttctaagatctataaaaaatgaaaatattttattttcttatataactttctgtgagagcattgaacagtcaagaaacttgtatgttttccagcccccattctgcttcaagttacatggtgtctagccttttcagctctagaaattctacattattatgtaatatcctgctttatgggtcttggtggtatatggtatagatcaactcaaaatttaaaattttcatcgtatgaatttttgtgtagagatttcaagatgagttgatctgagaacaaaaagaactccaaagaaatcttactattttcctgttggtatatattgttcaataaaacactatattggtatatattgttcaataaaacactatattggtataaaaaaaaaaaaaaaa

SEQ ID NO: 238066 - DNA, 644 bp, Homo Sapiens
cctgtccacacaaaatcagggtgtctgcgccaccgaagggcagcccagcgcttgctgtgttggcagaagaggccagagcagaggggcagctgcaagccagtcctcctggggcggcagaggggcatctggaaaaacccgtgccagagccccagcgcaaggcggcccctcccctgcccagaaaggaaacctcagggacgcagggaatagaaggccacctgaagggtggacaggcaatcgtggaagatcagataccaccaagcaatttggagacagttcctgttgagaataaccacggtttccatgaaaagacagcagcgctgaagcttgaggccgagggcgaggccatggaagatgcagccgcgccaggggacgaccgaggcggcacacaggagccagccccagtgcctgctgagccgtttgacaacactacctacaagaacctgcagcatcatgactacagcacgtacaccttcttagacctcaacctcgaactctcaaaattcaggatgcctcagccctcctcaggccgggagtcacctcgacactgagggccctcggtgtgaagatgaaccttccaccgtcttcactgcatcctggagtgcaaaaataaaatccactcaagagtcacaaaaaaaaaaaaaaaa

SEQ ID NO: 238067 - DNA, 555 bp, Homo Sapiens
tgaagaaatcactattgtgtatatactcaagtctttttatttttcctcttttcataaatgctcttggacattattgggcttgcagagttcccttattctggggattacaatgcttttatcgtttcaggcttcattttagcttcaaaacaagctgggcacactgttaaatcatgattttgcagaacctttggttttggacagtttcatttttttggatttgggatagattacataggagtatggagtatgctgtaaataaaaatacaagctagtgctttgtcttagtagttttaagaaattaaagcaaacaaatttaagttttcttgtattgaaaataacctatgattgtatgttttgcattcctagaagtaggttaactgtgtttttaaattgttataacttcacacctttttgaaatctgccctacaaaatttgtttggcttaaacgtcaaaagccgtgacaatttgttctttgatgtgattgtatttccaatttcttgttcatgtaagatttcaataaaactaaaaaatctattcaaaaaaaaaaaaaaaaaa

SEQ ID NO: 238068 - DNA, 633 bp, Homo Sapiens
  misc_feature (591)..(591): n is a, c, g, or t
cagggcccccgcccgataccaaaaatccaggttgctcaagtctctcatagaaagtggcgtagtatttgcacataactatgcacatcctcccgtgtactttaaatagtctctaaattactttgtaacacctaatccagtgtaaatgctatgtaagtaattgttatactgtttttatttttactatcttttgttgtacttttttttaaaaaagaaattcatttgtttaatattttcggtcttggggaacccgcgtatatggagggcctgctacatagagaagactgagggatattctgtgcatccgtttctacggatcctctaaatcggcctttgttttcagccaggatttagtgcccagctgtgtcctttggaggccccacatggagctagcaaagtttgctaaatcgggttttgcaagaggactgtctgctccatactgggagtagttaccgcaaactgccctatgaaattggttggggttcttactgttagcatgtttattactttatcagggctctctgtaggagagtctatgagaaaatcttctggtttctgctgaaagaatcgtgttttgttggggtttttttcccngaaaaatattatttttaaaaactcaaaaaaaaaaaaaaaaaa

SEQ ID NO: 238069 - DNA, 713 bp, Homo Sapiens
  misc_feature (51)..(51): n is a, c, g, or t
tttgaacagattaaagatttgtgtagtttgtgggaaattgacgtttttgtntaaattccacccgcgtttgtcttttcctaccacctgtggccaggtgctcgctggccatcacagttgcgattccatgagtagctgctttatgactgctttttgtactatctggatgtgcccagagttacttctgtacaagctctgtatctgtgtccgttgagaacattattttaacaagaagaacaccaacagtagcatgaaatataatactgttttataattctaaagctgctgttaatttatgaagtacataataatctaatgtaaactgcagaagtcagagcaagtgcctacattttgttatttttggcattactacagagccatgtacaatagaaagcaatgcaagacttgtaaactctcaccacttcttgtaatatcaaatgttccccctcaggttattttgcttatggtacccatgagttgcctctctctgtacatagataaattgttccaatattttcctttgatgtttggaactacagatagtcaagggctggaaattttagttttcaatataagcttccagcttagcaattacctctagtccaagacaatatttgattcctagttctgtttggggcaaattttcatttatctaaataaaatgcaatctaattaaatgccatggattttctttctgtaaaaaaaaaaaaaaaaaa

SEQ ID NO: 238070 - DNA, 687 bp, Homo Sapiens
  misc_feature (23)..(23): n is a, c, g, or t
  misc_feature (76)..(76): n is a, c, g, or t
agcggaaaacggcagccagcgcnccgccgccccccagcgaggaggctgtgtccagcagctctgaggatgactctgngactgatcgggaagaagagggctctgtgtctcagcgctccactcccgtgaagatgactgatgcaggagacagtgccaaagtgaccgagaatgtggtccaacccatgaaggagctatatggaattaacctctcagatggcctctcagaagaagatttctccatttattcaagatttgttcagctggggcagagtcaacataaacaagacaagaatagccagcagccctgttctaggtgctcagatggagttataaaactaacacccatctcagctttctcgcaagataacatctatgaagttcagcccccaagagtagacagaaaatctacagagatcttccaagcccacatccaggccagccaaggtatcatgcagcccctaggaaaagaggactcctccatgtaccgagagtacatcaggaaccgctacctgtgaaaagagcgcaggtccacctggtggacacgtctgattagcttagaacctgtcttgtctcatcttcaaaaggtaacttattaaaagtcctttgcgtctgaagcctttctccttttctgtcatttgcaaattccaaattatagctaataaagatgactagataaaaaaaaaaaaaaaa

SEQ ID NO: 238071 - DNA, 768 bp, Homo Sapiens
aaagatgaagtgaatccagtacctcatcaagtggaaggttgtcttacatccacagcacatgggagagtgaagaaccttacagcaacagaaagtgaaggccctaaaaaaactagagaacttcaagaaaaaagaggacgaaatcaaacaatggttagggaaatttctcctgaagatgtagaatatttcaattgccaacaggagctggcttcagagttgaataaacagtatcagatagtagaaagagtaatagctgtgaagacaagtaaatctacattgggtcaaacagattttccagctcatagtcggaagccggcaccctcaaatgagcccgaatatctatgtaaatggatgggactcccctattcagagtgtagctgggaagatgaagccctcattggaaagaaattccagaattgcattgacagcttccacagtaggaacaactcaaaaaccatcccaacaagagaatgcaaggccctgaagcagagaccacgatttgtagctttaaagaaacaacctgcatatttaggaggggagaatctggaacttcgagattatcagctagaaggtctaaactggctagctcattcctggtgcaagtaggtagaaaaatatgagtgcaattttccttactgtttctggcttctttattgttagatgtcaagaattttttttttcttttttcacacccttattgtatctcaaccaagaaatctttatgctgcatattacagaaataaaagatgattgagaaaaaaaaaaaaaaaa

SEQ ID NO: 238072 - DNA, 750 bp, Homo Sapiens
  misc_feature (83)..(83): n is a, c, g, or t
  misc_feature (102)..(102): n is a, c, g, or t
agcaacagcagagctccagggagcttattcaatatttactgagacttcgaagacccagcagatgtttaatgaagtcactattntggctcaaaaccctccacntctccccctcccctcaaaaagccaacaggtaaacacataaatgaaagaaacccacagaaggggatgggaaataaagaaaattctctcaagacttctccaggcccatgtcactggtcagcgtggtttttatgtgtattaggattgggggatgtgaagaaataagtatccagtactttataaccaaagcaattaaatgatattgggtagggaatgttggccagttttgtttagttttgcatcacattgtcaccagactcactagcccaagtaatcgggcgcccgaagagggagacagagatgtgcagagttgaccagtgtgcggatgataactactgacgaaagagtcatcgactcagttagtggttggatgtagtcacattagtttgcctctccccatctttgtctccctggcaaggagaatatgcgggacatgatgctaagagtcctgggtaaatgtggtgagaatgcacgcgtgcatatgctacacatatgtgcttctcagttgcagaaaatgaactgctttgggagattatcagtagaaagagtgttatcatattggtgctgagtgctatgtgtgcttatacaatttgttcttgtattttaataaactttgaataaaagaataaagctaaaaaaaaaaaaaaaaaa

SEQ ID NO: 238073 - DNA, 717 bp, Homo Sapiens
  misc_feature (23)..(23): n is a, c, g, or t
  misc_feature (34)..(34): n is a, c, g, or t
  misc_feature (61)..(61): n is a, c, g, or t
agtcacccattcgagacatttcntatcatccatntgaaaatatggttgcattctgtgcatntgggcaaaatgagccaattcttctgtatatttacgatttccatgttgcccagcaggaggctgaaatgttcaaacgctacaatggaacatttccattacctggaatacaccaaagtcaagatgccctatgtacctgtccaaaactaccccatcaaggctcttttcagattgatgaatttgtccacactgaaagttcttcaacgaagatgcagctagtaaaacagaggcttgaaactgtcacagaggtgatacgttcctgtgctgcaaaagtcaacaaaaatctctcatttacttcaccaccagcagtttcctcacaacagtctaagttaaagcagtcaaacatgctgaccgctcaagagattctacatcagtttggtttcactcagaccgacagtcactttgctgaattcaacacatgtatattatggtggaaaaagcactagactcagggtcagccagccagaagaactgagccgacctgggatcccaccacttcctaactgttttgttaggtagttcactttctctcttcggataaatgtctccacatttcctacttcatagaattgtcagaatcaacacaatacatttaatactttgaaactcataaaatattgggagaataaacagtatgaggttaaaaaaaaaaaaaaaaaa

SEQ ID NO: 238074 - DNA, 673 bp, Homo Sapiens
gtcctctgtcaggcccgagcgaagtgcctgacaccgggtggatcctcagatggccccatgaactagtgaagtgggtcaaaggaggcctggaaagatgttgcttcctcaaggccactcggccatcagaggcagaaatgaaacaggaacccaggcctagaatcacaaaggtcctagaaaccacttggctgtctggcctctcaggtgtcagggccatccagagtgagacagcattggagggacaagtgtgcatgcagatgtcctcagacgggaaggtttgagaagggtcagatggtaggcgggcctaacaagggctccgtgctagccactgtcccgcacacagacaggatcaggtcatcttgatatggagatcagtccccaaatcactgaattgtcccagcagtgctatgccctaggtactaccaatatcactcctctatttcccagaggaggaagcagcagctagactccaggaccttggggtcatatctctcagaaagccaagagtgcaggatgagagctgtctgtctcttacctgcctgtatttgtgccccatttttaaagagcagagggcctgggccacaggaaaggtatcagcccttggtgataggcacattttttaccagtctatcatttggtcattaaatttgtttacaatataaaaaaaaaaaaaaaa

SEQ ID NO: 238075 - DNA, 734 bp, Homo Sapiens
agcagtccatggcgggaatccctggtagggagagtaatgccccatctgtgcccactgtctccctgctgccgggggcgcctggaggcaatgccagctccaggacagaggctcaggtgcccaacgggcaaggcagccccagggggctgtgtctgttcaagtcaggcttccccggcccctcgcgcagcagcgcctccacgggcagcccggggccccaccccacgcactgaagaggccgcctgggctgccatggccctgaccttcctgctggtgctgctcaccctggccacgctctgcacacggctgcacagaaacttccgacgcggggagagcatctactgggggcccacagcggacagccaggacacagtggctgctgtgctgaagcggaggctgctgcagccctcgcgccgggtcaagcgctcgcgccggagacccctcctcccgcccacgccggacagcggcccggaaggcgagagctcggagtgacggcctgggacctgccactgtggcgtgcggctcctccccgcgccgcgaggccgcgacctctgccacgtggaccgcgcgcggggcgctccctggtggcgatggcgcggcactggccgagcactgcgggggctttcctccttgttggttgctgagtgggcggccaaggggagaaaaggagccgcttctgcctcccttgccaaaactccgtttctaattaaattatttttagtagaaaaaaaaaaaaaaaa

SEQ ID NO: 238076 - DNA, 751 bp, Homo Sapiens
  misc_feature (57)..(57): n is a, c, g, or t
ctggatccccatcctatttctcagtgcctgtttcatcaccagatgtgttgtgacatntcgcatctttcaaacctgtgatgagaaaaagtttcagctacctgagaatttcacagagctctcctgctacaattatggatcaggttcagtcaagaattgttgtccattgaactgggaatattttcaatccagctgctacttcttttctactgacaccatttcctgggcgttaagtttaaagaactgctcagccatgggggctcacctggtggttatcaactcacaggaggagcaggaattcctttcctacaagaaacctaaaatgagagagttttttattggactgtcagaccaggttgtcgagggtcagtggcaatgggtggacggcacacctttgacaaagtctctgagcttctgggatgtaggggagcccaacaacatagctaccctggaggactgtgccaccatgagagactcttcaaacccaaggcaaaattggaatgatgtaacctgtttcctcaattattttcggatttgtgaaatggtaggaataaatcctttgaacaaaggaaaatctctttaagaacagaaggcacaactcaaatgtgtaaagaaggaagagcaagaacatggccacacccaccgccccacacgagaaatttgtgcgctgaacttcaaaggacttcataagtatttgttactctgatataaataaaaataagtagttttaaatgttataaaaaaaaaaaaaaaa

SEQ ID NO: 238077 - DNA, 738 bp, Homo Sapiens
  misc_feature (19)..(19): n is a, c, g, or t
  misc_feature (127)..(127): n is a, c, g, or t
  misc_feature (165)..(165): n is a, c, g, or t
gtgctgttttcttgtcgtntgtgaacgctgtgatgctgtgtgcccaagtgggcagtcaccacccagcccttccttgggcgtctcccccaggagtgctgtcgggaccacatctgtcctcaccctgtgngaccgcctggccctccctccctagcccttccagcttgngacacacacacacacacacacacacacacacgcacgcacacgcacacatcttacctctcatgcgtgttttaccttttgatgttcagagtggctcactggctgggagtccttacctcggggagagggggaggttggttccttggggggccaaagaaggcagggaatgcctggagggtaactggggggccaccatgaccccttctctctccagaaacagctgcttctccccccatcccagggtcccacccccaacccccagaggtggcccttgtttacagtgaggactcggccactgtgtctctgtttcctgaaatataaactgtagcgaccccagactgtagagatttttatgtgtttggatacatctgctgtgtggaaaaaaaaaaaaactacaaaaaccctaattttgtacatactgtatttttactattgaactgtattctagtggctgttcatgctccaagactttagttaccgagacatgaatactatccatgtaataagcacttgcctggaataaaatataaaactgaaataaacctgcactgaaacctgaaaaaaaaaaaaaaaaaa

SEQ ID NO: 238078 - DNA, 676 bp, Homo Sapiens
agacacctgtgtttccagggctgggactgacctcacaggatcactgctggctctgctaacaaccccaaggacaccaacgtttcccattctgagtacttctccgcaaaccctttgtttcattaaggactgttttacatgaagggtgcaaaagtaggataaaaatgagaaccctagggtgaaacacgtgacagaagaataaagactattgaatagtcctcttctctacccatggacttggcatttttatattcgattttaaggaaatataacttagtagtaaagagatgagcattcaagtcaggcagacctgaatttgggtcaaggctgcgccactcaaaagctatatgacctctatatgagcagcttattcaacctcttttaacctccattttgtcatctgtagaatgatgataaatgcctagctcagaaggattcctaatgaataaatgagtgacagtgcatgtaaacagactagcttaattaatattaatatgattaggatgggctgggcccggtggctcatgcctataatcctagcactttgggaggtcaaggagggaggatcacttgggcccaggagttcaaggccagcctgggcaacatagcgggacgctgtctgtacaaaaaataatttttttaaataaacgatattatgaggaaaaaaaaaaaaaaaaaa

SEQ ID NO: 238079 - DNA, 902 bp, Homo Sapiens
tcggaaaccaaagctcgatttagaaggtcattgcactggccaagtcttttctccaagtcctggaaaaaggctcctgtatgctcccgattccaaacccaggaaccggggaaggggcatgcctctgccccacgtcctcgagggatgcttcaaagggcccgggatcccagccgcaagaggccggagctgcccaggggcaccgtcgactccgaggatcaccacatttcctccggtgcctgtcacctgtgatgccgtgcgcaacaagtgccgcgagatgctgaccgctgccctgcagacggaccatgaccacgtggccatcggtgcggactgcgagcgcctgtcggctcagatcgaggaatgcatcttccgggacgttggaaacacagacatgaagtataagaaccgtgtacggagtcgtatctccaacctgaaggatgccaagaaccctgacctgcggcggaatgtgctgtgtggggccataacaccccagcagatcgctgtgatgacctcagaggagatggccagtgatgagctgaaggagatccgtaaggccatgaccaaggaggccatccgagagcaccagatggcccgcactggcggcacgcagacagacctgttcacctgcggcaagtgcaggaaaaagaactgcacctacacacaggtgcagacccgcagctctgatgagcccatgaccacctttgttgtctgcaacgagtgtggaaaccgctggaagttctgctgacccctcgtgtagatgtgctgcagccttgggccctccccggcccacgtcctccgttgacacagcttctctggagaccctagaaggcggcatgtcctgccctcaacctgcctgcctggattgcacctttctgccctttccccctcattattaaatgtttcttttt

SEQ ID NO: 238080 - DNA, 1000 bp, Homo Sapiens
ggaaggtcccaaggtcasmrcascaagctcgtgggagccacagaaraggcctcagcactscctragcagctctcctacctagatctgagcggagtagaacgggagcagagcgcgacctkaccttgagtrcgagcctgaagacttggaggatcttgagttggagcgggaggaaagaacgccctcgactcttggatctgctccgagacctcgagggtccgctgtggggagaggcctgatgatcagtgccccagtggatggctgcacccagcccaccctggccctcaggttcctagaccaccccagatgcaggggctctggctgtggatgtggcgccatagccacagcaacggtaccaagttcctaaatagtgtggccgagcctgctgctgtgtgaattcaggccttgtggaaaacaccgccccataggcacaggctgtgtgagggtggacgtgatgagtgtatctggggtctgctcccacccatcacaagctgtggaccctggccccccggccactgcagacatctgcgcttttacctgttcctcttctcctggcctttcctccgccgggcccgcatttttgctcggaagaactcatagaggccgttctgctcccagccttcactgtaagacacggcattccgtgtgtgaccacgtgacacccacccacaaggaagtcgtgaaaaagtcatcaggagttaatccacagaaccttggagagtacatggccctgtggctgtgggctccgagcatgggcgcagtagagcttggttcagtgttcccacagggctgtcctcctgcagcccagtggctcctctggtgcccacgcccttgccaccctgctgttccgctgaggtggtggggacccatggtctgtggaactgggaaacaggaacactgactcatgggtggacaggcctgcagcccagcacaggaaggaggggtgaccactgggaagggtgggctgagggccctgtggcagccggctgcttgagacgtgccg

SEQ ID NO: 238081 - DNA, 887 bp, Homo Sapiens
  misc_feature (864)..(864): n is a, c, g, or t
  misc_feature (869)..(869): n is a, c, g, or t
gcsctggcagcatagcaagtggctggtttgctrsctgctgsgagagagttatsaaaaattaaascaagagaaaagatsaggaagcagtgactttgaagcaaggaacaaatgccaggtgtcccacggccgtccgttggcgctggccttcgtggagctcacggtggtccagaggttccacgagcacgtgcaccagccttccgtgccgccctcgctgcgggccgtgctggggcggctcagtgctctgtacgccctgtggtccctgagcgccacgcggccctgctctaccgaggaggatacttctccggtgagcaggcgggagaagtgttggagagcgccgtcctggctttgtgttcccagctgaaagacgatgcagttgccctggtagacgtgatcgctcctcctgactttgttctggactcaccgattggcagagccgacggcgagctctacaaaaacctctggggcgctgtcctgcaggaaagcaaggtgttggagcgggcatcctggtggccagagttttctgtgaacaaacctgtcataggaagtctgaaatcgaagctctagtgggactggcacacattcagccaagtctaatgaaacgaagggaactaatcagacgtggacctcaacttctgattccagaacacgccggagattgctgctgctttctgagcccgcacctgtgcgcctaaactgctgattggcctcaactgcccaggcggacgggagggaggcacccggccggctggactaatctgggatcgcggtgatttgcagcgtggaaaagaaatgcagatgatcatgtctacctgatgcgccgtgggttttttgataattagaatttcgcacattcagttttcaggnttctnctcctttctcttaattaa

SEQ ID NO: 238082 - DNA, 924 bp, Homo Sapiens
  misc_feature (33)..(33): n is a, c, g, or t
  misc_feature (79)..(79): n is a, c, g, or t
  misc_feature (90)..(90): n is a, c, g, or t
  misc_feature (138)..(138): n is a, c, g, or t
tgacatgcaccgtccagggagaacttctgctgnccgtccgctctgactaccacttgtgccgtgtgaagttttggtaacnagtggcagccnacctttttgcaggcaatgcaggtgagaaaggggccacggggatcagcntcagccctcacctgcccggggagctggccatctgcagccgctcgggagccgtctgcctgtggagccctgaggatgggctgcggcaaatctacagggaccctgagacccagctgtccagcagcttttcgctcagtggccatgtggatccctcagaggacaccagctcccctcatagccctgagtggccacctgctgatgctctgcccctgccccccacgaccccgccctcccaggagttgactccggatgcatgcgcccagggcgtcccatcagagcagcggcagatgctccgtgactacatggccaagctaccaccccagagggacaccccaggctgtgccaccacacctccccactcccaggcctccagcgtccgggccactcgctcccagcagcacacacccgtcctctctagctctcagcccctccggaagaagcctcgaatgggcttctgaggacacaaggtgggctgccctcaagccccagagagcccctcatccttcctctgggaccagatgtgccttccacagttgaaacttgagaagcagagctcgccaccttctggaggccactgtgatgatgagccaagcaatttggagccaagttgaagggacagggcaacaaaatacagtagtagtttcttttgtattttgtatattcgcctgaagatcatcccgcaaggcaggctggaggtgccggtgggcctgtgttgctgggattttagtctgtgctgggaggcagggctccgctgcgcctcagctgtgggggcctcaggcaggtccctca

SEQ ID NO: 238083 - DNA, 603 bp, Homo Sapiens
aaataatattcgattttattagatgaaaaatgcagcctctcacatcagtgggggaaaagaggtactattcaataaatggtgtcagaacaggtggttagctctctggaagaaaatgaaaggatcagatgtcccccataaacaactactctactcagtaggaagaaaaaaacccacaaaacaatagcattagttcagttcagaaaatccagttcaagccaattattcaaacagtttttgggaggtaacactgtccctatgggaagacttggtatttttcagatttccctgctgtttatcaagatggcatatgggtgtagggagaagaagaggtgctggagccatctatccaggtccctgtactctctctggccctctggtctccacagcaaatgcccctgtccaccttgtctctgggcacatctgatgataacgtctgtggctggtttattgaatttgttctaggcttgtgtcccccaccgaccacctggctcatctcagctcccagcggcactgtgttacccctgaggttggctcctcttcaatgtccagaccgctgagccactctgcagtcctcaaatgcagaggtattgggtcactcttcca

SEQ ID NO: 238084 - DNA, 852 bp, Homo Sapiens
gggcccagcaaaaaaaaaacagcccctttttgccttccttgtgggggacaaagggctccaaaacccacttttgagttggggtccagactccgggggctcatcacatgaaaggatgtgcagagagagcctgaagttgactctgtgatcccgacttggctgtcactggcctgctgggtgtcctgggctactccgttccactctctgggcgtcaggacccatatgtgatgaaacaggaagactgaagcccaggcctggccggcccacggccacattcaggccaacagaccatccctccttccacagaggagaagcgcatctaccgggtgcctgttttcacagcgcccttctgccaggccctgctggaagagctggagcacttcgggcaatcggacatgcctaaggggaggcccaacaccatgaacaactacggggtgctgctgcacgagctcgggctggacgagccgctgatgacaccactgcgggagcgcttcctgcagccgctgatggccctgctgtaccctgactgtggcgggggccggctcgacagccaccgggcctttgtggtcaaatacgcaccgggccaggacctggagctgggctgccactatgataatgccgagctcaccctcaatgtggccttgggcaaggtcttcacagggggcgccctgtattttgggggcctcttccaggcacccacagccctgacggagcccctggaggtggagcacgtggtgggccagggtgtcctccaccgtggcggccagctgcatggagcccggcccttgggcactggtagcgtggaaccttgtcgtcggctccgagcctctctgtgcgcaacagcctcagtcccat

SEQ ID NO: 238085 - DNA, 1000 bp, Homo Sapiens
  misc_feature (57)..(57): n is a, c, g, or t
ttmggwatggagrgtgggccggrcctrrgtccccakcccccaacctcmagarccaanccvamgacrarragrtgagaagrstgytgctcyggaaccarggstccagggsggggcgmacaaggccctgvwtgtggatragycctsccgcggtgaccatyttccaarmatagggatataccyccctccttcttataactgraaatcctggagcccggaagattcagggcagacagaccctgataatgagctkgsaagggaagggcaaccaacatcttgtaacttgcttcccccaccctktttctggggcagagccaattgcccaatttctaccctaatccaaagtccctggtgtgggtggggttaaacgtgctggtgcatcctaggtcatccaagagtgagcgccaagtcctgagaaggggcacagaactccctggagggtggagatggagcacctgccccccatggcagggtacactctccccacagccttcctccccaccatcccgtggggactctcgggatttaagcactcgtctctctgggaggcccagaccccactccatttataggcacatctccttcatttcctaggtcactgcccctttgtttacagctcctgcctcctcccttgaccacagcctggtttacaaattccatcagctcccagccccacctgccaaagtcccaggtttacaagccacgcttacttgctgtgtctgcgtggaattctctcctctgtcccctccagtctcctcattggagtgacctgaaggtgtggcttcctccactttttctcagtattactttgccttagttttccccaagagggaaggctggaactcttaactctgtaccccttgatagttatttaattctgtttctcctagtggttcacaattgaactgaattgagatggtgtcgggtggctaaggagacacctcacctctccttccccattgtgccgcctttatcaattgcctgttttgttttgtttgttttt

SEQ ID NO: 238086 - DNA, 868 bp, Homo Sapiens
tttattatttcccagaaattgggaaatgaatagatatgccgtggagacaccattatttatatggtttttcagcacaaccagttatatttattgttggtttccacaactggaagtttaactaagagatcccatcaacattgaaccattctggtgtaaaaataaaagtgttggcccttattttcaaatatttacatcattcgttcctgaacttccaactgaagattgatttttttttctttttggaatgtgaaggtgaacattcctaatttttgtctgatgtgaaaaaagccttggtattttacattttgaaaattcaaagaagcttaatataaaagtttgcattctactcaggaaaaagcatcttcttgtatatgtcttaaatgtatttttgtcctcatatacagaaagttcttaattgattttacagtctgtaatgcttgatgttttaaaataataacatttttatattttttaaaagacaaacttcatattatcctgtgttctttcctgactggtaatattgtgtgggatttcacaggtaaaagtcagtaggatggaacattttagtgtatttttactccttaaagagctagaatacatagttttcaccttaaaagaagggggaaaatcataaatacaatgaatcaactgaccattacgtagtagacaatttctgtaatgtccccttctttctaggctctgttgctgtgtgaatccattagatttacagtatcgtaatatacaagttttctttaaagccctctcctttagaatttaaaatattgtaccattgaagagtttggatgtgtaacttgtgatgccttagaaaaatatcctaagcacaaaataaacctttctaaccacttca

SEQ ID NO: 238087 - DNA, 840 bp, Homo Sapiens
gggaaagggtctttgaaagaaaaatggaattgccaagtccagtgtatgtggtttgaaaagtgctactgcttcctctagtgaagtaaaaattggcctggatacaaaaagaggaaacctgtggaaatgcagaaaagcttgcaagaatatatttgttccagggagtcctcagcactgcctcttctattttcctgtggaaacctcaaaagagaaatcctgccaaaagcgctcaaggacaaagggattgccatggaaagcataactgtgtatcagacagttgcacacccaggaatccaagggaacctgaacagctactattcccagcagggggttccagccagcatcacattttttagtccctctggcctcacatacagtctcaagcacattcaggagttatctggtgacaatatcgatcaaattaagtttgcagccatcggccccactacggctcgcgcgctggccgcccagggccttcctgtaagctgcactgcagagagccccacgccacaagccctggccactggcatcaggaaggctctccagccccatggctgctgctgagtcagccacctagcgctggccccatgcagcctccctgggctgggctggctctggatggagccaggcatcggcaagggctctcgggagctgctgccgtcagactcctgcctcaagcctgagtggaagcacctgaggaccggggatcgggacctgacctggggctggcctcaggcccacgtgcacgtgactgccctctgtggaagccagcttaaaccctagccctgtgagagcttcctgtgcccagcaggaaggaagtcaaataaaccacacgtactacct

SEQ ID NO: 238088 - DNA, 833 bp, Homo Sapiens
  misc_feature (798)..(798): n is a, c, g, or t
  misc_feature (801)..(801): n is a, c, g, or t
  misc_feature (807)..(807): n is a, c, g, or t
  misc_feature (824)..(825): n is a, c, g, or t
agcaacagvaataatttstsaaaawtaaaarsamaaaaacaagasmgaksaadsaaatggttwagagacamaacaaggaaacmaactgacmttatcaaagaacacactmcmaagtataatgaaattcagaatgactacttgagaaggagagccgctttggaaaagtccgccaaaaaggacagtaagaaaaaatcggaacccagcagccctgatcatggttcatcaacgattgagcaagmcctcgctgccctggatgctgaaatgacccaaaagttaatagacttgaatggacaaacaacagcagcagctgcttaatcttcggmaagaacagtattatagtgaaaaataccagaagmvagaacatattaaactgmttattcaaaagwtaacmgatrtmgmagaagagtgtcagaacaatcagttaaagaagctcaaagaaatctgtgagaaagaaaagaaagaattaaagaagaaaatggataaaaagaggcaggagaagataacagaagctaaatcmaaagamaaaagtcagatggaagaggagaagacagagatgatccggtcatatatccaggaagtggtgcagtatatcaagaggttagaagaagcgcaaagtaaacggcaagaaaaactcgtagagaaacacaaggaaatacgtcagcagatcctggatgaaaagcccaaggttgctccatgaccatctttttgcgtctggatttgaaggttgcccatgaagattgttggttccatgtcaaactaaagcatttcttgagggtttttcttcatggcttaaaaacnttntgcctntaaagctgtgattttannwawaaaat

SEQ ID NO: 238089 - DNA, 463 bp, Homo Sapiens
  misc_feature (5)..(5): n is a, c, g, or t
taatntgtaaggaacagaaatgtatttctcacagttctggaggatgggaagtctaagatcaaggagctggcacttgttgactagggctttcttgctgtgttctcacatacagaaggcaagctagcaggatgctccccgaaacctcttttattatgggccttcatcccagtcctaagagaatccctcatggcctagtgatctcttaaagaccccacctcttgatgctgtcacattggcaacacttgaatttgaggggacacatacaagccatagcaaactgaacatttctcccatgccagatagcaccatgttctttgtcagtaggtggtggtagaggggcactgcaggataaaggggcttctttcacttctaagatgatactgtgacagttaattttatgtgtcaacttggcggggccacaggtgcctagctactgggtcatacttttttttttttttttttt

SEQ ID NO: 238090 - DNA, 850 bp, Homo Sapiens
ggcaagtgtgtttccccagtcttgggctgtttggcccaggcgcccgccggacatgggacgccaaaggggtctcgggcggggagtcctcgctttcagcgtccccggctgggaaaatcggccatcgctacggcgggaactgggactcgggctgcgtcccggccctttcacatcggtccaccgcactcgtgggcgcccgcattggtgctgacataatttcctgacctctgacccgtattgtctcgcgattaaagagctgcgcctggatccctcagcagtgaggagacctgaagaccagaggaaacacagcaagtccaggcactcccactcctcctgagagaaatctacagccacatccctgaacatcatcaactgttggaaagaataattccaagtattaatggggctcaccagagaagacagggcaaggtgagggggatctcctagcagaggaaacaacatgcgccaatcaagcaaagatatttttgtgcattcaaggaacacagagaggaaagacagtggcagatggagacgtataaagcagggatcctgttatgaaaagccctaaaaaatagggtatagagtttgggccatatttcagaggtaataagaaagcattctgcatttttaaagtaaggtttaaaaatgtttctaattagagatacagcaaagttggtgtgagaggataaagactgatatacataatctgaggagttcatgaaaattccatgtaaagcctgtagtatgaattggtcctaggagacagacagcttcaggggcatagagaactttaagcacttttccaagaagagtgaagggctggagaataaattgtaactaaaatatttttgtg

SEQ ID NO: 238091 - DNA, 1000 bp, Homo Sapiens
ggaratgrarggakcmargatktsccatgtatgtscatcyctccctaascmatatcatgaagaatcaacaagrggtgaataaactgagcaattcaycaccatattaagctggatattcctgtttagtaaatatctttccctagctggatgtggtctaggaggaagccttggaattttctcactctggattgtggaaccacaaagtcagcctggagctgcctacatctggacacctaggctcctgtcagagccagtttattatttccagtcactcattactgggattctcctctccctggggcgttatgaaggaattaaaagaaattaaagaggccgggcgcagtgctcacgcctgtaatcccagtaatttggkaggccaaggcaggcggawcacctgaggtccagagttcaagaccagcctgaccagcatggagaaaccctgtctctactaaaaatacaaaaaattagccgggtgtggtggtgcatgcctgtagtcccagctactccagaggctgaggcaggagaatggcttgaacctgggaggcggaggtggcggtgggccgagatcgcacctttgcactctagcctgggcaacaagagcgaaactccgtctcaaaagaaaaaaaaaagaaattaaagaatgtgtaagcaaaaactcagttgtatgtaagaaaacccaattctccctgagaaagaaaaaaagckgaagtcckttaaaaattgactgcctgtttttctgtggctagtgagccttatctctccctttcccaggcattgtgaagactctgtttctctagctgtgtagctgcaaggtcactaggcagataatctcaagtcgtaaaacatgttgttccttggaaagtaagaaatgatgtaatgcatgtcttaattaaataactgtctttgtttcttgcttctgtaatatgcttccccctgcacagatctcccaccgccccacaaaatgcttaaaaggtagcttgactctttgttcatggmtcag

SEQ ID NO: 238092 - DNA, 808 bp, Homo Sapiens
cgtcaaaataagatgtaaaaaacggaaaaatacagtgtggaatcatttttatgaaaaaaggaaactcctacattgtgtgcacagcccgcaggccgaaacccccctttgccggctcaagctagggaatctttcagcaagcacagatgtggccttgatcttcgagcacattcaccgtggtggagctggtgggtgtgttcacaactctcattggcaggataggagcaaagattatgcctccagccctagcgctacagctcaggctgttgctgcgaatcccactctactccttcagtatggtgctagtggataagcatggcatggacaaagagcgctatgtctccctggtgatgcctgtggccctgttcaacctgattgacacttttcccttgagaaaagaagagatggtcctacaagccgaaatgagccagacctgtaacacctgacatgatggttcctctcttggcaattcctcttcattgtctacatagtgacatgcacacgggaaagccttaaaaatatccttgatgtacagattttatttgtaattttaaaagtctattttattatgagctttctttgcacttaaaaattagcatgctgctttttgtacttggaagtgtttcaaaaaattatatgaccatatttactctttctaactttctttactccatcatggctggttgattttgtagagaaattagaacccataaccatacacaggctatcaacatgttattcaatgtgacacctaactcttttctattttgttttttaagtaagacttttattaataaaacaaaatgttttg

SEQ ID NO: 238093 - DNA, 572 bp, Homo Sapiens
  misc_feature (546)..(546): n is a, c, g, or t
  misc_feature (549)..(550): n is a, c, g, or t
  misc_feature (556)..(556): n is a, c, g, or t
  misc_feature (558)..(558): n is a, c, g, or t
gacaaaaagaacggcaatgtctgtactaataacatcagcatgtatgagttactgaagggcaatgaaaccatagcccgcttgcaggctctggccaagcgtactggtgtggctgtggaaaaaatggacctctctgcttctctgggtgaaaaagacaaggatttaaaactgcattgtgaagaggcagaactaagggactaccagctcaatgtacagctccgagaggtctttgctaaccgttttacacagatgtttgcagattacgaagcatttgtcattcagactgcccaggacatggaatcctggctgaccaaccgggaacagatgcagaactttgacaaagtaaaaagaaccatagttttccttttgtggttattagtggctttattattgattttaacmtttttaaattttttattcttctgtgcctatgcttacccatatattattgattttgttaaccttcttttaaatgcagactttttgtcttccagccccattaagaacttttctttaccaagtatttttacattagataaaataattttncanncaaatnanccagctcattgaac

SEQ ID NO: 238094 - DNA, 868 bp, Homo Sapiens
tttaaaatgaaggggattccatgattgccccttaaaaagaaactgtggagatattttggtcaaaagagcctgaaaccaaccagggaggtttcaatggaattacaggtcccaaggaaaaaactgtcttaagaaaggacaaccagacagttgcgctatggattccattaaaataattaaggaaaataaggtcaaaacctggtaattgctaatggagacatcagaagcttaaaggaagcaaaaaatgtgtggcggattactggggacaaatggtgtgatggttgcaagaggactcttagcaaacccggccatgtttgctggatatgaggaaaccccactgaaatgcatctgggactgggttgacattgctcttgaactcgggactccttacatgtgtttccatcaacatttaatgtacatgatggaaaagataacttcaaggcaggaaaaaagggtatttaatgctctgtcaagcacatcagcaatcatagattaccttacagaccattatggcatttgactagacttcccaaataattttaatatatacttttagacccacagtgaaaccacagaaggtcatattttgtaccttaaaccagtagctctcaaattttagtataaaaacaattcctgggagcgttttttaaaaatcagttgtagacaccaccctcagagattctgattaggtagatctggagtagacccagaaatacacagtttaaagaaaactcccagtggttcaaacatcctgatcatcctaggcaaacattgacaaatactgctctgaatcctgttctatagatattggggggatgggtagagtgggaattttttcctaatcagtttttacattttaaatagaattaaa

SEQ ID NO: 238095 - DNA, 844 bp, Homo Sapiens
gtactttccaggagcagatgagccattacagtatccttgtcagtattcagatgaaggacagagcaactctgccaccagtacaggctcattcatggacattgcttctacaaatacgagtaacaaaagtgacactaatatggagcaagttcctgccacaaatgatactattaagcgcttagaatcaaaattgttgaaaaatcaggcaaagcaacagagtgaatctggacgtttaagcttgggagcctcccgtgggagcagtgtggagagcttgcccccaacctctgagggcaagaggatgagtgctgacatgtctgaaatagaagctaggatcgccgcaaccacagcctattccaagcctaaacggggccaccgtaaaactgcttcatttggcaacattctggatgtccctgagatcgtcatatcaggcaacggacagccaagacgtagatccatccaagacttgactgtaactggaacagaacctggtcaggtgagcagtaggtcatccagtcccagtgtcagaatgattactacctcaggaccaacctcagaaaagccaactcgaagtcatccatggacccctgatgattccacagataccaatggatcagataactccatcccaatggcttatcttacactggatcaccaactacagcctctagcaccgtgcccaaactccaaagaatctatggcagtgtttgaacagcattgtaaaatggcacaagaatatataaagttcaaacagaaattgcattgttattacagagaaagcaagaactagttgcagaactggaccaggatgaaaaggaccagcaaaatacatctcgccgtgtacaggaac

SEQ ID NO: 238096 - DNA, 861 bp, Homo Sapiens
agtctcttaaggcaggcacattaagagcctcgacaaggtaaaaaatcctgccacccggaatgggggcggtcgagttgctgtcacaaagaggtaattgccttccggctgcccaccgttcttttatggacccaaccattgggtggacatttcagcccttttcgtgtacagcacatgaacctatcgaactcagttatagaagtgtccaccctccacggcatactgtctcagtgttccaagttgcagaatctaagcctggaaggcctgcggctttcggatcccattgtcaatactctcgcaaaaaactcaaatttagtgcgacttaacctttctgggtgttctggattctctgaatttgccctgcagactttgctaagcagctgttccagactggatgagctgaacctctcctggtgttttgatttcactgaaaagcatgtacaggtggctgttgcgcatgtgtcagagaccatcacccagctgaatcttagcggctacagaaagaatctccagaaatcagatctctctactttagttagaagatgccccaatcttgtccatctagacttaagtgatagtgtcatgctaaagaatgactgctttcaggaatttttccagctcaactacctccaacacctatcactcagtcggtgctatgatataatacctgaaactttactattagtgacaagagctggggttaggatccggttggactctgacatcggatgccctcaaacatacagaacttccaaactcaagtccagccataagctattttgccaacatgtcagagtaatctgtatttttgtatggatttctacttttatagacttgttttaaaacaatgaaaaccacattttt

SEQ ID NO: 238097 - DNA, 619 bp, Homo Sapiens
cttttctttttcttttgcaaaacactaccctccttctccttcagcatctgttgtgtatattctgccctcacatctctgccatgatttcttagggaaacgtgtatattgtaaaataagcagattataacgtggtgccaaacagaacatctgcttctatcctcaaagcatgtatttaacttattcatcctctgcattagaaaataaaagtgcagcttatgttcaaaaagtacaactcatacaaagcaaggtttaaaagttctgtacttagtgtaacctttcaaaggtttgtcttgattagtataaattcagactctgcttacccattgactataagtaactgttttttgttttcaagtctttagatgacagatcatgctggagtagatgtgctcttgcttgcataaagacagctgtgctatggcgtttttttttttaatctcaaaagttaacgtgattcaagagagtggttttgctaaacaaactgaagcacactcgtcattacattaaaaggtaagaaaacaattctgagagacagcaagcataaagggcccagaatcactgtgcgaggccacaggtcaactcacccagcggacatatgtacaccagtgttgaatcttta

SEQ ID NO: 238098 - DNA, 604 bp, Homo Sapiens
aaataatggagagctggacatgtgatgcatgcatgtagttccagctacttgggaagctgagggaggtttgcttgaacccaagagttcaaggctataggctgtcgtgtgctctgatcatgcctatgaatagccactgcactccagcctaggcaatataatgcgattctgtctaaaaaaataaaaattgttaaagaggtgggggatttgtcccaagtcacactttactaatttatggcagagctagaactaaactggtatgagtaatttttctttgggcctcgttaagaagcaataatagggcaccgggtacagtggctcctgcctgtaatcccagcactttgcgaggccaaggtagcggatcatttgaggtcagaagttcgagactagcctggccaacatggtgaaatcccgtctctactaaaaatacaaaaattagccaggcgtggtggcaggcacctgtaatcccaggtacttaggaggctgaggcaggagaatcacttgatcctgggaggtggaggttgcagtgagctgagatcatgccactgcactccagtccgggtgacagagcaagactctatctaaaaaaaaaaaaaaaaaaaaaaag

SEQ ID NO: 238099 - DNA, 1000 bp, Homo Sapiens
  misc_feature (999)..(1000): n is a, c, g, or t
ttttcccctgtsctwayccccccccmcttccaggttttgrcswttcwmaccaarrcaaakacgcctcaggaggagwaaaagggtgccatctgtgtctggagggcagstgtgttmatccctgkgctactggacatttcacaattctggcacctkgcgattggtcagtcamcctcagaaagtaactatcttgargkttgaaaaacaaccaaagaaagggagtgaggactatggctgcatgtcctctgcttgcccggctgcagagcagagatgtgcagccctctggtcagctggtccaggctggtccccgccggtccccttccagtccagccaccaagagtccacttgtcccgggcttccacctggctgacaggaagaatttctgagagctggatgtgcatgccctgtggacgaaggtacagctcgcctgcctgccccaatcccagccccgacaatcacatgcagctgactcggacactggccttgggaacaatgttcgagagaacacttgccccttgactgtaggagccagaaggggacccaggtgtgcatagctctctgtagacatttttacccaaacctgttggtaaagtgcccatctggtgctcaagagagcctgggggtctaacagggagcccggctgcctcacctggccacagcctccacaccagatctccacattgtcttgatccagaccagctctgtgatcagaaggaaattgggtccagtgtaggagagagctggtcctgggcctggcaggcaagagtgtgggcatcctttcctggcctttctccactctccctcaagcctgtgctcaggttgccttgaatgtggactctggaagagccaggggcccagaatgccgggggaggcttctgagtggcactcatggaacaccgtccctctgccagccataggccctgcctccagtgtcagggaatggaggctgggctgcgagagtgttgctgccccctgtgtcattcttctaatccaatgtagaann

SEQ ID NO: 238100 - DNA, 1000 bp, Homo Sapiens
  misc_feature (887)..(887): n is a, c, g, or t
cagctcyttgaataaacctcccmccaccaaraacccatacattacttcttttcattgtatcaaaagtaatkgyccaccggtgtgagcaccagccactaacttctccctcaracatctctaaagctggaaagattttgagggacaatatggttccttcaccccacaccaatkttatgaatgagaccagcagaccaaacagcaaacacctagaaggaacagctgttcttcatgggtaactgctgtgaaaccaacaggatggcctcttttctatttaatcctaagagtgggcataaggtaaaatattgggtaggtcctttggagttctaaactcagtttgagataacagaagatatgctcaacatcctcctttgacctggtcccagttcaccatatttgctagatgctttatagtctctggtaaggaggtgtacaattctctgattttatttcagtttttagggaattttattttgttcatttcaacaagaaaaataacataaacaggtaacagctccactcaaagctgttttaaatgaacaaaatattggactttgtgaacaaatatgatactttttctttctgcaattattggctagcaatcttattttactaaatctatactgacaaatttaatttggtccatttatttgagtttaaagactatttcaaactctccccagtgaaacagtcatgggccattgctatcctcaaaagaactaaatatataaatagcagctttcctcaaaaaagatgataaagtcttcttttccctttagagcataaatttcagtggcaggtaaaactattttagcaacaataggctaacttcttccatgatatgtttttcttccctactaagttgaaagtttttctcagtttccatagcnactcacaagtttttctctacctaactgaagttgccctcttctgctggtcattaggacattaacttttagaatgatttctgtttcagcctcttgttttgaaggcaggcttttaa

SEQ ID NO: 238101 - DNA, 687 bp, Homo Sapiens
gggatccggaacgagggaactgcaggtcagatatcaccgaggataagtgttggtcacaaactgagacagtccaccgggcgccagtccggccccaacataagcccctaatccgcagccagagcctgcgtgtggtcaagagttagccaccggtacgggagggcacctcgcgctccctgaaggttcggacgaggaaaaagactgtgccctcacacgtggacagctagggtctgctgcatctgcccccttcttacctcgtgccctgcagggctccagggctatttggagggaccttgggctgcacatctggcctgcctgcaccagctgcctgggccccaccctcctgactcctgctgatggttaagggccgggagcagatgctgccaaggccacatgcagggatgcacccacaatgtaccaaagcaggctgggcccagggttctatttattgccttgctctgccctctcccttccccggttgtgggacaagagccctccctgaacccctgcaaccctccctgaacccctgcaaatgaaaccaaacgtccacctgggtgtgttcattccttcctgtccttcaaagtacttgatagcctttcataaggcctggcacatgtgtcctggttgtgtgtgtgtgtgttggtgagtgaggtcaggtttgcgagtgttttaataaataaaacataaagg

SEQ ID NO: 238102 - DNA, 881 bp, Homo Sapiens
ccctgggtcaccggttggatattgtatctatctcctaaggatgggcttttttatatggataatgatctcatcacccgaaacacagaaaaggccaaaagcttaatagaagaaggaggagactgggacaggagaaaccgcctaaaagtgtatcagggtctttattgtgtggctattcgtgatttcaaacaggcagctgaactcttccttgacactgtttcaacatttacatcctatgaactcatggattataaaacatttgtgacttatactgtctatgtcagtatgattgccttagaaagaccagatctcagggaaaaggtcattaaaggagcagagattcttgaagtgttgcacagtcttccagcagttcggcagtatctgttttcactctatgaatgccgttactctgttttcttccaatcattagcggttgtggaacaggaaatgaaaaaggactggctttttgcccctcattatcgatactatgtaagagaaatgagaattcatgcatacagtcagctgctggaatcatataggtcattaacccttggctatatggcagaagcgtttggtgttggtgtggaattcattgatcaggaactgtccaggtttattgctgccgggagactacactgcaaaatagataaagtgaatgaaatagtagaaaccaacagacctgatagcaagaactggcagtaccaagaaactatcaagaaaggagatctgctactaaacagagttcaaaaactttccagagtaattaatatgtaaagccatgtaactaacaaaggatttgctttagagataattatttggaatttttatagcttacttcacaatgtgcccaggtcagctgtaaaaataaatactgcattgttgtt

SEQ ID NO: 238103 - DNA, 924 bp, Homo Sapiens
ggaccaggggcgggacaagggcggacgtagggccccaagggggcgcgcaagatggtgcttttttaaccgtggaaagagtgtgtagggccaacctgaacccccattgtaccagccgcaggggaagccctttttgcgcccccggggccacacaaacaagcggcccaaatttctttgtggggcccagcagagtggttatctccaggcggccacaaggtgggtgttcagcgggggccacctgtcccggcagggcaagggctcttacgggcgcagccaggtgaccccttccagcaaactgttgtcgaccctcctgcgcggcatcgtggccacccccaaggccgctgccttgcagtacccatcgccttccgcggcccaggacatggtggagagggtcaaggagctgggccacagcacccagcagttccgccgcgtcctaggccagctggcagccgcctgagggtggtgaccccaggagggaggcaggggaggggtgcggcggtcccagctccctggctcccatgtcaagagtcgctgtgccacaggcttagggacaggaccccagctctgcgtcggtcctggtgccctggatgcccaggaatctgtatatatttatggccgggcagggtgtggggccatgcctcctcaggagccgaagcccaggggccggccagtggccttccccagcatgcaccacgggcccgggttgggtcaccagacggggctggagtgtgagggtcctgcagcctgcaggacctcgtgccaccccgagggctgagcctggtcccacgagggtgccgtgtcccctgacagggccagtgcagtttggtgtgtcctccgcctttccaggagaagaacctaagaactatttttcgttattggttttccaatcattgactaagagtctccatttaaataaagtttttaaaa

SEQ ID NO: 238104 - DNA, 868 bp, Homo Sapiens
  misc_feature (77)..(77): n is a, c, g, or t
  misc_feature (102)..(102): n is a, c, g, or t
tgtggcaaatgttgcagaatttgatcaaccctgggcggaaccttcaaagaaaaagggtttattcaaagaaggccctncagggtacatgatagaaggtctttncgccaaagaaaaacggaaaacggacggctgttttgtgatcccggggaccaaatacaaaggtttttctctggcggaagtccgcctccaaaaaaaaaattccaggggaagagagtagtgcacttttataaaagcggggggggcgctgaagttcaataaaaaaaaagtacgcctttgtattttcaaggaatgccaagaaaactgcgtggtccaattcaggaatcgaaggggggtaatggagaaattttgataaggtgtgtaacagcatcctgagcaggcagggatgctgagaataagcctaaggtgtggtatgtgtccctggcttgttctaaggacctcaacctcctttggattcaacagatcaagaaccttttgtggtactactgtgattttctcaagcagctcaagcctaaaatcctgcaggactcccgactcatcaccctgtacctcgcgatgcttgtcaccttcacagacacttcaacgtggaaaattcttcggggaaaaggtgaaagtcttcgaccagcgatgaaccacatttgtgcaaatataatgggacatctcaaccagcatggattttattctgtgctgcagtgctgtgatgggctgtttcctgatttggtttcatatgctcctcacaacaaccctgtgaggtggtccgttggcagaagctggtatgactggcagttgtctcgctagaggaaccttctacttcataccataattaaacggcctctaaaagtagaataagtcctttaagttttagtccggc

SEQ ID NO: 238105 - DNA, 695 bp, Homo Sapiens
tttttattacataatattttattaagtagttacatgttcaccaaccagactgtgagttattcacaagtgaagacttctgtcttcatatttgtgtccctaggacttgactatgtggcatacaataaataattatgcaatcaatgctttgcaaatgaatgaccagaaatacaggcaagtatattaaaatgaaaattcacaaacacatgaacacacacatgtaactatgtgtgtaactgtgtagtacttgattaggtaaacaaagtattatctaaaatgggattagccccaaatcacaatgcttatacaccaatttgatgtgttttatggggcagcttaaaatacattcacctacattatgactttcctaattaggatacgttctcataaatgaaaatatcatagttatcctatacaatatgtaagaatctttacgttcaacatgttttatcactgatatgaggaatgaatataaagtcgagaaaaaataaagcaaaaccaatagaactgttcccacaatagaacaatggatacataactcaacataaataaaatagtaaaagtattaaagattagatgttcaaaataaccaattagaaataaaaatcaaatgtcagctttttattttttattatttatttatttatttttttggagacagagtcttgctctgttgcccaggctggagtgcagtggtg

SEQ ID NO: 238106 - DNA, 1000 bp, Homo Sapiens
gacatgagtgytctggccacgggaraccagcmtcagracagcatggcgtttgstgcacawgtgccgccgagacactgytgcctccattgttgtcacccaggggccgagtggtgcgcggacacctgggctcacaccctgctwcacgctytcgggaagccacktggagttgccggytgctgctgaacagggtgcccagtggatgctaccggctgctccgaaagacccccctacacctggctgcagagcgagggcatggcctaccgtgggcttctgctgagccgagggccagccccactcgcggacgcagtkggccgagktgcccagakccctmaggggacctgccccagcgctgcctgwacttggagggggggagaaggagtgtgagggcatagagtccacgggctgagccagacagcaggctccaggctccaccgccccagtgatttccaggctctctggctgaggctgcctgcctggaggggacatcagggaagaggcttccggaggaggggatgggagaaagtaggggatgtggcttgagctgcagtcacaggccttggctggaccagggatggcccccagctcccaggagggcccactgaccctgcagctccagccttctccatacttcaacaaagaatgagttgtggcaatgagggaagagagaccctctcatagtgttttatactcagtacctgttttaagaaaaaacaacaaggaagtaaaaccaaagacaggcaggcagcctggcgctaggcccgaaaccaggcctgcgcctgcctggcctaaacccagtagttgaaaatcaattcataacttagaaaccgatgttattcatagattccagacattgtatagaagaacatttgtgaaactccctgccgtgttctgtttctctctgaccgccggtgcatgcagcccctgtcacgtaccgcctgctggctcaaatcaatgacgaccctttcatgtgaaatcttcggtgttgtgagcccttaaaagg

SEQ ID NO: 238107 - DNA, 940 bp, Homo Sapiens
  misc_feature (929)..(929): n is a, c, g, or t
ctcatccgtgtcaacgccaccaaggcctacgagatggcctcaagaaagtaccatggctggatcgtgcagaagatcttccaggcagcactgtacgcagcaccctataagtctgacttcctgaaagcgctctccaaggggcagaatgttacggagaaggagtgcctggagaagatccgccttcttcctagtcaactacacggcgaccatcgatgtcatctacgagatgtacacccagatgaacgctgagcttaactacaaggtgtaggcatgcccactgctggacacgtccccgactcgtggccacatggagaaacaggcaaaccagaatcactgtgaatcaagtcggtgaactgcccctggcctgtgtcccccagagcagcccagggtcctgccagagtctgcaggggacagccctcgttttttaagtcttttttttttttttttttggtctattctaaaggaccagtaaataatgatcttacttccaaatctccttggaatttcacgacagcacagactgactttataccttcatttcagcgtggtaaaaaccgattaacacttctaatgagtcaagtcctagggttttttggttttgttttgttgccaacgaggaacacagctctgggggaatggtgtcatccacctcgctttaaaaataagcacatgatggctgggcaccgtggctcacgcctgtaatgtctccactaaggaagaatgagacaggtggagtcacttaagttaggtcagggtatgacatcatcgtcaccatcatggtgcccccctatctctactaatattatagaataactcggccagggtagggccgcccggatgatcccgtcattctggagggttaggccggaagattgcttagaccctggaggtgaagggtgccattagctgagatcgcgccactgcactccagncctggcaacaa

SEQ ID NO: 238108 - DNA, 956 bp, Homo Sapiens
  misc_feature (129)..(129): n is a, c, g, or t
  misc_feature (190)..(190): n is a, c, g, or t
gtttttgtggggcccaagggaaagctggggccccaaaggagaaggtggtgtttctctgttcccggcttccggggagataaagggccccataggccaccagggtccgattgccaaagaaggtgcaccagnccgtacagggagcccgggctgccgggtatgccaggccgcagcgtcagcatcggctacctcntggtaagcacagccagacggaccagaagcccatgtgcccagtgggcatgaacaaactctgggagtggatacagccctgctgtacttcgagggccaggagaaggcgcacaaccagggacctggggctggcgggctcctgcctggcgcggttcagcaccatgcccttcctgtactgcaaccctggtgatgtctgctactatgccagccggaacgacaagtcctactggctctctaccactgcgccgctgcccatgatgcccgtggccgaggacgagatcaagccctacatcagccgctgttctgtgtgtgaggccccggccatcgccatcgcggtccacagtcaggatgtctccatcccacactgcccagctgggtggcggagtttgtggatcggatattccttcctcatgcacacggcggcgggagacgaaggcggtggccaatcactggtgtcaccgggcagctgtctagaggacttccgcgccacaccattcatcgaatgcaatggaggccgcggcacctgccactactacgccaacaagtacagcttctggctgaccaccattcccgagcagagcttccagggctcgccctccgccgacacgctcaaggccggcctcatccgcacacacatcagccgctgccaggtgtgcatgaagaacctgtgagccggcgcgtgccaggaagggccattttggtgcttattcttaacttattacctcaggtgccaacccaaaaatggtttatttttttctaaaaaaaaaaaa

SEQ ID NO: 238109 - DNA, 893 bp, Homo Sapiens
tctcaggcccacaaatgaacttgggctacaagtaaagccatttattcaattggaaagaacgcccactccaagaacctcacgaaccggctttttgaaacaaaacaaaaacatccaacaggtcatttgggctggtaagccactttgaatgcacaaaaaaccccggtcaggggggaggggattcttgcgacaacctgttttgtgagcccccctgtggggcttgtctctggagcctgagaagggctggtgcccaatcggcatgagaagacgagcgaaaggcagagggtttggagtctcctcaccagtgttaaaagaagaagtggcctcacaggccagctcaaagatgtaccgaagaatatcacagcccccagggtagggagacaagcagcagtttgttctgtctcagctcctgtcaaggatcctgcggggtgggccctctgtatagctgctctctgtcactggcccctggagtgggagcagcgtccttagtcactgcaggcccaggcgggcaggtggtcccaggacagaggtggggaagttgtcctgaggaagcagaagtaggccttgctcccgcccaacccaagggcctccagtggaccagcattcaagatgtgagtgcccgtggtgtgcaaggcactcccatggcaccgtatttattgactgatctgtgaaggcttccctgacccctgcccaggaagagttcactggtcgctctgttgtgccccacagcactttgttatacctctgccacacacttcacgcagcgcgttgtaactcatgtgtttacatgtctgtccccccagactgtgagctccttgagggcagggactgtacattctccagctctgtgtccccagggcctggcacattgtagacgcttaatgaagtctattaaa

SEQ ID NO: 238110 - DNA, 520 bp, Homo Sapiens
gataaggcaagcaggattataaagccagcgttgcaacaagaaaagcgagatttatgctatttgaaagaagatcctggaatatgtcgaggttatagtaccaggtatttttataacgatcagacaaaacagtgtgaacgtttcaagtatggtgaatgcctgggcaatatgagcgattttgaggcactggaagaatgcaagaacatttgttaagatggtccgaatggtttccaggtggataattatggaacccagctcaatgctgtgaataactccctgactccgcaatcaaccaaggttcccagcctttttgttacaaaagaaggaacaaatgatggttggaagaatgcggctcatatttaccaagtctttctgaacgccttctgcattcatgcatccatgttctttctaggattggatagcatttcatgcctatgttaatatttgtgcttttggcatttccttaatatttatatgtatacgtgatgcctttgatagcatactgctaagtaaagttttaata

SEQ ID NO: 238111 - DNA, 1000 bp, Homo Sapiens
tcacaccatcttycctccctytccagatgagaragcgctgcggtcccscctttctggtactacgtcctgatctmaaktcgtytcgagatctgtgctccagaagctggcgrgcagactcgggagctctgktcsgcctcattacgtccccgctcttcattctcctgcagctgctcatgatccgcgcctgtcgggtcaactagcctcaccgaggtgccggagagggagcgctggacaactagaatgttgacctcgagccgaggccctacttgcagcgcaccggaggagaggctctctagtctgaaggcacmcgcccytgcgccgagctgagtgccgggtttccctattccaatcctgtttgaaatggtttcttcagcagggcttaaaagagcagccttcatcctgaaaatgtatttccttttgtttaatgctttgagtagataatcctgaattgaggtcatgaggaggccccccaggccagacagtcctgaacccctctgacacttgaaactgaatataagtaaaatgtccaggtggactctgagtatttcctgtggatcctgggaaagtactgttgcacaaaggctgcaaagctggactcaggaatgtcctccaaccagcagcgctgacctaagagctccctgtgccgtctatccagaccagacttcggtagatgcctttgttagatctatcacatgtaaacgagcttgtatctccttccctgtgccacgagagagattggctttttattccagtctaggcagagacagaagaatgttgaataagagcacgattagagtcctgtctggttatctgttgcccaagaaaagaactctgctgtccaggcactgcttggcttactatcccagcaaagactgcagttttgtggacttttgaccaccttgggctggcactcttagcacacctgagacagatttaagcctccctaagagactgaagagaggcacaggtgtcagatactcataggcactgagatctacaa

SEQ ID NO: 238112 - DNA, 1000 bp, Homo Sapiens
cttccatckgggcagctcmrgwtttwtaamccaamaagccagwrtagaatgcacaggggggatwccttcmactcacacmagtatggtgkktaarmcaccatcmgaactgtagcctkgrgwkgccatttcagccgargamtcttctattcggaagtacaccctcactattaggaaggatcttaggggtaatttttctgaggaaggagaactagccaactttaagaattacaggaagaaagtggtttggaagacagccaaagaaataaaagcagattaaactgtatcaggtacattccagcctgttggcaactccataaaaacatttcagattttaatccgaatttagctaatgagactggatttttgttttttatgttgtgtgtcacagagctaaaaactcagttcccaaatccccagtttatgcagcgccatcaggtattttaagctaaacttcttcacccctgagagcatgtcagctggagaaaagcagttcttccttgcccacttgagaagtgcacgcccactcacccaacatcctggtctctaggaaagcctcatgtgaggttcctctttctttcagctcagtgcccatgggcaaggatcatgatttccattccgtgttacaatgacaatatttaatgagcataaccttctcagtctcctgctctcaaatttaggacagagccgctaaggacaaaacaatccctcccgtgctttatgatggcagcaggggctggggagcctctgagggactctttcattctgcagttgtctggaagcctgggtggcgtcatgagctgaaggatcatgctttcctgtcctggctccataggttataggctggctggtgaaaggttcacgtggcccaggctgaacttcattgcctagctttggatgtgctttctgccataaagactgatttttgttcgttctgagccttcaaggaatttgttttttacaactggaatatgctcctgtgtgtgttaacagatcatggatg

SEQ ID NO: 238113 - DNA, 1000 bp, Homo Sapiens
  misc_feature (505)..(505): n is a, c, g, or t
ccttgccgctgsgcccccccgtttscccccccccgttsccaattscggaggsccsawtccatgsggagtygtcscgrasccggttgcgttgtgctctgtktcccccggytggaggcaagcttgcggbtytacaccccgcgctgcggccaggggtggstgctatccccacccgggctccgrgytgcccckgcaggcgytgktcatgggcgagggcacttgtgagaagcgccgggacgccgagtatggcgccagcccggagcaggttgcagacaatggcgatgmccactcagaaggaggcctggtggagaaccacgtggacagcaccatgaacatgttgggcgggggaggcagtgctggccggaagcccctcaagtcgggtatgaaggagctggccgtgttccgggagaaggtcactgagcagcaccggcagatgggcaagggtggcaagcatcaccttggcctggaggagcccaagaagctgcgaccaccccctgccaggactccntgccaacaggaactggaccaggtcctggagcggatctccaccatgcgccttccggatgagcggggccctctggagcacctctactccctgcacatccccaactgtgacaagcatggcctgtacaacctcaaacagtgcaagatgtctctgaacgggcagcgtggggagtgctggtgtgtgaaccccaacaccgggaagctgatccagggagcccccaccatccggggggaccccgagtgtcatctcttctacaatgagcagcaggaggctcgcggggtgcacacccagcggatgcagtagaccgcagccagccggtgcctggcgcccctgccccccgcccctctccaaacaccggcagaaaacggagagtgcttgggtggtgggtgctggaggattttccagytctaacacacgtatttatatttggaaagagaccagcaccgagctcggcacctccccggcctctctcttcccagckgcagatgccacacctgc

SEQ ID NO: 238114 - DNA, 846 bp, Homo Sapiens
gatataaatacaactgtcccccatacactggaaaatttacgttgcaaatgcaaaggggaaaatggggtaagctggcaggacaaaggcatccatggttcacaatcataaatgtttctgaagagattaagtattcagtaaaaagtagcattaaaatatcaaaaaaatataaaaaaactcattcctttcccttcccatgaatcattgcagtcattccctaagtttcttctctttttttttcatggctgctaagtattgtattttagaatcacagactctcagcttagagagtcgcagtatctcaattatttgctctgttcaatacttaacaatacctcctcactcaattctacataactccagcttagtcttccaaaattcactttcatgatgccactcagcatctcaaatacctttcattggctctctgctgccaaaggataaaggtcaaagtcattagcctcaacagtgggcttcaaccagcctttggacctcagccccatttatccatcacagaggctggtaactagtctcactgctcaggctgtgagtgttcctgatcttgtgacattctgtgctgtgcttttacatggaacagctctttcctctctcttggcccattcagatcctcctcatccagcccccatctgaatcctgtaacagacacaaccacatctacacagtttccacataccacttggaattgctggttatgctgcaatgagagaatgtctttgtctttaaattgtaagcttcatgagggcagggaccatctgtttctctgtctctcctcccagtgcctgagcagtacgctgtctgagatgtcagaacccaagtaaatacttggga

SEQ ID NO: 238115 - DNA, 792 bp, Homo Sapiens
  misc_feature (786)..(786): n is a, c, g, or t
tttscccatttctstactcatscatccattccattccccttctctttttcctcccctcctcctttactcctkcacackctccttcctctgaggstgmmattsmgmatmttmktkmcctcagctttgatatttcactaacagcacccccaaccctggcacccagggtgggaagggctacaccttagcctgccctcctttccggtgtttaagacatttttgkaaggggacacgtgacagccgtttgttccccaagacattctaggtttgcaagaaaaatatgaccacactccagctgggatcacatgtggacttttatttccagtgaaatcagttactcttcagttaagcctttggaaacagctcgactttaaaaagctccaaatgcagctttaaaaaattaatctgggccagaatttcaaacggcctcactaggcttctggttgatgcctgtgaactgaactctgacaacagacttctgaaatagacccacaagaggcagttccatttcatttgtgccagaatgctttaggatgtacagttatggattgaaagtttacaggaaaaaaaattaggccgttccttcaaagcaaatgtcttcctggattattcaaaatgatgtatgttgaagcctttgtaaattgtcagatgctgtgcaaatgttattattttaaacattatgatgtgtgaaaactggttaatatttataggtcactttgtttaactgtcttaagtttatactcttatagacaacatggccgtgaactttatctgtaaataatcagagdnaahtaa

SEQ ID NO: 238116 - DNA, 902 bp, Homo Sapiens
accaaacttagacccagtttgttttttccagaggcctgtagtctttatttagaaatctattttaaccggtggggcttttattgagttgtgaattttggcatacatttcgaaacctttaacccccaaaaattcagcaaggtgcaccctatattcacccattaaacttatatcccaaggtccattttttccctgtacactgcaaacaaaagaatatattagagacttttgaaaaatgctgaaatactttgcttcagaattggaatgtttatattatgtagaaatcttcaaaggtagcattattaaatagcaaagaataattagaacccacatatctttttttgtgtggatggggaaaatgttttaaaatccagttatttaatatgagtttgagagagaaaattgttttttaaaaatatatgtgcattgaaatgatggcaatgcttatagtatgatcaagtatgaaaggaactttaaattcttatatttacttttctctcagtaaattgttaaattttcactcagcaaaagattggcatttgttaagtgttctatatttagtactaaaatcacagtcatgaaatcatagtcataaaatggtcttcacacagcagtcatccgtgtcatttatcattttgtaatattaaattatggcaattttatttcaaactaaagtttgaacaccggaaagtcattactcagtgatttgtaatttgggacttggattatttatctagagatgtttgtatattttgtcagtaactaatactgcgctgccatcatggtgactgtcatggttctacagaaatgccctccatgtgtccctctaatgttgcatgtttcagtgggttggaagttttgtatatttattgtattaacacagagtgtccataaaataggattct

SEQ ID NO: 238117 - DNA, 945 bp, Homo Sapiens
  misc_feature (925)..(925): n is a, c, g, or t
  misc_feature (939)..(939): n is a, c, g, or t
tccttctgtgctgcagcgggcagagtgggagttggctcactcagcacgctcactaacccagcatgccacttccagcaggcatgcagtcctggcccagctctatgggaaacaaggaggaaagttagccactgaaggccaaaacaccatgtggggtggacagagggtttgctgggctggctttgctttccctgctggggccacagctgtgttaaccaatgaggtctgctgccaggtgtgaacaagcatgtctctacgaatgaacgaaacattggggatctctgccgaaaccaccaaagggcatgtctgatgggcacagggtctcccaaacccagtggcttctgtctgtcctcagcccttgtccctgtttatctgcagccaggagacttgcaagggattggtcgattgacagagaggactcgtgcgctgttttgtgttagcagaggatttgtgtttcacaggtaggcttagcgtcctctcagagtgtagtgccaggtcctggtgccacgctagctgagcactcaggagagttcatcagctcagatcccacagggcctcctctttagcaggaattcacaacagtttggatgccctaaacttctgtagctcaggaacatcactggtgtatttgtttttttgtttgtttgcttgggttcttgcaagagcgcgtggggacagttcttccagcaggcactggttttgttgccccagggctgctttgctgtgatgatgattgcatttcaacacatgccagatgcagattttttcccccttactgtttcaatgacctttattttaaaaacacatagcttgaaaatttatttttatactgatattagtttggatgtgccacttttggcrccaaacgtgtatgtcatttttatttccattttataaacatgtaaataatagtgataacttgttaatnaatagtaaaccttnhtmcct

SEQ ID NO: 238118 - DNA, 929 bp, Homo Sapiens
gggcaggttcccagatataaacttccttgcctcggggcctgtgggatattaatccaggtcccccacggaatttgtggaaaaaatcccctttcccaagtagaggattgggcaaggctattttaaaaggttccctttttgtggttgttttgaaacaagggatgttcaaacttaattttttatgtattaaactcataactgcctgtcttttataggggaaaaaaaaatacctttttttatttaaagttataaggttttaaccttttagttgcttggatgacagggaattagcctaccccattttggtctggaacaaaagactttcaaatttaatatggtccaagtgtcttcctactcaaggtaaacattatctccaaaattacatttatgattctaatatttggcattgtgtctgtatctaatttaaacagatgttaatggacgtctggccgaaactattatacttttataagatgagctgaatcctcttactttaaaaactggtctttttatttaccctctgtggtagaagagtcaccagcaggttccaaattgatgtgtatgataggaaaaaaaccttaattttaaatataatatagagccttaaactatgccactgggtggcagaggctgtataaaacgcacttgttttcatgcaggagcggggcaagtaaggttgagcctgactgtaaacctagaactgcggaaggactgggacttttgtacaaatttcacatttattttacagcaatcatgctgcatttgtgttagtgttctttataataaaaaacaaagcagcctcctggctggctgtgttacaagtgactcttccttagacagctagaaagatgctgactttgtcaaacttgcatttatatgaaaaccttctgtctctaatatcacagaataaaactttctgtagtatgctgttc

SEQ ID NO: 238119 - DNA, 839 bp, Homo Sapiens
ggttcaaaagatccagaaaaaccaggacaaaatatcagacaccggcaggttggtatggcaactccagccggcaaagataccatgggttcaagaaccaggagtttaatgtgagcaagggtacaacgttataagcgtttaaaagggcagaagtcaaggcatcccgcggttatttcagggaattcttctagtgccagcgtttcctcgtcagtaactagtggcttaactgaatgggcagcttttgcagccaaaacttcctctactggtccttcgacagcaaaattgagttcaacaacacaaaacaatactgggaaacctgctacttcgtcagctaaccagaaacctgtgggtttgactggtctggcaacatcatccaaaggtggaataggttccaaaataggttccaataacagcactacgcccactgtacctttaaaaccacctccacctctaaccttgggtaaaactggccttagtcgctcagttagttgtgacaatgtcagcaaagtaggtcttcctagtccaagtagtttagttccaggaagcagcagccaactaagtgggaatggaaatagtggaacatcaggacctagtggaagtactaccagcaaaactacttcagaatccagcagctctccctcagcatcccttaaaggcccaacttcacaagaatcacagctcaatgctatgaagcgattacagatggtcaagaagaaagctgcccaaaagaaactcaagaagtaatgggccaagtaggtttttgtatcatatagcctaaagatgaaaggcttattattatgatataatctgtaatacactgtaaattaatagaagtcttcata

SEQ ID NO: 238120 - DNA, 1000 bp, Homo Sapiens
  misc_feature (855)..(855): n is a, c, g, or t
cgrggagckgtggwgctwatggkstagrgctcartktgttgaaccaagagccaktgtcccccaksagaaagaatcctgtgtgrcctctcgtatgaraataaaatctgccagtttatcacattcactttctscctctgaggaaagatacagggaacaaaaatcaatttgttacagtcttaatattaaaagcagcttgactaaatacctgatttaaaaatagagacatccccagtcctcatgacataccgcaaatatctgtggggtcctgttraaaagaacaaaataaargagcccaaggggtcattctgtctcagcaccatccagcctggcacytctctycccatatatccattggattttttttttttttttcctaaacaaagtttttacactgagcagatgctctgtcatgatggcggttgtgcaattctggtatcctctaaatttgtaagcattcataaaacaggaaaaagtaaactatcattcggaagcacagcccattcctcccattttttgcaatgatgtctggatgttattttaaacagtgtgtctgtgtgttcccaaatccagctggccccaccagctcagattccattttttttgtgtgtgtgtgtgaaacgtagtctgcaactctgcctcccggcaattatacatgtgtcaggatgtcaaaaagcaattctcctgcctcagcctcctgagtagctgggactacaggttcctaccaccacacccggccaatttttgtatttttagtagagatggggtttcaccgtatcggcgaggatgatctctatctcttgacctcgtgatctgcccgcctcggcctcccaaagtgctgggattacaggcgtgtgnccactgcgctcggcctcagattccatatttgaacaccagctgattgagagaaggggaatgagaagagctggatgagtttaaataactttcattgttcagattcctgaacaggagttgggataatggccatcttttctttcctatc

SEQ ID NO: 238121 - DNA, 1000 bp, Homo Sapiens
gcaagggtctaacccccctcccaggracascatcwkggggcycacaagkamcagggtccmcgggatyytgwaacagaaaatttwwaaamykttaactgtmyccacttgaagaaagtctaykgaytagakkccwtttwtcrgrgwracaggsttaaaadgcatgcttgtactagactgtktaatgcatttttttgttttrgcattggttttaattcatttaattggttacactcattttttttttttacattccatttttgcatttgtatgccagttaaaaattatgaaatggcacattgtgggattttgtttagctaaattctagaaaaattgaaagataccttttaaaaaracttaagcctgaggttattcagcacggtgatctctgcatttttgaaaggttgtctcgtcgtttaataaacgtaaataacttaagcacattggaagagctattaaatgagagcaggagattaaaaagacatgatttcttactttatccacctgacaggatagcttgcattggtgattaatcttgcattgttaaattcatttcctaaatatttaggtaagtagttggtttgatcattatttgtaaagtattagtagttgcatgttgaattatcatgttaagatttttagtttgttgttcatgtgatatgaaagataacaattcctaaaactgaatgcatgcatggcttattcagctcaggtcacatacaaagagaaatgtgacgctgcaataaacatagcagagctatctgggtttgaagcaaaaaggctatgacgttaggtatatgcactttacattgtatgtatctttttagttctagtgaactcatctggaatcatgttacagaaaatgattctccaggtccaaacacatttaagtttaatgactggggctactctaacaattgcggctatctcattttgtctcattggttcattagcatagcacccatttaagaacaactacttctaaacacagtaatatttcaga

SEQ ID NO: 238122 - DNA, 914 bp, Homo Sapiens
gtgggaagactacctttcaaaacatggaactctgtttggcacacagagtgctttgtatgtggggaactgcttccacagtttttctactggctcctttctttgaactggatgaacgtccattctgtgagctccattaccatcaacgccgggaaacgctctgacatgggtgtgggcagcccatcactggccgttgtatcagtgccatggggtacaagttccatcctgagcactttgtgtgtgctttctgcctgacacagttgtcgaagggcattttcagggagcagaatgacaagacctattgtcaaccttgcttcaataagctcttcccactgtaatgccaactgatccatagcctcttcagattccttataaaatttaaaccaagagaggagaggaaagggtaaattttctgttactgaccttctgcttaatagtcttatagaaaaaggaaaggtgatgagcaaataaaggaacttctagactttacatgactaggctgataatcttattttttaggcttctatacagttaattctataaattctctttctccctctcttctccaatcaagcacttggagttagatctaggtccttctatctcgtccctctacagatgtattttccacttgcataattcatgccaacactggttttcttaggtttctccattttcacctctagtgatggccctactcatatcttctctaatttggtcctgatacttgtttcttttcacgttttcccatttccctgtggctcactgtcttacaatcactgctgtggaatcatgataccacttttagctctttgcatcttccttcagtgtatttttgtttttcaagaggaagtagattttaactggacaactttgagtactgacatcattgataaataaacggccttgggttacaa

SEQ ID NO: 238123 - DNA, 1000 bp, Homo Sapiens
  misc_feature (10)..(10): n is a, c, g, or t
agatccatcncatgcccgagaccctcacascctctggtwrggytggagccccccmaatccatggcytcagggctatgtgatkgagtggggcytggccccccccagcgcgagcaatagcaacaagacctggaggatggaacagaatgggagagccacggggtttctgctgaaggagaacatcaggccctttcagctctatgagatcatcgtgactcccttgtaccaggacaccatgggaccctcccagcatgtctatgcctactctcaagaaatggctccctcccatgccccagagctgcatctaaagcacattggcaagacctgggcacagctggagtgggtgcctgagccccctgagctggggaagagcccccttacccactacaccatcttctggaccaacgctcagaaccagtccttctccgccatcctgaatgcctcctcccgtggctttgtcctccatggcctggagcccgccagtctgtatcacatccacctcatggctgccagccaggctggggccaccaacagtacagtcctcaccctgatgaccttgaccccagaggggtcggagctacacatcatcctgggcctgttcggccacctgctgttgctcacctgcctctgtggaactgcctggctctgttgcagcmccaacaggaagaatcccctctggccaagtgtcccagacccagctcacagcagcctgggctcctgggtgcccacaatcatggaggaggatgccttccagctgcccggccttggcacgccacccatcaccaagctcacagtgctggaggaggatgaaaagaagccggtgccctgggagtcccataacagctcagagacctgtggcctccccactctggtccagacctatgtgctccagggggacccaagagcagtttccacccagccccaatcccagtctggcaccagcgatcaggctgggcctcccaggcgatctgcatactttaaggaccagatcatgcaccatcca

SEQ ID NO: 238124 - DNA, 871 bp, Homo Sapiens
atgccagcattgggagccgcctcctagcaggcaagaccacaggtgccctggctgtggctgtggcccagcccacggatgtggtaaaggtccgattccaagctcaggcccgggctggaggtggtcggagataccaaagcaccgtcaatgcctacaagaccattgcccgagaggaagggttccggggcctctggaaagggacctctcccaatgttgctcgtaatgccattgtcaactgtgctgagctggtgacctatgacctcatcaaggatgccctcctgaaagccaacctcatgacagatgacctcccttgccacttcacttctgcctttggggcaggcttctgcaccactgtcatcgcctcccctgtagacgtggtcaagacgagatacatgaactctgccctgggccagtacagtagcgctggccactgtgcccttaccatgctccagaaggaggggccccgagccttctacaaagggttcatgccctcctttctccgcttgggttcctggaacgtggtgatgttcgtcacctatgagcagctgaaacgagccctcatggctgcctgcacttcccgagaggctcccttctgagcctctcctgctgctgacctgatcacctctggctttgtctctagccgggccatgctttccttttcttccttctttctcttccctccttcccttctctccttccctctttccccacctctmcmaacmgctcctttacctaccacctaccmamaaacaacattctcatctactcattgtctcagtgctggtggagttgacatttgacagtgtgggaggcctcgtaccwgccagkattccawgcktcccktcccttggaaagttcagccagaatcttcgtc

SEQ ID NO: 238125 - DNA, 728 bp, Homo Sapiens
  misc_feature (711)..(711): n is a, c, g, or t
tgcaaattagaattcttttaatataaaaaaaagtactaaaatacccacgtggttctgctgtgttatttgccctaaaggaagtgaggggcagagtgaagaatcccagtgcagctcagtgggcccagaaatgggcctttccgtaggctaaggcgtgcccactccacctccaccagacttctatcccctctgctgttcccagcccccaattcctgcagcaggaaaccccagtggtctggctttggcactgggagtagaaggcacctgaagggctggctgggtgagtgaggacaggtgacctttaaaaacaaaacgacaccgtggggtggggaagcaggtcatgcagctgtggcagctggcagggcccactcctccatggcacaggtgggcatgggatggccacttctccagaagtgaggaagcccagatcccaacagaatactttctcaaaattgtttttggtacgaaataaatggaaagaagatatggggtggggtgctgtggaggccgggccagccaccctccccagaccttagatcatagcgatgctctcgggggcacagttgaggtgggtggaggtgctgctgctcccggaggacttgcaggcccggccaggggtaggctgcagtgcagccaccagtgtgtctgaggagactgccccaaactcgtagctgaaggtgccatagaaaatgaggatatcgatgacacacaccnactcacacagggctgcc

SEQ ID NO: 238126 - DNA, 1000 bp, Homo Sapiens
catgtmtttcattgagtagctgckgtagcaaaggattsacttgttttcccagagagctaataatcggccgtactataaatggaacattctttggtgktggaaaagtgtagattctatcccaaagctgtcactgactataagaataagaaattcaatctggatgcactgtgacccataccctgccttttgacaaaatcagtgaggcatttgacctaatgaaccaaggaaaaagcatccgaacaatcctcatcttttgaagatgccaggagcaattcggaatactatctgattgaatgtgaacctgcctggttaatttattacctgatttgatgaaccaaggaaagccatgcgtttaaacaaacattcacayttaatatgggaacataaaagagcttyaaatatyatagactttgtacctgtcatatatatgaatatcccctatgttaaataataataataactagtgtttatgaatagaatcatatcatctttagaaattgtttaaaattagttctgggaagttgaaagtggggaatgaagagataataaataaaactagattggccatatgtttataathhttttagattgggtaatgaatacatggagtttcattatacttttctctccacttttgtctatgttgaaaattttctgggagctaaatgatgagaacacatggacacatgatggggaacaaaacacactagggcctgttgagggcagggagtcggcagagagagagcatcaggaagaatagctaatggatgctgggcttcatacctgggtgatgagatgatctgtgcagcaaagcaccatggtacatgtttacctatgtaacaaacctgcacatcctgcacatgtaccctggaacttaataaaagttggaaatttttaaaaagaatgaataagacctggtatttgatagcacaacagggagactatagtcaacagcaatttaattgtatattttaatatgactaaaagagtataatggatt

SEQ ID NO: 238127 - DNA, 903 bp, Homo Sapiens
gtgtgggttcctaaacactaagggcccccaaaggagagtgaactgtgtttcacaagcgcttgttgcgaacccgtgactatggagtcagaatgacagaccagttcgttaaggggcatcttgcacaggatacgaggttcttacccaccctgatggggagctcctgaaagtggggtgaacaattaaccagggtttgcagggatgtcctctttcacaagccgacaggcaggcttacaatgggccaggcttagtgactgtgcctcagttattctgtacctgggagtgggcaggccctctcccatgtcaccatcaaaacccactaattaaggctggtgggagtctgagggctgcacccgggtatggtgagttcccctcagggattgtgctgagcgccttggcctggcttcttggctccgcccacctgctctccctgccaccaagttgtcttccccgggtggcatgtgccacttggctgcctcgtgcctgggcacagtggtgcctattatgggccctccaggtggctctggtgctcagcctgctgtgagcaggaacagctgagtcccaggggttcttgcacacagcagggctcgggtttgaatccaggctctgctgcttggtcgctgcatgagcttctgctgtgctgacctctctggtttgtctcgtcatgtgtaaggtgacaccagatacctacctcttagggctgccccgagactaaaataagaccatgtgcatgaaccacttaccaaagtgcctgttgctctccaggtgtgcctaccgcatgttgccgctgctgtttctgctgggacgtctgactccagttccttctcccctctccagtgacaaggtcatttacaacttacatttacaatttatagtgtttaccagtattaaattctcagccactcc

SEQ ID NO: 238128 - DNA, 994 bp, Homo Sapiens
  misc_feature (952)..(952): n is a, c, g, or t
  misc_feature (979)..(980): n is a, c, g, or t
  misc_feature (985)..(985): n is a, c, g, or t
ctgtacctcarccggccctttgggcggggrgggaaatatttatttattttwttttwtttctactcgtttyttccscsgtgaaaaytgactktgccaggctgsccccaccgctktgcccgsactccattccgracctcctgaccctytatctractctcgctgtggaacagggaccgggcctggaaagggggtgaagggaagtgtctgatgcacggcgagtgaacaccgttggcgccgaggccaagactttgatttaaaagaaaacacacctcggcgacaatgtcttgctgctcggattaggtgggggaggggcgacagtagtgagcgcctgagccgaacaatcctcgaactaaaagccttcccttgcccatgtgaaaagatccgctaagacagcatgtctgccagcggaaacttctcgagctcccccctctaccccgccccaccttgccccactactttagggggcagctaaatgtratcctgccttgctgtgaaatttctrtaccttcaacctggtrttaggatgatgacaaarwccgtgtcactaccwccgwcttcgacacaargccccscccgagcctagttgttctcccacctgaatgtgtagaaccttacctttgaaatttcttaatcggtgcattgaggtttccacatctttttccaagcagtgccccacttcatggatttatagctatagtctatgcagtcgttacctctttttttttttttttttaagaaaattgaagattggagtggtggaggcagtagggagatgggattgggcacctcccccgtgctggggcctggatttttgtaaataaatttcccaagcgtttctttccacctggagggaaagggggggacgcccccagtgagattcaaatcacgcatctctactcctctgcgtgagtgcgtgtgtacatgtgcactccccaccctgctcccttsccangagggactgctgtcaatttttttgctnnaattnhwgataaat

SEQ ID NO: 238129 - DNA, 1000 bp, Homo Sapiens
ggscggragccgcgaattggtttmagtcatttcccgycccccayccggtggratttgagaggtctaytccccatacctgttatcagcaaaraaagsyacscgcgcctgctcttytcttcccggcccgacscccacgaccgcatgaactgcaagtgcctggagcccgtgcgcagggacaactgccccctcgtggccaacctggtmactgcctcactcgccgcctgctcatcgaccgagaccctgagggcgcggtggtcacgcacaggacgtcatctcggacctgctgtgcaaccgcatcgatatctcccagctggtcatcaccaaggagctgacccgcgcggcctccgactatgccggcaagcaggcccacgtggagctggccgagaggatgaggaagcgggaccccgggagtgcgcccagcctgggcgaccgcgtcccctacgtgatcatcagtgccgccaagggtgtggccgcctacatgaagtcggaggacccgctgttcgtgctggagcacagcctgcccattgacacgcagtactacctggagcagcagctggccaagcccctcctgcgcatcttcgagcccatcctgggcgagggccgtgccgaggctgtgctactgcggggggaccacacgcgctgcaagacggtgctcacgggcaaggtgggcggcctcctggccttcgccaaacgccgcaactgctgcattggctgccgcacagtgctcagccaccagggagccgtgtgtgagttctgccagccccgggagtctgagctgtatcagaaggaggtatcccatctgaatgccctggaggagcgcttctcgcgcctctggacgcagtgccagcgctgccagggcagcctgcacgaggacgtcatctgcaccagccgggactgccccatcttctacatgcgcaagaaggtgcggaaggacctggaagaccaggagcagctctgcggcgcttcggaccccctggacctgaggcctggtgaccttgca

SEQ ID NO: 238130 - DNA, 792 bp, Homo Sapiens
aacctgtttcgctttaactagggaatttgtggggaacatatgcaaaacagaagttttcccgccaaaagccgtttctaagtaatttgaaccaggcagcaaccgagagcccaagtgacctgcactccctaaaaaaatattactgttggccagcaagcaaactttgtagagaaatttccggatcttctggcgcaggaccggacaccgatagggaacagccgacccagccccatcctgaagccggggatccagagctgcctcacgcacttcagcctcatcacgcacggcttcggcgccccggccatttgcaccgcgctcacggccctgcagaactatctcaccgaggcgctcaaaggcatggacaagatgttcttgaacaacaccaccactaacaggcacacgtctggggaaggcccaggtagtaaaactggcgacaaggaggagaaacacaggaaatgaaaaatttttaaaaaaagaaggaaaaatgttttaaatacaaaaggaaaaacagacaaaaatttaattttagctttaaaatattggattggctttggaagaattatattaggtagaatacacatacaatcaaaattttaaaaaaaaaagctaaataacttaaaaaaaaactgaggcgtacaacggagcaacaatatcggttctcagtgtctatttcaagatacatttggagacaaccgtccggattttccacttcggttctttcgagtttagtaatactgataataaaagaaaaccatatttccccttccctgtgaaaataaacataagactaaacat

SEQ ID NO: 238131 - DNA, 1000 bp, Homo Sapiens
ggaktytccctcccccgccytkgkckawmkamcctcbtgtccagacccccacacagaccggatgtcsacctgktgaaatgtgacaccgcccgaycccccttvgcagttgagagraastcaacvactccwttgccgggagtkgacaagaagtkgccaacaaggtcgtgtacaacgtgggactctgcatttgtctgttkatatcaccaaactggaggatgcctatgtattccctggggatgcgcatcacacaccaaaagtccattttcgctgcgtggtgtttcatccattcctagatgagattctcattgggaagatcaaaggctgcagcccagaaggagtgcacgtctctctaggcttcttcgatgacattctcatccccccagagtcactgcagcagccagccaagttcgacgaagcggagcaggtgtgggtgtgggagtacgagacggaggaaggagcacacgacctctacatggacaccggcgaggagatccgcttccgggtggtggacgagagctttgttgacacgtcccccacagggcccagctcagcagatgccaccacttccagtgaggagctgccaaagaaggaggctccgtacacgcttgtgggatccatcagtgagccaggcctgggccttctctcctggtggaccagcaactagccctggggctggacagtggaccctaccagcctgcgggaaggtggtatggccggctgtgaagacaacagcagctgaggccgatgctaaggagatagtgtctcgagctggacagtgaggcaaggccaggagtgcccaccagcttgccccgctcctccaccatctaggccctgctcctccttcactgcagtgatggatccatctgtggctgtggctgttgggcctccactgaccttgactgaaaagacccttcctggaccctggacttgacaacaaacggcacagacaccaatcactcacagaacagtcactggttttggattcttgttttccttgcaa

SEQ ID NO: 238132 - DNA, 1000 bp, Homo Sapiens
gcccagcgctwrttctawagtaaccccggagkggatcackctacaaacctktacctcrgggagcagarvcctatcctgctttgtttcactcactgargatctatgccttggaatcadgytacccsraagattagcttgtacaaagggggatgacgcagaccaatcgagccccaaagtgtcatcacaagaaagccccttaaggttccatcagacttmgtttaggagaggattcaccattcaagtaaaaaagaagccagtaaaagatcctgagatggattggtttgctgatatgatcccagaaattaagccttctgctgcttttcttatattacctgaactgaggacagaaatggtcccaaaaaaggatgatgtctccccagtgatgcagttttcctcaaaattcgctgcagcagaaattactgagggagaggctgaaggctgggaagaagaaggggagctgaactgggaagataataactggtgacaatagatgtgagttaaactttaggaaaaaggattccctttttttaaaaaaaatcaatacctcaaaagcaggctttgggacaagaaaaccccaaagtggcctgcttttcccatcccaggagctcattatccagtctgtgccaactgaagtaggagactgactgtgagtgctggctaaaagccctgggtggtgaggctcacagtactggttkccrggaggaagagcctttgtgcatttgactgaggccagtttctatgaagagcaagtagctgaggagaggtcgratttactgctttttccaggacaattctggaagtaaagaaaatgtaattcaagctggttagcttaattttgtgccattctttaacataagagtaagctctattatgaaatacaactttaaaaaattttagctataaattatataaatgattttaaattgctgaggtttccttaggcagcttatttatttgtttacagttagactatctgagtaaatggttctttgtggaccta

SEQ ID NO: 238133 - DNA, 526 bp, Homo Sapiens
gccatttggttgtgtcatgacaatcataatataggatataatatttactttttttcaaaaacatcctgcattcattcattcttagcatacctttgaaaaagaaaaaaaaatccataggttgatacattgacccattgaagtacttcattacgtatttattgaaaattttttttaattgttgaaattgggaccactttttataattggtttcaagaaaaaaaatgaacagacttccagtgcttttctgttcaaataaactccgattcaaatttcagttttgtttgttatatactttttgtgagtgttaaatgatatgggaaggatttgtctttcattaaccatatggaaaagatgtcttcctgaattacatagcatttcatggttacagattcttcctaattaatgtttgcaccatatgaaactcataggtaacaaacacaaaggagaaaagcagcctgtctgattgcttataagcttttttcacaaaatcaaattaaaagtctctgattcatttgaaagctaaaaa

SEQ ID NO: 238134 - DNA, 566 bp, Homo Sapiens
tgtaggggtgtttattgtttggttaagtctgctaaattacggtatgcattatctggtgactatttgtgcctgaaaattcgttttgtattaaaattctggagaaggaattcaggactagaataaagagaaattttgtaaccttttttatcatgacagttttagaataatttttttagctgagattaaatgttcaaggctccaatattatttttaggaacttatttaaggagtgctactttacagaaattactaacacaccaaaacattattaattaaataaaatataagtttacaataataaaacatgtttcttttaatttttctgattatattttatgagttcagaaaggaaatggtaaaagaactatacattttcatgttttaacattttatgtacgtacttgattctgtctgtgtcataattacacatttacttgaacacagctatcctttatcttgtgctttctttaatagaaaaatgaacagaaactgaatgcagttaaatttttatttttagtaggttgtgaagttacttttactggagaaataaaaaaatgttaaacttg

SEQ ID NO: 238135 - DNA, 541 bp, Homo Sapiens
agggaaagtgctccatcagctgtgccaggagagaagcagctcttgggtccgtgtttctgccttagaaggcaggagttgggcatctagctccagcactcatccctcttgaaactgctggtttgtttactttcattgcaactatatgcctggaagagatgaagagaaagctcaacaggcttcactaggattgtttgggtggggtggcagcagctcagatattttccctcctctgtttctcataggctttttgtaatcgtgttataatactttaatggaaaaaaataaatttattattttaaagctataaaaattataaatcagtcattatgatgtgtttttctctactgagccctctggtgtgttccctgttttattaacgtggatggagggtgtgtcagggaggttgggacagaggcagagaagaggccagcccggccttcagggagttcgtggcctgtctggaaagagggtcttttacataccagcagtttgcagagccagacacagaacgatagagcaggaccttttaaactcctttttc

SEQ ID NO: 238136 - DNA, 829 bp, Homo Sapiens
agggttccaaggccaaagaaggaaagagattgattggtcattccaggtcccaggtggacaaattgcattccttgaatagccgaggaccctcggtgtgtgtcaaaaaaggcccccaggcctacactttccgcggactacagcgccatccttttactaaaatggggacttcgatggcggaaacttttatttcactgaactggatgccaagaccgtgacggcagaggtgcagcctcagtgtggaagagccgtgggattctcttcaggcactgaaaacccacatggagtgaaggctgtcaccagggggcagcgctgtgccatcgccctgtggttcaccctggaccctcgacacagcgagcgggacagggtgcaggcagatgacctggtgaagatgctcttcagcccagaagagatggacctctcccaggagcagcccctggatgcccagcagggcccccccgaacctgcacaagagtctctctcaggcagtgaatcgaagcccaaggatgagctatgacagcgtccaggtcagacggatgggtgactagacccatggagaggaactcttctgcactctgagctggccagcccctcggggctgcagagcagtgagcctacatctgccactcagccgaggggaccctgctcacagccttctacatggtgctactgctcttggagtggacatgaccagacaccgcaccccctggatctggctgagggctcaggacacaggcccagccacccccaggggcctccacaggccgctgcataacagcgatacagtacttaagtgtctgtgtagacaaccaaagaataagtattcaggttt

SEQ ID NO: 238137 - DNA, 900 bp, Homo Sapiens
  misc_feature (179)..(179): n is a, c, g, or t
gaactaagggaacccggaaggtggtctgtcacccgaggacgatatggagcagttcgagggctccgccattatatggttttatacgggaattccatgccaaatgagggggtcatataaatggaaaaataaaccagggaccggtcctacaagctcacgaccttgagcccccgtgagctggncttaggaggagcctgtacacgggaaaactaactggtccagaccagccctgcagcctccaatcagcaggcagccagatgacccgacaggcctaccaggtatggccactagccacaggccctggctgaggtctctgggtcggtcagtgacatgtaggtaggaagcactgaaaatagtgttcccagagcactttgcaactccctgggtaagagggacgacacctctggtttttcaataccaattacatggaacttttctgtaatgggtacaatgaagaagtttctaaaaacacacacaaagcacattgggccaactatttagtaagcccggatagacttattgccaaaaacaaaaaatagctttcaaaagaaatttaagttctatgagaaattccttagtcatggtgttgcgtaaatcatattttagctgcacggcattaccccacacagggtggcagaacttgaagggttactgacgtgtaaatgctggtatttgatttcctgtgtgtgttgccctggcattaagggcattttacccttgcagttttactaaaacactgaaaaatattccaagcttcatattaaccctacctgtcaacgtaacgatttcatgaacgttattatattgtcgaattcctactgacaacattataactgtatgggagcttaacctttataaggaaatggtattttacacctggtatcttatagaagtatcgtatcc

SEQ ID NO: 238138 - DNA, 988 bp, Homo Sapiens
  misc_feature (964)..(964): n is a, c, g, or t
  misc_feature (966)..(967): n is a, c, g, or t
  misc_feature (969)..(972): n is a, c, g, or t
ttctagtktcacctccagccacaccggacgggcctktgccgtgggaagcagacacaacccaaacatttgctactaacataggawacacacacatacagacacccccactcagacagtgtacaaactaagaaggcctaactgaactaagccatatttatcacccgtggacagcacatccgagtcaagactgttaatttctgactccagaggagttggcagctgttgatattatcactgcaaatcacattgccagctgcagagcatattgtggattggaaaggctgcgacagccccccaaacaggaaagacaaaaaacaaacaaatcaaccgacctaaaaacattggctactctagcgtggtgcgccctagtacgactccgcccagtgtgtggaccaaccaaatagcattctttgctgtcaggtgcattgtgggcataaggaaatctgttacaagctgccatattggcctgcttccgtccctgaatcccttccaacctgtgctttagtgaacgttgctctgtaacccttgttggttgaaagatttctttgtctgatgttagtgatgcacatgtgtaacagccccctcyaaaagcgcaagccagtcatacccctgtatatcttagcagcactgagtccagtgcgagcacacacccactatacaagagtggctataggaaaaaagaaagtgtatctatccttttgtattcaaatgaagttatttttcttgaactactgtaatatgtagatbttttgtattattgccaatttgtgttaccavacaatctgttaatgtatctaatwcgaatcagcaaaractgacattwtattttgtcmtcttacgttctgtthtgtttcactgtgcagagatttctctgtaagggcmacgaacgsgctggcmtcaaagaatatcrgttkacatatatgacaagtgtaataagatkccgccaaaggacattctaaatgtntnntnnnnctttccatcggaakat

SEQ ID NO: 238139 - DNA, 1000 bp, Homo Sapiens
ccaagatgmagcgssctccargagtttgcaaatcctggcgragccgtkgccccagsswtttgccgcacttagcccgaaagccytgktggcytccaggtgcytccacttgaaamaaccgtccccggcccytgccccgcccccaagctcggatcacatgaaggagacagcagcacccacccatgcacgcaccccgcccctgcatgcctggcccctcctcctagaaaacccttcccgccctcgggaaagtagatgtggragggtggcgccctgcgtaaccctcgccctgtcccttcccactccctgggggcgctgttccacagtgactgggccctgtccagggcagtgagtcctctactttgctccgtggaggaagctggggtacaaggggcccagtgctggccacacagcagcgcagccgagccccaggagcccgtcaggccacagcccctggcactgcaggtggcctccctccagagactcgagtccccatgattccctcctcgtcagtctctcaaagaccccatggtccatcccctgagggtggtcagccaaggctcccgttccgtgggatgccataaaagccgcccagtgggacccacagtcacacagagcgcctcacctgcatcctctcccccacaagagccccaaagatcccacgggagaggggagagggacgcacagcactgcctgccaagcgagaatgcaggccccgccccctcggcccctcaccacctctttctacagcctaatttattggattccctattcgtagccatctccgtggccaatgtgactaccgtgccagcagcgggggcggcccagcctctgagtcccgtggggccccggctcccaccggtgccaaacccagcccctgcggccgtcaccccgccagcctacactgccagccgccaccggggcacacgggcctctgcttgccagccaggagtgcggacaccatgttcccagctcagtgccaaagaggggtcaccagggggagctg

SEQ ID NO: 238140 - DNA, 491 bp, Homo Sapiens
  misc_feature (5)..(5): n is a, c, g, or t
cggcnccgggcgcccgcgcgctgcccgacctgggtaacaggcaaagcggagccccggggtcgaagtcctaaagttactaatcccgcggagggggagagagcgtgcctcgggccgcccggggcggtcatttgagcgtgtttacttaaagactttgcaagcagagcgcgcgcgaaatcgtcggatttccagcgaggcagcaaatatttgcaggcaggagaaagaagcggagccgagccgagccgccgagtccctccccccggagccccggagccccggcgcctgcctgggcggtcccggccgcgcagacagaaaagaagccgggattttgcggggctggggggcggggagcgacaccaaaggccagaaactgcagcacggcccgaggccctggcgagctgggcctgggggaggagaagtcccttcccattccagctcgatcaatcttgctgggctgcgatcggtcaataaaaacggtgtgaagcgaaaaaaaa

SEQ ID NO: 238141 - DNA, 1000 bp, Homo Sapiens
  misc_feature (390)..(390): n is a, c, g, or t
  misc_feature (404)..(404): n is a, c, g, or t
  misc_feature (437)..(437): n is a, c, g, or t
  misc_feature (456)..(456): n is a, c, g, or t
ttttaacargattatkttaayttttwactaaycctgtctcttaagkwrtgkttwmctsccttaammacawtwtgaratttttctkggwaaawhcccctaagawraykgyttracaagaktttttgtagtctgttwaaatkgaggagratcatttgadscggggtttatgkgagkgwtgtaaaagatcgtatgwacagctgtktcagttgttaagcaatacaagatgacaaactttaaacaagattctttttttgcagcagcacttctaaaagattgaaaacaccaaggargatagatagaatattcactatttctcatattgatgcaattgtggtgctctttktcattkgaaacatcttckcctaaaatatacactttaaagaaataggncatttctggttttngcattaaagtaaattaaagcagaaaaacacatngctcacttttggctaactncagtgtatagatttcatacttatgttgtctttcctgggtacagatttattactgaacaagtacgtgtaagtaaaatgtcattggtgagcaggacacaagataaaaggtgaacmccacatatggtgtgaattgtaaatgcttataccacaaacttgaaaatgtgtcatgtagagccatggaaaatgtctagttgtttttatgtagtacacacattttaatggtgctaacaacctgggmtcttttgttcatagagttattctgaaaaaaatttcataaaagacactgcctaaagataggtagaataggctgtagcttgatttactgtggaataaaaaccaaaaaaaaaaaggtcttaattgtttcagtctttaattatgtctataaacttagaaaaaggcatttacatttgaatctagactaatttgtttagtaacattcttcctcatattcaatgactgtatgtatcagtccttatttagagactgcctgctttttaattcatatagctctttggttctattctttgttttgtttattattttgt

SEQ ID NO: 238142 - DNA, 542 bp, Homo Sapiens
agtctgtgtagtgagtgaagccacagtgataggaatatataaaggctttgcatctagaatttgttctgaaaaccctgagattcaagtagtacattatttcatttactattttacacagagaagccctcatttttaagagtttgcctttctgatttccaccggaaatgatactatcagtatcatactcagaatcttaattacatacaaggcactaacctctcacctgttttcagctttgtgtaaagacaagggatcaaaacatccctttctgctatttcatacttaagtgtgggagctgatccaaaggaagaatagtttcaaaagtttgtagcaaaaaaaatttaaaaggtgaagattttttccttgaatgattctcacctggcagatctatggaaagattagctgactctttggatccctgaatatagttaatagaaatttggaaggaccatgtcaaaattaactaatgtgaactgacaaagatttggtgttcaaagcaaaaattaacctttggaaaagtgagcaagtacttaatcaaaaac

SEQ ID NO: 238143 - DNA, 807 bp, Homo Sapiens
ccagcaggttctccgccacttatctggaaaattacccgattgctcccggcagaatacaagagcttgaagaacgccgcaggcgattcgtggaagcctgcagagcaagggaagcagcgtttgatgccgaatatcagcgaaatcctcacagggtggacctcgatattttaacctttacgatagctctgactgcctctgaagttatcaaccctctgatagaagaacttggttgcgataagtttatcaatagagaatagttatgtggtgacactacttcaagagaacctctgcattccagtcataccaatcctgcaacttgattttcagaagtcaagagtatatcgcgataagacagtgcacaggtggaggggaaaaaaagggggagggggaagcttatcttgaaaaagcatcacagaagtagaaaaaaatgtcgaaagcattataactgtaacgttctttgagtttgtgattgatccacatttttccccctgcattatggaaaatgtctctcagcattgctttattacaaagtaaaggatggttttataaaattgagactgatgaaacatcaatactagagcccatgaggatgaaagaaattatcaaatagtgctgaacagaataagatgttaacgctgagttattaggactggaaggctatgaaaagaacttgaaattgtcggaatatgtgctctcttcatgtcatattcaatagaagtttctagtttaagattgattttgtgttttcttaggcatttcaagtgacaagcaaagtaaatgtatatattatgggatgaatcatgttttcaa

SEQ ID NO: 238144 - DNA, 944 bp, Homo Sapiens
  misc_feature (144)..(144): n is a, c, g, or t
  misc_feature (163)..(163): n is a, c, g, or t
  misc_feature (197)..(197): n is a, c, g, or t
  misc_feature (279)..(279): n is a, c, g, or t
  misc_feature (938)..(938): n is a, c, g, or t
  misc_feature (941)..(941): n is a, c, g, or t
ggcatgacctttgttttcatctgcctgcaaggccaccaggaaaaacctggattttccgttccaccaaattatagtttttttatgacccgaacatggccaggcggatgaagcgtacgttctccatgcccagggaaaagggctgcngaaacacatccctcttctnttctcgcttttcccatcagccaaagatccgactngggaggaccgattcccaggccggtccacccatgatcatgctcatacccactgcctacgagtggtttgagaagtggcaggcgnagctgaagggaaagcggggcagtgactatgagacctcaaaaaactcctttgtggaagcctctatgtcagtggtcctgaaactgttcccacagctggaggggaaggtggagagtgtgactgcaggatccccactcaccaaccagttctatctggctgctccccgaggtgcctgctacggggctgaccatgacctgggccgcctgcacccttgtgtgatggcctccttgagggcccagagccccatccccaacctctatctgacaggccaggatatcttcacctgtggactggtcggggccctgcaaggtgccctgctgtgcagcagcgccatcctgaagcggaacttgtactcagaccttaagaatcttgattctaggatccgggcacagaagaaaaagaattagttccatcagggaggagtcagaggaatttgcccaatggctggggcatctcccttgacttacccataatgtctttctgcattagttccttgcacgtataaagcactctaatttggttctgatgcctgaagagaggcctagtttaaatcacaattccgaatctggggcaatggaatcactgcttccagctggggcaggtgagatctttacgccttttataacatgccatccctactaataggatattacttggatagnctntat

SEQ ID NO: 238145 - DNA, 904 bp, Homo Sapiens
  misc_feature (45)..(45): n is a, c, g, or t
  misc_feature (153)..(153): n is a, c, g, or t
ctgtttttgatttctaaagaggggtttccccttggggggggggtnaattttggttggggcttgtgccagaaggccactgcctaaggggttacttgggcatcaacccccatttctgtgggtgctgacccttgggttttctattccagatgtgtnccgtaccctcagagatcctttgccctgggaatcccagtggattgtagttagaatactagggggcatccccggggcccatcgccttcggctggggtgatcgacaaggcctgtctgctgtggcaggaccagtgtggccagcagggctcctgcttggtgtaccagaattcggccatgagccgctacatactcatcatggggctcctgtacaaggtgctgggcgtcctcttctttgccatagcctgcttcttatacaagcccctgtcggagtcttcagatggcctggaaacttgtctgcccagccagtcctcagcccctgacagtgccacagatagccagctccagagcagcgtctgaccaccgcccgcgcccacccggccacggcgggcactcagcatttcctgatgacagaacagtgccgttgggtgatgcaatcacacgggaacttctatttgacctgcaaccttctacttaacctgtggtttaaagtcggctgtgacctcctgtccccagagctgtacggccctgcagtgggtgggaggaacttgcataaatatatatttatggacacacagtttgcatcagaacgtgtttatagaatgtgttttatacccgatcgtgtgtggtgtgcgtgaggacaaactccgcaggggctgtgaatcccactgggagggcggcgggcctgcagcccgaggaaggcttgtgtgtcctcagttaaaactgtgcatatcgaaaatatattttgttatttaag

SEQ ID NO: 238146 - DNA, 1000 bp, Homo Sapiens
tctgagaaacaraattccamcatttycttaaagaacgtcctttgccsgggcagtagcccatkccaatgtacgagccggatcaggtcagaacycatttcycccawtggarargcgagccsccccgaagagagcaggwtgaaactccagccctcccccgcgmacatcgggaggagtgcacttgtgacyyctcttccatytctgccttccttcccctccacacttccytggtcgagggacgaaargcgcccgaagggcatccaggctggagaagcagaacagcacacctgagagtgactacgacaacactcccmaacaacatggagccagatggcatggggtcaagccgaaagggacggcaaagaagtatggtgtggccaggggatggcttggtaccagacacagcagaaccccatgtggccccaagccccactctccctagcaccgaagatgtcatcaggaagactgaacagatcaccaaaaacatacaggagctcttaagagcagcccaagaaaataaacatgacagttatattccctgctcagagaggatacacgtagctgttacagaaatggcagcattattccccaaaaaacccaagtctgatatggtgaggacttcccttcgttaactgacgtccagtgcctaccgactgcagtcagagtgcaagaagaccctcccaggggaccccggctcacccacagacgttcagctggtcacgcagcaggtcatccagtgtgcgtacgacatcgccaaggctgccaagcagctggttaccatcaccaccaaagagaacaacaactgacaagggcagggcaccgcctcctctgttttctaggctttataaagtccaatttcaaattcagacgcagaactcttcagatttctacaaaaagaaacatttaatgacggtttaaaactttttaaaagaawactcagtattwtttttttttkttttctaaccaattttcaactatttaacccacttgccttattttgtgc

SEQ ID NO: 238147 - DNA, 472 bp, Homo Sapiens
tttcattatgatctttgggaaggaatcaataaaatgatagggcctacttcattaggtgtggttcattcctattcatgctccctggaagaacaagaatgctgaattttgaaatttaatattgtatgaattagcatcagggagaggtggagaaaaatacaaaactaaaagtcatgcttattgtgttcagtgtgcccttctccagagggccactggcttataggaaaggattgctgctctaccagttgaccaggagatggcacgccaggacattaagacactggagttttgtttcgtttttttttttttttttgagactctgcctcaaaaaaaaaccaaaccaaaccaaagaaccagaatagcatgtgcacatatacacagacgtttcacaactggcattatgttttgctactgttttatttacaatgtatcacaagttttatgctttaataaaatttaatcataacttctaatg

SEQ ID NO: 238148 - DNA, 542 bp, Homo Sapiens
ttttttttttttttttttttttttttttttttccaccatactagcaagatgtttatttaaaaacatttaaaaactgttttttaaaaaacattctagttaagacgagataattcaatgttcaagctaataattctataccattttaagagtctgaatttacttttaagtaaaaaaaggcagagaaaaagagtgaaggatacagaattatcttgattatgcactgctgttactattcccatgctaaagaccccttttgtttcaataaaactatcaatatttactgagaatgacagctctgaatcaaaggcaagagaaagagacctgtaaatagtgctgttcatactagttgcccccagtagttcccaggcctcacttccaagctgccttaagtaatttttactttctgaatataaagccaactgtggaggggtcagacagctgaggactgaacttcttaaaaattggcttcagagaaaagcataacattacaactgaggcggccgagcacagtggctcacgtctgtaatctcagcactttggga

SEQ ID NO: 238149 - DNA, 801 bp, Homo Sapiens
  misc_feature (34)..(34): n is a, c, g, or t
  misc_feature (40)..(40): n is a, c, g, or t
tgcacacctccttcgtatcccacaccaatggcancaggcnccgaacacccgctctgctgcaggagaatggctactcatcacacgctgtggatgggactggccctgctgggggtgctgggcgacctgcaggcagcaccggaggcccaggtctccgtgcagcccaacttccagcaggacaagttcctggggcgctggttcagcgcgggcctcgcctccaactcgagctggctccgggagaagaaggcggcgttgtccatgtgcaagtctgtggtggcccctgccacggatggtggcctcaacctgacctccaccttcctcaggaaaaaccagtgtgagacccgaaccatgctgctgcagcccgcggggtccctcggctcctacagctaccggagtccccactggggcagcacctactccgtgtcagtggtggagaccgactacgaccagtacgcgctgctgtacagccagggcagcaagggccctggcgaggacttccgcatggccaccctctacagccgaacccagacccccagggctgagttaaaggagaaattcaccgccttctgcaaggcccagggcttcacagaggataccattgtcttcctgccccaaaccgataagtgcatgacggaacaataggactccccagggctgaagctgggatcccggccagccaggtgacccccacgctctggatgtctctgctctgttccttccccgagcccctgccccggctccccgccaaagcacccctgcccactcgggcttcatcctgcacaataaactccggaagcaagtcag

SEQ ID NO: 238150 - DNA, 552 bp, Homo Sapiens
  misc_feature (37)..(37): n is a, c, g, or t
gatgaaaaagctggaatgataatagctcaaactcttntgagcatttagtacatgcttggcactgttctatatgtcttaagttattcactcttgtatttaaccatcaacactcttatgaggtaaatatcccgcaattacttttgcgccaacctagtaccactacagacaaggaaacagatgcagagaggctaagttacaagggcacacagccataaactttggatctgtggagtgactgggcttcagagtcctcttcctgactgctgttcctatgtcttttgcaaagagaagtctttgacaggtatatgctttattaaaatcatgtttagaaaaaaatgagagaatagaattagaaaaaggaatgcctgtaggcttcgatgaaaatgacttttgtgactaggtgaaaattgtttggctgggtatcctggaaaattgtcttctgggaatatctatattccagggttcacttttgtcatagaattgtttcttggcccatttaagagagatactttgtttattaataaatcaaacgttttaattttaaaaaaaaaa

SEQ ID NO: 238151 - DNA, 860 bp, Homo Sapiens
gggcccttgtgctttcacgtggtggggttctgccccctggggaaaaaagctaatggacaaaagcgggcgcgggtggggtaccccttggggattttgaaatgcgggagccggcaaggggcccaggccttggctatgggctggccaaaaaagtatattttgggtggggtttcctaggctcctcaggggttctgaggtgcattgtatttagggtatgggggaaaactttcatatgcccattgtgtacaatcatttaagatgattgaagctttgctggttaagtacagggtcagcagagaaagttcctttccccagttgatgtcttgaggctgttgagaaacttaggacagaagcctacctcatcccaggcctgcccctccgtgcatagctctgcctttgggtcttgttcatagtgctgttcaggcaaaatggaatagtctcaggtgggaacaccttctcttgctagctccaggaaggctttgtgggaaatgagttgagaccatggacttgggagttgggggccagagttgagcctggacttgaccaattaattcccttacctttcagcccaagatagctacatgtctttacttgctgtataagttttccttttgtcctgggggtgcctgattgatcctatctcttcacccttcattctttcaacaaacatgccatctatctcccaggacatttattcccttctattcaaggccagttaggaatgcaattattttttttttcagttaaatacagacttgtttggacgcaaggtaccctttctctttttaaaagctttttatcatgaaaactttcaaatacaaagataaaatggtagagtgaaacctcccatgtaccccagcatc

SEQ ID NO: 238152 - DNA, 912 bp, Homo Sapiens
  misc_feature (29)..(29): n is a, c, g, or t
  misc_feature (58)..(58): n is a, c, g, or t
tctctcccgccaacgtgaaaacttaattntgcatgaatcagggtcagggacaacaatncatgggggcctgtgtgcaccatcttagtggaagaaatgagcagcaacaatggatggaatgggaccttgggctagatagaatctggcagtctatgtggcagaaatcagcaaaaacacgattgtaaaagcaaacaagtaattagagaaatcacgtgctgtcaggtcttggaatcaattagaaagagatgactagccagatggaattgcagcccaatcatgtgaacaggcaaaccgcaaaaaataaataaaattaccaataaatacatgaaaaattataatgttgttagtagttaaaatgcgaattaaaatacatgctgttttccctaccagacaagcaaagagtaaattaaaatagtagcccaggcttgcctggcagtggcagggaggtgtggctgccagggccttagaggttggcatcaggctgcccaccccagtcactgccagagcctcccacctgagtgttcctcccggcactggaagccagtggccgtccagaggaacgtgattgaattgctgtatatccatctggtggagcactgctgtgtgtctgttaaaaaagaaaccataggtttttagggatatgtaatgatatttagaaagggtttaagagacagtaaagcttggcagaataaaccgtgtatacagaatggatgtttgcttgcataaataaatttatataaatatgtctgggggataaaaataagtatatcacaatgctaagacaggcatatggggaatttaagcttttctttatacttgtccatagtttccaatttttaaatttgtaattttttatcagaaaaataaatgtgtaaatatagtggaatctttattaaaacattcacttttatttgc

SEQ ID NO: 238153 - DNA, 1000 bp, Homo Sapiens
aaaaaaaaaaaamcctwttaartwttgargtgyyacctttttkcccamgatctmgragaaatttgggtgggggkmtcaccskctctttctctctcyccaaatgacaaaktttggghatttttgattttccttgcatcgcccytktgctcatcaggtaatctgcttaggaggaaaaaagaaaagaaaaaaggaaaaaaaaaaaaaaaagcaaaacaaaaacaaaaacaaaaaccctaccagaaaccagaagtagagagatttaccatataacttatggactttgaaatgtctgtccttttaaggcagcagggaggcctgggtgcgaagcatgttggcttggcccttcacggtcctggagggaggtgaggctggccttggaaggcgtgccctggagaggtcttgggtgaaaacttgaccttgaagaaaccaatcacaaaagcggcgttgggtcagggctaggcttagaggtgaagcatcaacatggaaccatctcaggaagccgcatcgcctcttccgaggtcctcacttccaggagcctgtccttgcaagatgcaatcatcgttcctgctttttcattgtcattaaattctgtagaaacccattgtcattagctccaagtgtaaatttgggtcaaggagacagaataataatgggaatctcggagttcgacaccatagtgacgttcagcgtcctctgaattgtgctacatcagcgaacaagtcggcgcttgaattggattttgaggttattttaaccatggaattatttttatagaaggggaaaatgtatgtgaaagtctctatttgtgtatttctctcctaaagttgtgtctctttgggaattggatttgatttttattatttaatacctcactttggcccgtcccccctcccaacacttctgtatcctcgccctgccgccccagcctggacgctctgcgtggaagtgcgtgtttgtagcagctcgggcctcatctcagcgctcggatccctcctgctgc

SEQ ID NO: 238154 - DNA, 925 bp, Homo Sapiens
  misc_feature (350)..(350): n is a, c, g, or t
  misc_feature (891)..(891): n is a, c, g, or t
  misc_feature (894)..(894): n is a, c, g, or t
  misc_feature (916)..(916): n is a, c, g, or t
ggtttccacatttttcgcgaccatcaagggtttaagggggttcccaccgggctctggatcctggcctccctgcctggaaaacttgaagtcgaaattgggctcccctcggaagggggttcattcagggtctgttgcctgagactggcccgcctgtggcctcccgtaatgaattctgtttgacggattgttctttaaaaggcctggctctgatccagtgacccctctcaacaaagaactcggtttaaccagggctctggtaagaccactcccacccagagaccttgtgtggcctggtgtggcctgtgtgtcggattccttcctgtcagctgtgacccatttgacctgtgtcnccagaacccagttttttgtttgtttgtttgagacggagtcttggtctgtcgcccaggctggagtgcagtagcacgatcttggctcactgcaacctccgcctcctgggttaaagtgattctctcagctcagtctcccaggtagctgggattacaggcatgtgccaccacaccccgttaatttttgtatttttagtagagacggggtttcaccatgttggccaggctggtctcaaattcttgatctcaagtgatctgtccgccccggcctcccagagtgctgggttgggattacaggcgtgagccaccgcgtccggctcaggacccagttttggctgctggttcccagcaggggactcgggggatatacagtggctgcaccaaattggaggtgtgggttcctccaacacaatttgcttctgcccgttgtcttcctgccagctgggtttggccaggatttctccgtgtgggggctacatgcgaccctctcccctcctccctgactttagaggctggtgctgtgtcgggaggaagagtcacgggnctncctgagcacgccaataagaggnacccaggaa

SEQ ID NO: 238155 - DNA, 1000 bp, Homo Sapiens
  misc_feature (569)..(569): n is a, c, g, or t
  misc_feature (989)..(989): n is a, c, g, or t
gggtscgmgccccctcacctccccctcctmctctcaaaargtktgaggttccagcgggcggggctytctgggctccatcctagtratcccctctcagctgaggagaaccgagagcggcgctgggcacctgagcccaggaaggcaacaggccggccgggacccgcgagtgcctggcggagcaggcgcagcccargactcccsgctcccacctccggctgtagtccagggccaaggcttgtgttcaatcgtgtgaatggccggcgggccccctccacgtccccatccttcgaggggacccaggagacctacacagtggcccacgaggagaatgtccgctttgtgtccgaaggtagcgagcggggccagagggtgcggcataggctgctgggtcgcaaaaccatggacccgggatggccccacttcaagctgacccacagccgctgcatggctgtgcttttccttggcactctgcccttgtgtcctgtgaccagccctgtgtggggctggagtccagggtgaccatcaggccctgggtgggcgatggggtgcctgggacctggctcagcccnactgccctcctcccacagcctggcagcaggtgcaacagcagctggatggtggcccagccggtgagggcgggccaaggcctgtgcagtacgtggagaggacccccaatccccggctgcagaactttgtgcccattgacctagacgagtggtgggcgcagcagttcctggcgagaatcaccagctgttcctagtggctgctgggagggggcgctgctacacggccgacctgtcgccaggagagaagcatggcgccctgcccacccactgcgcctggctgggtgccggccacacctgaagtgccagcatttggacttttgcacctttttttcccttggcccggctgtcccaaccaagctgccatggccaagggccgaacccgtctgacctcagccctgctcactgtgcccagggaccagcgancagcccctgga

SEQ ID NO: 238156 - DNA, 994 bp, Homo Sapiens
gatcccagtcacccagcctgcctcatggaggacatcgagcagtggctgttcmctgacgtggggaatgatgcggaagagcctaagggggtcaccagcgaagaatttgacaaattcctggaagaacgggccaaagccgcggaccgattgcccaacctctccagcccctcagctgagggccccccggtcccccatctggcccagcgccccggaagaagacccaggagaaagatgatgacatgctgtttgccttatgagtgtggggtctggcaccctgcagcccaggtccccactgctctcacacccttaggctgggacctccctccctcctctggtgttaaggctgctttgggggtggcttgttacccccttttcctcctctttgaagacggagctgccccagctgtggctgggggtgtggaggcagtgggatgaactgggggacaggtctgcgctgcagtgggatctggctgctctgcctcctttcccaccccagctgaccatgagactttgctgagaagtggaggccccaggacaggctggctggctggctggctgcttgacccagtgtgactctccttcactgagtgataccctgctccgggcccatgccccaaggagcccttcagagcccacactgccagtcgaggcctggctggaggctggccacagtggaaattctgccgagcctcttgtcccttccctgctctgctgcatggggccccatggctttggctggccactgagggtagggtgtggaggtgtggaggccccctgaggagctgcggcggcccaggtacgaagctgcaactctgcgcgcagtgggcgagatctcatcagccccaggctgcaggtgaggcttcaggggatgctggggccccactgcccctccgctgccttgccctccatccttcctctgttccttctggccgggcaccacagcactggggctcacctcttggttgatcctcttgtactgggagaggtkcyttttgta

SEQ ID NO: 238157 - DNA, 844 bp, Homo Sapiens
ccattttaaagttaaatgggtggggtactgtgcctacccttggggccgaagagaatcctgcaagggggcaccaaagattttggacaaggcaaactggcaggccttttgcaatggaacaatccattctggacctgttgccaacatggcccttaaaattggaaagggcaaccccaaaggggcacaaaatatgtggagaaactaaagggcctttttcgcaagccctaaccaaagagaaataatatatttgattccctacaaaaggcaaagtttgatgtatcaggactgaccactgagcagatgctgagaaaaagaccagaagactatctatagacaaggcgtcaaggtggccattagtgcaatatatatggatttggaggcctttctgcagaggtctaacctccttgcagatctccatgctttctgccaggctcacagctatgatgtcctggttgccatgactatctttttcaacactcacaatgagccagtgcggcagttggctattttctgtccccatgtggcactccaaacaacgatctgtgaagtcctggaacgctcccactctccacccctgaagctgacccctgcctcaagtacccaccctaacctccatgcctatcttcaaggcaacacccaggtctctcgaaagaaacttctgcccctgctccaggaagccctgtcagcatattttgactccatgaagatcccttcaggacagcctcagacagcagatgtgtccagggagcaagtggacaaggaattggacagggcaagtaactccctgatttctggactaggtcaagatgaggaggaccctccgctgccccacgtcccccaccaaagc

SEQ ID NO: 238158 - DNA, 772 bp, Homo Sapiens
  misc_feature (650)..(650): n is a, c, g, or t
  misc_feature (652)..(652): n is a, c, g, or t
cgagtgaggacggggagagcgtgggtcactgcccctcctgccagcggctcttcatggtcctgctcctcaagggcgtacctttcaccctcaccacggtggacacgcgcaggtccccggacgtgctgaaggacttcgcccccggctcgcagctgcccatcctgctctatgacagcgacgccaagacagacacgctgcagatcgaggactttctggaggagacgctggggccgcccgacttccccagcctggcgcctcgttacagggagtccaacaccgccggcaacgacgttttccacaagttctccgcgttcatcaagaacccggtgcccgcgcaggacgaagccctgtaccagcagctctgcgcgccctcgccaggctggacagctacctgcgcgcgcccctggagcacgagctggcgggggagccgcastgcgcgagtcccgccgccgcttcctggacggcgacaggctcacgctggccgactgcagcctcctgcccaagctgcacatcgtcgacgtgagcacggaaggtgggcgggcgggagggtgaccgcggcgcgcctgggggacggcaggtcctgaccgcgccccgcgatcctgcccgcagacggtgtgcgcgcacttccgccaggcgcccatccccgcggagcntngcscgtacgccgctacctggacagcgcgatgcaggagaaagagttcaaatacacgtgtccgcacagcgccgagatcctggcsctaccggcccgccgtgcacccccctacccccccccccc

SEQ ID NO: 238159 - DNA, 1000 bp, Homo Sapiens
  misc_feature (976)..(976): n is a, c, g, or t
ctcactgtacscaaggccggsccatsscggccgascgcgagagaactggcaccgtgcgggagcggacgcgagcgctgtgccsccttggctacaagaacgtgagaagcagcccacgggcctgagcaaggaggattcgcggagtctgcaagcgggaaggagcgaccccgaggagaagggcgtggaccggctgctggggctggggagcgcaagtggctccgtgggccgcgtggcgatgtcccgagaggacaaggaggccgccaaactggggctgtctgtgttcacgcatcaccgcgtagagagcggcgggcccgggacctcggcagcctcggccaggaggaagccgcgggcggaggatcagacggaaagcagttgtgagagccacaggaaaagcaagaaggagaagaagaaaaagaaaaagaggaaacacaagaaagagaagaagaagaaagacaaagagcacaggcggccagctgaggccacctcctctcccacatctcctgagaggcccaggcaccaccaccatgactccgactccaactccccctgctgtaagaggaggaagcggggacacagtggggacaggaggagcccgtctcgcaggtggcatgacagaggctctgaggcctgatggctggaccctgctcactgctgttgtgggaccctgaaccctcccttcaccttgcttgcctcctgcctcggaagctccttgggtgtgggtgaagcccgaggctgctcctgtggaagtggctctgggcaccagcctgtggggctaaagacttgacagctagctctggagcagccggcttcctggaaaacctccaggtttcgcataccagggatggcccctggcttggcctgcgaaggtgaacctgcccagatttatcagtagaggctggactccctctgtgtcctgcccatggttgcagcagccatgggcctatgagcggtctaactgtggccaagtatggtgacctcntatttttctttatattgactcttt

SEQ ID NO: 238160 - DNA, 943 bp, Homo Sapiens
  misc_feature (917)..(917): n is a, c, g, or t
  misc_feature (920)..(920): n is a, c, g, or t
  misc_feature (926)..(926): n is a, c, g, or t
atttgtctctacataacaacaagtaggaaggtacatttacaatacatattccaggaaggtttcatatgcttagcttttaagaatttttttttaaatacccaacatgacatgctgttagcatccatagagatccccattcccagggtggtgtacctatattgccagtgcttcagatgttgggtactaatgacttatcttcacccttttccagaggattgtcctgggctgatgagagtcactttacctgaagatacctgggaagttttgtctcctctgaggttgcccatggccagtgactgatgcaggacattacagcctggcccactggcctcggtggtacaatttatgctcctgagcaccccatgggattacgctgtgtgtggatttctcctgaaaccacatatttgcctcttctgccctgttctgttttttctcattcccttatagaggactctcagtaagtcacttacacaagaatcctaatttgaaatgctgcttccaggagacctgacttagaaaattggacaaataaagttgatttttttaaatgtccagtaacatgaagatgctgaactttcctagtcatttagggggaaatcaccacaaatatatctggctgatcaggttgaaagttaaaagaaaaaaagatttataaagtgggtattttcaagatggtgtggagggagatacaatttgatgcaagtcttatacttttgatgtcaatttattcttcagaaataactggttaattataaagggtggatggataaggatattcactgcaacaatgtcttaaatgtgaaaatggaaacaacctaaatacccaataataacaggattaaataattcattgtacattaaaagaatactgtctataaagatgtctagaataagttgttcagttgaagttgtaaagntanatacanaatacccataatgtgca

SEQ ID NO: 238161 - DNA, 933 bp, Homo Sapiens
ccggaattcccgggatgagcaaaatggcgcgggagaaggagatgcaggagttcacccgtagcttcttccgaggccgcccggacctcagcacsttacgcattccatcgtgcggcggaggtacttagctcactcgggccgcagccacctggagcccgaggagaagcaggcactgaagcggctggtggaggaggagctgctgaagatgcaggtggatgaagccgcttccagggaagacaaactggaccttaccaagaagggcaagaggcctcccaccccttgtagcgacccggagagaaaaaggttccgcttcaattcagagtcgggctggctcaggtcgccgtggagaggaccacccggctgtgatgaggctgaagcgctacattcgggcctgtggtgcccatcgaaactacaagaagctgttgggctcctgttgctcacacaaggagcgcctgagtatcctccgggcagaactggaagcgctaggcatgaagggtaccccttccctagggaagtgtcgggccctgaaggagcagagggaggaggcagctgaggtggcctccttggatgttgcgaacatcatcagtggctcgggccggccacgcagacgtacagcctggaaccctttaggagaagcagcacccccaggggagctgtaccgacggaccctggactcagatgaagagcggccccgtcccgcacccccagactggtcacatatgcgtggcatcatcagcagtgatggcgagagtaactgagctctgccacccccaggagggacccttgatacatgtacaaagcatacatagcaccccttgccctgtgtctgtggaacagaagcagcttccttcagagaagactgcagctcccaaggacacaagctgttgggatgctacttctcagttcacgctgccctttaagggttatttttaagac

SEQ ID NO: 238162 - DNA, 885 bp, Homo Sapiens
gggtcccctaatggggacttgggtgctcttttctccccaagaaattggggaaaaaagcaggggtttccaggaaacaccaaaaagggccgggctctgaaccaggggttccttggatgaggcttttgtgggccctgggtagaaggctggtccaaggttttggacggttcattcctgggaccaccaaagtggatgccctgaaaaagatgttgttggatcaggggggcttggccccgtgttttctaggctgctttctcccactggtaggggcccttaatggactgtcagcccaggacaactgggccaaactacagcgggattatcctgatgcccttatcaccaactactatctatggcctgctgtgcagttagccaacttctacctggtcccccttcattacaggttggccgttgtccaatgtgttgctgttatctggaactcctacctgtcctggaaggcacatcggctctaagcctgcctcactccatcgtttccaccttgcagtgatgcagcttgaccctggaacggtcagacaacctcctcaaagtgggcataccagtttccacggggttgggttgccggtcagagcttaagaggactagcaccctgcaatgcccctcttcactctaaaatgtacactgactgctttagagcccttgataatagtcttattcccaccacatactaggcactccataaatatctgttgaaccttcatgaccttatcaactttacacccatatcccagcaaatgccactcatccccactcttcatagacacatttgttactctaaccctgcctaggcttcttgtagctccagctctttagagactcccggaaccctttatatggtgcctcagtaaatatgttattgaatatgaatcc

SEQ ID NO: 238163 - DNA, 910 bp, Homo Sapiens
gctgcctgctgcttctgacggatcttggtgctcaggctgcctggctctccgagtgaggacgcagcctccatatttggtgcactcaggcatggctgggacaagccagctgccccagggttcttcccctggtgattctcgcctgctttctcatctcaggggaggcagtggcacctccctctccctgctgacatgaagagagctatgatatgccactgctgccaactcatcctctgcccccacctcgaaacccacagtccccagtggagggccactactcatccccattggtttcccaggggaggggtgttgtctggaagggcaggttcagatgcagccttccagatttagaggcactgggaggacagtggctgagtggaggcgcccagacctgggcaggcagcaggctcaggcccacaccttgtgatttttgaaaccaaagcccagaagatgatgtttacttctctctccctggctctgcccttcttactgcaaaccatgctgtgccttagggcccttctcatagctgttcctcatggccatgactggaacagggatgcaacctctttctacacaagcacagttagttgggtgaagtctttttttttttgtttgttttagacggagtttcactcttgttgcccaggctggagtgaagtggcgtgaccttggctcactgcaacctccaggccagcctcagcctccctagtagctgggactacaggcacccactaccacgcctggctaattctttgtatttttagtagagatggggtttgaccgtgttagccaggatggtctcgatctcctgacctcgtgatccacccacctcggcctcccaaagtgctgggattataggtgtgagccaccgcgccgggccggttgctgcatcttaatgtctgtaggtgaatat

SEQ ID NO: 238164 - DNA, 438 bp, Homo Sapiens
tacacaccccggactcctccgcatcctcctcctgcttcctccgctgggcctggatggctgcctcacctctcacctcccaacgtccctagcccttacgtccttccacttccaagatctttttccaggttcctgagccctactgtgtctcaggtgtgccctgaaaccccagggcttgtgtgcacatatccttagcccatctttcaagggacctctccatgatcccacctcccattcacagatacctctcttgtagctctctgacctcctccttcatggcaggcatcgccattcttgctgaaccgtttgtgattgccatttgagctctggaagcctctattgccatgagagttctgtcacggtcactttactgtccccatcatcacccagcacggggctaagcatatactagatagtcaataaataaataaataatgaatg

SEQ ID NO: 238165 - DNA, 443 bp, Homo Sapiens
ccaagaactgttggaggtctgtgatgcaggtttttctgttcccaacatcaaaagctgtggattatttggtgtgttcccctttatgttatctctcgataatttttgagacatcaagattttttaaaatatcaatactggaaagatgaaaccttcaaattaaaacctaaaattgattagaaagaaaagtaaaatattaatgcagtaaatttaggatggttacagatactcaccatcaacataaataaatggagttctaggataaattatttgtggaatactaatggtcaagtcacataagagtaaaatcttttggtgaggagacacatttgacaactgctaaagaattaactaaatttgtctttctaaatagttttctttataaagtaacagaaacattgtaaaaggataaataaatgcctgtcataatgacttaaaaaaaaaaa

SEQ ID NO: 238166 - DNA, 536 bp, Homo Sapiens
caggcatttataactgagggtatgaacttatatccaccaggtctcttgtccctgcacttcattttctttggaagaaaatgatgtctaaagaacaatatagaggcatttttacatacgtatttaaatgaaaaggaaaatcgtggtttcttaaattgataaggattaagaatattttattataaatataatatatgattttttaacctgttttgttgcctcatatgctgtcaggttaatttgttttccttcgtgccagaggtggggaggaaggcactctgtctgctgggtaaatgcctaaattcactcaccttcatggtttgggggcagcatggtcattgtggatattggttttgtggagttgagggaacttaggatataagttcactccctctatttttctttgtgattcagtttttcaaaaatctttttttcttccctttctccccattgtggaaattacaaatcaaaggcctttttctttaatgtaaagtgtatttatttaaaaaaaatacaaaataaactacaagtctgtcttt

SEQ ID NO: 238167 - DNA, 462 bp, Homo Sapiens
acttggccttatgagaaataataagtatttttctatttacatgagaatttaatctcaaaacaggaatcagaaacatattaagtccagggcataaaacctaaaccactgctcatatttattctttctaaatagagcaaagtgtaaaatcttctccataaaatgcacattgtgcttatgaaaaggccagtcttagtgagaatcattggtattccatagaagagtgaattaaacacagccaagggaagacccaagtctcatacttctcttgtatattccagagttccaggggaattccaggtgatagaggtgatctcccatactgttaaagcaaggttgcagacacttgggaattttggtcccagtactctaggaggtcacacctctgtcctggaaaatactacaggaatgtatactcttcctatgactcattctggtcattcttccagcatcacaaaaaccaaa

SEQ ID NO: 238168 - DNA, 485 bp, Homo Sapiens
  misc_feature (18)..(18): n is a, c, g, or t
gcagaggacatggaatanaatcaaataaggtcactgtgtgcaggcacctcacggtgtggtaaaggagcagccccatccacaggttctattaattccagcctgtgagaattggaaccacagggtgaattttggaggacaggcacttacactaatctggaagcataatatataaagagtacctacaaatcaataaaaaaaatagaaaaaaaaagagcaaagtatatgaacagaaaattcaatgaaaaggaaatagaaatggctcttaaatgaatgaaaacatactctcactcagagaaatgaaaatttaacccatgtcaagatacttggggtgaaggaagtgttttaaaattcgattgtggtgatggttataaccctataaatttactaaaacttattgaagtgtacctttaaaacaaatgaactttatagtatgtcagttatatcacaataaggctattttaaaaataaaaacactttgagatacc

SEQ ID NO: 238169 - DNA, 939 bp, Homo Sapiens
  misc_feature (4)..(4): n is a, c, g, or t
  misc_feature (77)..(77): n is a, c, g, or t
  misc_feature (115)..(115): n is a, c, g, or t
  misc_feature (118)..(118): n is a, c, g, or t
  misc_feature (127)..(128): n is a, c, g, or t
  misc_feature (233)..(233): n is a, c, g, or t
ttcnacggcattgcccaggctctgcagccacatccggacgagtcggtccatgtacaagtaccctttctgacatctcntacatgccttctacccatgcccaccagcagaaggtganctntgtccctcnnccatccatcctccatgcctgtcacttctcccagcttctttggagccgcatcacaatactggacctccccccacggggggaatctaaccccaaaccccaacgtccnccgccatcctaacacccacgtgccttcacacttaggcagctactactagaagcttactcatcagtggccttctagctgaagcccatcctgcacacttactggatgctttggactcaacaggacatatgtggccttgaagggaagacaaaactggatgttctttcttgttggatagaacctttgtatttgttctttaaaaacattttttttaatgttggtaacttttgcttcctctacctgaacaaagagatgaataattccatgggccagtatgccagtttgaattctcagtctcctagcatcttgtgagttgcatattaagattactggaatggttaagtcatggttctgagaaagaagctgtacgttttctttatgtttttatgaccaaagcagtttcttgtcaatacacggggttcagtatgacacagaatcatggacttaacccgtcatgttctggtttgagatttagtgacaaatagaggtgggaagcttataatctaattttaggaggaccaaattcagtggatggcaactggaacattgattgtaaggccagtgaagttttcacccaactggaatttgatggaaagaaggtttgtgtgtttaagacgccaagggcattgcagaatccctctcagtggacagtatgcactcagctgaccactctcgctagaaatagtcaagatataacgagaattttaat

SEQ ID NO: 238170 - DNA, 1000 bp, Homo Sapiens
ttaccctcttttaaagctkttatwatttgwtctattctgmtwtwctcwrkrtaatccawttmaaracaatwttwatgattwcrttaaataacagaactaraaataagctcractcaggtckccaaccckgcttcacttggcacggtkatwtggractcaartcacaagacggcggagaaaamcwarcagaatacagtakactattkcccaacaacttactttgtctcrggggccaagccctgagctctgtgwtcaagmwatagcctwttcarawcctttgtcatacttcacagatttawcatttagtgctgcattgaaagaggaacaaagattggatggcatgctattggatgacacaatctctccatttggaacagatcctctgctatctgccacttcccctgcagtttccaaagaaacgcagtaggagaagtvgctttrgctcagatgatggtgatgaattataagaaataaacagacccaattcatccactggaamgcaattctatgctggtgctatgcaattatgctctgtgtttcatatgttgctttggctttttttttttcttaaaggaatgtgttgttcatgaaaaactgatagaagcaacagaagaattcgcaggaagaaaaatcatagtgttaatgaattattgagggcgaaaaaaaggtgttttcttctttgactacggagtccaaatccacttaaattctgttttcctgaaaagaggtacagcataagaaatagctctttattgatgttttaaaagcagcaacttggtggtgtactactggaactaatgactgcaaagtgttaaacgactgaaatatacaaacagtctcttagttactcatttccatcttctcttcaactttcacatcagtcttccggaatcaagatcaacatatcaggtggtcattgcctttctccattgtctagtagacatgtctaaagttcaaactttataggataaataaatgtataatagattatctgtcactt

SEQ ID NO: 238171 - DNA, 701 bp, Homo Sapiens
  misc_feature (153)..(153): n is a, c, g, or t
  misc_feature (175)..(175): n is a, c, g, or t
  misc_feature (179)..(179): n is a, c, g, or t
  misc_feature (187)..(187): n is a, c, g, or t
  misc_feature (195)..(195): n is a, c, g, or t
  misc_feature (673)..(674): n is a, c, g, or t
aagcamcwccsgsaggaacgacgcgagggggagcwragacccaracgaaaatcctgggatwtgcccaccagcccacgtacccgcccatgaacccaattccagcaccgttgcctcctrcattaccaaygcttcaacctcatttggtgacagccntgtctttcgacttcaaagatantganatgaagcnggtttccnatggagatagagaaagaaaaagtggaatacatggaaaagagcaagcatctgcaggagcagctcaatgaactcaagacagaaatcgaggccttgaaactgaaagagagggagacagctctggatattctgcacaatgagaactccgacaggggtggcagcagcaagcacaataccattaaaaagcctcaagcccaaggcagaagacctatctgcatttgagccctcaaactcaccttgcagagcgccaagtcccgagtggccttctttgaagagctctagcaggtgacccagccaccccaggacctgccacttctcctgctaccgggaccgcgggatggaccagatatcaagagagccatccatagggagctggctgggggtttccgtgggagctccagaactttccccagctgagtgaagagcccagcccatcttatgtgcaattgccttgaactacgaccctgtagagatktgtvtnnatggcgttctagttbtctgacstgagt

SEQ ID NO: 238172 - DNA, 662 bp, Homo Sapiens
cgacctgccaatcacagacaactcacttttgaagaaattgccaaaagtgctaaaatcacagtgaatgaggtggagcttctggtgatgaaggccctttcggtggggctggtgaaaggcagtatagacgaggtggacaaacgagtccacatgacctgggtgcagccccgagtgttggatttgcaacagatcaagggaatgaaggaccgcctggagttctggtgcacggatgtgaagagcatggagatgctggtggagcaccaggcccatgacatcctcacctagggccccctggttccccgtcgtgtctcctttgactcacctgagagaggcgtttgcagccaatgaagctggctgctcagacggtcgacattgaatttgggtgggggttgggatcctgtctgaagtacagactgttcttgctctaaaaacaggactgtccctgatgggagccaggccacagggaggaggcttctttgtgggtctctcctgcagagggtgggggtctcagggtcttaggtgatacgggagagaaagaacgtgccaggcaggaggccccctgaagtctgtgtactccgaggtggatctccatccccatccacctgtacggacatcttttccgttgcggtttgagaatgttcctataataaacccctctgctttgt

SEQ ID NO: 238173 - DNA, 971 bp, Homo Sapiens
  misc_feature (348)..(348): n is a, c, g, or t
  misc_feature (354)..(354): n is a, c, g, or t
  misc_feature (358)..(358): n is a, c, g, or t
  misc_feature (363)..(363): n is a, c, g, or t
  misc_feature (366)..(366): n is a, c, g, or t
  misc_feature (378)..(378): n is a, c, g, or t
  misc_feature (392)..(392): n is a, c, g, or t
  misc_feature (433)..(433): n is a, c, g, or t
  misc_feature (944)..(944): n is a, c, g, or t
  misc_feature (946)..(946): n is a, c, g, or t
  misc_feature (948)..(949): n is a, c, g, or t
  misc_feature (951)..(951): n is a, c, g, or t
gaggggccacgkgtgaagcksckgaggagtwtccacgggcccgcagkcttacttcgcgctawcgaagcagtcgcktktcttgttctatgcatcactcagttctgcagggacgtgaaggaaatgctcggcttcagcccggggtggttctggaggatctgctgggtggccatcagccctctgtttctcctgttcatcaattgcagttttctgatgagcccgccacaactacgacttttccaatataattatccttactggagtatcatcttgggttactgcataggaacctcatctttcatttgcatccccacatactatcgcttatcggttgactcatcactccagggncatttnaagngcgtnttnttaaaagttttnccccagaaaccccnacagaaattccttgtggggacatccgcttgaatgctgtgtnacacactcaccgagaggaaaaaggcttctccacaacctcctcctccagttctgatgaggcacgcctgccttctccccyccaagtgaatgagtttccmgctaascctgatgatggaagggccttctccacagggacacagtctggtgcccagactcaaggcctccagccacttatttccatggattcccctggacatattcccatggtagactgtgacacagctgmgctggcctattttggacgtgtgaggatgtggatggaggtgatgaaaaccaccctatcatcagttaggattaggtttagaatcaagtctgtgaaagtctcctgtcycatttcttggtatgatcattggtatctgatatctgtttgcttctaaaggtttcactgttcatgaatacgtaaactgcgtaggagagaacagggatgctatctcgctagccatatattttctgagtagcatatagaattttattgctggaatctactagaaccttctaatccatgtgctgcngngnnancaggaaaggaagatgtaaga

SEQ ID NO: 238174 - DNA, 1000 bp, Homo Sapiens
  misc_feature (952)..(952): n is a, c, g, or t
ttatwtatgtcattgtaaacattttgwatttaatgcacaaatacatatmctttkcwttwtktactatatkactyttacaatcttattcctggtkgtattttaaratatcttacctataaaaaagtttaagttcatagactcgacatgagctatctggtgattctctcattagtmacatgcaacgttgwwctgcaaaatctcaatctacattactacttataatgagtggagatttcatattaggtactaaatattatagtataatttctattttctttttccaaataagaagcttggattattttattttgtggtctttatcattaactttaattctttctgtactgtgtataatatttttatattatggccttaccataaaattatttagaaaggttgtcaaaataagttatacctctttggcaatagatvgatgtatacatctccctactatgatctacaattttvggttaagtgargcttgggggggctactgactkggttaccttcttgtctcttgtcccaaagatttaaactatgtacctttgtatrgctcttctgccccattttsacttctgagatgaaagtatttactaaaattaaaaaaaaaaaaacaaaaaacaaacctttsgctcactaactttatgggtttctgaagtgatggaaatttttaaggatatatttaataagcataaacttactaataattacttccaaaaataaaaacaggaatattacttttacccagtgtggtttatvgcatacatttgtactgaagcatatagggatgttaatgtgatcttttcctgacagattatgaaagcattatgacttgtcacaagtttccttgtatatcactgacaggtttagaagacataaatattagtgtgttttgcctacatggtgtatttaaatctattaatattttcctgttgcttttttaaaaaaatanatacacataatgtatattaaaagaggtgggatgaaataattttagtaa

SEQ ID NO: 238175 - DNA, 1000 bp, Homo Sapiens
  misc_feature (500)..(500): n is a, c, g, or t
ccgscggccttacccgmacgsckkkaaacytaaactttgtttkgktgrmckkytatatgcygctcctygccctgytcatcaaaaatakgccaargkratmactgscctttkgcgattcscctgccgcttgtccgcttcctcttctatgccaacctgcacggcagcatcctcttcctcacstgcatcarcttccagcgctacctgggcatctgccacccgctggccccctggcacaaacgtgggggccgcccgggctgcctggctagtgtgtgtagccgtgtggctggccgtgacaacccagtgcctgcccacagccatcttcgctgcvacaggcatcccaggtaaccgcactgtctgctatgacctcagcccgcctgccctggccacccactatatgccctatggcatggctctcactgtcatcggcttcctgctgcccttkgctgccctgctggcctgcaactgtctcctggcctgccgcctgtgccgccaggatggcnccggcagagcctgtggcccaggagcggcgtggcaaggcggcccgcatggccgtggtggtggctgctgcctttgccatcagcttcctgccttttcacatcaccaagacagcctacctggcagtgcgctcgacgccgggcgtcccctgcactgtattggaggcctttgcagcggcctacaaaggcacgcggccgtttgccagtgccaacagcgtgctggaccccatcctcttctacttcacccagaagaagttccgccggcgaccacatgagctcctacagaaactcacagccaaatggcagaggcagggtcgctgagtcctccaggtcctgggcagccttcatatttgccattgtgtccggggcaccaggagccccaccaaccccaaaccatgcggagaattagagttcagctcagctgggcatggagttaagatccctcacaggacccagaagctcaccaaaaactatttcttcagccccttctctggcccagaccctgt

SEQ ID NO: 238176 - DNA, 1000 bp, Homo Sapiens
  misc_feature (287)..(287): n is a, c, g, or t
agarataatgamtacaarcaggtkgactattaacmgaaacccaggccaagaccgaagtgaaaccagagagataggagtgggctgtgatcttctacccagccaaacaggcaggactcgtgaaattgtgatgccttctaggaactacaccccatacacaagagtcctggagttaaccatgaagaaaactctgacttaggcactcagaggcatacactttttacagatggacaaaagctctggaaccctgtggcttcaaatcctttgggaagggtgactgttgtttcccnctacacacagtgtaagccggaatgggaatcgctgaggctctgatccacttctaagacaggaaggaaagtgaaggcagagtgagcaggtaagagagggatatacaaggtcacatttcagacacccactcggcataccctgccgtactgcatcatcatttgttttctttgtagacactgaaatcctatcaggaggattccttcacaatgtattttatttgctagactttggttgggagggaaaaggacattaatttgaagtttcatgttattcatgccaggattgtttgatagagcatgaaggttttgtttacccataaaagtattagaggcagcgtttctctgatacagagaggcctgtccacaagaagcatgggcacccagccaaacttgaacctggaagggagggttcccggcctgcaggtgctctttcctcttggtcccaagcatctgtgcagggtcgtgggagccacactgagagacttgtgtgggccagacaagcttcattctgatgcgctagtcccttggtttaatttgtgccttatgctttcattggaccagctgaaatcactgtatttattcaacttgtgatttttttttctttctcactttaacttaaagagaattttatatgtcttggaaatttaataatttagtgttctcagtatcaattggtgtttttgttaaacgaatgaatcatctgttcatgcatgctc

SEQ ID NO: 238177 - DNA, 974 bp, Homo Sapiens
  misc_feature (950)..(950): n is a, c, g, or t
  misc_feature (955)..(955): n is a, c, g, or t
tgtgagcctggccaacttaaagccgaatcccggctccaagaaaccggagagaagaccaagaggtcggagaagaggtagaaaatgtggcagaggccataaaggagaaaggcaaagaggaacccggccccgcttgggctttgagggaggccagactccattttacatccgaatcccaaaatacgggtttaacgaaggacatagtttcagacgccagtataagcctttgagtctcaatagactgcagtatcttattgatttgggtcgtgttgatcctagtcaacctattgacttaacccagcttgtcaatgggagaggtgtgaccatccagccacttaaaagggattatggtgtccagctggttgaggagggtgctgacacctttacggcaaaagttaatattgaagtacagttggcttcagaactagctattgctgccattgaaaaaaatggtggtgttgttactacagccttctatgatccaagaagtctggacattgtatgcaaacctgttccattctttcttcgtggacaacccattccaaaaagaatgcttccaccagaagaactggtaccatattacactgatgcaaagaaccgtgggtacctggcggatcctgccaaatttcctgaagcacgacttgaactcgccaggaagtatggttatatcttacctgatatcactaaagatgaactcttcaaaatgctctgtactaggaaggatccaaggcagattttctttggtcttgctccaggatgggtggtgaatatggccgataagaaaatcctaaaacctacagatgaaaatctccttaagtattatacctcatgaattcccgtccaaggaagcagagttgttaaagagtactggaataggggctgaaggatctatattcccttattgcattttccttatgtataattttccagatggtgatgttacttttcagtgnactcnatattctcatttcatctaa

SEQ ID NO: 238178 - DNA, 924 bp, Homo Sapiens
  misc_feature (897)..(897): n is a, c, g, or t
agctttggaatctcagaatgcacaaaaagaaagtgacgcatgtggccctgaacccatgctgtgatttggttcctggccacagcctccgtagatcaaacagtgaaaatttgggacctgcgccaggttagagggaaagccagcttcctctacttsgtgccgaacaggcatcctgtcaacgcagcttgtttcagtcccgatggagcccggctcctgaccacggaccagaagagcgagatccgagtttactctgcttcccagtgggactgccccctgggcctgatcccgcaccctcaccgtcacttccagcacctcacacccatcaaggcagcctggcatcctcgctacaacctcattgttgtgggccgatacccagatcctaatttcaaaagttgtaccccttatgaattgaggacgatcgacgtgttcgatggaaactcagggaagatgatgtgtcagctctatgacccagaatcttctggcatcagttcgcttaatgaattcaatcccatgggggacacgctggcctctgcaatgggttaccacattctcatctggagccaggaggaagccaggacacggaagtgagagacactaaagaaggtgtgggccagacaaggccttggagcccacacatgggatcaagtcctgcaagcagaggtggtgatttgttaaagggccaaaagtatccaaggttagggttggagcaggggtgctgggacctggggcactgtgggactgggacacttttatgttaatgctctggacttgcctccagagactgctccagagttggtgacacagctgtcccaagggcccctctgtatctagcctggaaccaaggttatcttggaactaaatgacttttctcctctcagtgggtggtagcagagggatcangcagttatttgatttggctcacttttg

SEQ ID NO: 238179 - DNA, 976 bp, Homo Sapiens
aamccattggacaagttattctacaaggatayacgtgatcccagtggtacaagtcgtgtgttggctttgctaggwggaatcaacagaaaaatgtgaagctgttattggtcattttaatggaaaatttattaagacaccaccaggagtttctgcccccacagaacctttattgtgtaagtttgctgatggaggacagaaaaagagacagaacccaaacaaatacatccctaatggaagaccatggcatagagaaggagaggctggaatgacacttacttacgacccaactacagctgctatacagaacggattttatccttcaccatacagtattgctacaaaccgaatgatcactcaaacttctattacaccctatattgcatctcctgtatctgcctaccaggtgcaaagtccttcgtggatgcaacctcaaccatatattctacagcaccctggtgccgtgttaactccctcaatggagcacaccatgtcactacagcccgcatcaatgatcagccctctggcccagcagatgagtcatctgtcactaggcagcaccggaacatacatgcctgcaacgtcagctatgcaaggagcctacttgccacagtatgcacatatgcagacgacagcggttcctgttgaggaggcaagtggtcaacagcaggtggctgtcgagacgtctaatgaccattctccatatacctttcavcctaataagtaactgtgagatgtacagaaaggtgttcttacatgaagaagggtgtgaaggctgaacaatcatggatttttctgatcaattgtgctttaggaaattattgacagttttgcacaggttcttgaaaacgttatttataatgaaatcaactaaaactatttttgctataagttctataaggtgcataaaacccttaaattcatctagtagctgttcccccgaacaggtttattttagtaaaaaaaaaaaaamaaaaaa

SEQ ID NO: 238180 - DNA, 1000 bp, Homo Sapiens
ggtcatcgtcagcmcccggagactgkggctcgggcctcagctctccmagaccttcactgtgcaccgcasccytgtcacmaagatcatgctgtcggagagcacctcatctcagtctgtgccgacaamaaccacgtgcggacatggtctgtracttcttccgcggcatgatttccacccagcccggctccaccccactcgcttcctttaagatcctggctctggagtcggcagatgggcatggcggctgcagtgctggcaatgacattggcccctacggtgagcgggacgaccagcaagtgttcatccagaaggtgtgcccagtgccagccagctcttcgtgcgtctctcatctactgggcagcgggtgtgctccgtgcgctccgtggacggctcacccacgacagccttcacagtgctggagtgcgagggctcccggcggctcggctctcggccccggcgctacctgctcactggccaggccaacggcagcttggccatgtgggacctaaccaccgccatggacggcctcggccaggcccctgcaggtggcctgacggagcaagagctgatggaacagctggaacactgtgagctggccccgccggctccttcagctccctcatggggctgtctccccagcccctcaccccgcatctccctcaccagcctccactcagcctccagcaacacctccttgtctggccaccgtgggagcccaagccccccgcaggctgaggcccggcgccgtggtgggggcagctttgtggaacgctgccaggaactggtgcggagtgggccagacctccgacggccacccacaccagccccgtggccctccagcggtctcggcactcccctcacacctcccaagatgaagctcaatgaaacttccttttgaacaacgcagctgccatgatgccttgggatgccctggtcctgggggactcaggtgcctccctgattcctgtgggaaccccgggttcagggccagggcctcctt

SEQ ID NO: 238181 - DNA, 1000 bp, Homo Sapiens
gctaaaatktctaagcgcatgccaycatkgggttatcycagtttcaggccatgsccmarrrggactcgggaggtttctccycccactccccatttcttatgggycccattgagtgcttgraaggagttgtcactccagacacagacatcaaggtgaccttgagtatctttgagctggcatctgctgcaggtgtgggctgtgacattgacccagccttggtggctgccattgctaatctgaaagctgatacttcatctcctgaggaggaatataaggtggcctgcctgctcttgatctttctggcagtttccctcccactccttgccactgacccttcttccttttatagcattgagaaggatggttacaacaacaatattcattgcttgaccaaagccatcatccaggtgtctgctgccctcttcacgctctacaacaagaacattgaaactcacctcaaggaatttctggtggtggcctctgtcagcctcttgcagctgggccaggagactgacaagcttaaaaccagaaatcgagaatccatttctctgctcatgcgcttggtggtggaggagtcatccttcctgaccctggacatgctggagtcctgtttcccttatgtcctgcttcgaaatgcctatcgggaggtgtctcgggccttccacctaaactgaatgcctgccagtacccactgaagagccctttggaccttcctaaacccttgccatagtggaagctgtggtcactttcgcagggggtgggaatggggtggggtcactaaggagagagggtcaggagccagagttgatgagcagatctgtggaagaacaatccagggctgagaaatcgtagagcagtgaggcaggctgggagcatggaggacagcttatggaaaaagttagggcgtggggccacatgtgtgaattttacaatgaaaaaaggagtaacgtacaagtatattttctatcttctggtgacttgagcttgagctctgacaggc

SEQ ID NO: 238182 - DNA, 770 bp, Homo Sapiens
  misc_feature (17)..(17): n is a, c, g, or t
  misc_feature (19)..(20): n is a, c, g, or t
  misc_feature (45)..(45): n is a, c, g, or t
  misc_feature (47)..(47): n is a, c, g, or t
  misc_feature (60)..(60): n is a, c, g, or t
  misc_feature (65)..(65): n is a, c, g, or t
  misc_feature (74)..(74): n is a, c, g, or t
  misc_feature (114)..(114): n is a, c, g, or t
  misc_feature (116)..(116): n is a, c, g, or t
  misc_feature (118)..(118): n is a, c, g, or t
  misc_feature (154)..(154): n is a, c, g, or t
  misc_feature (172)..(172): n is a, c, g, or t
  misc_feature (309)..(309): n is a, c, g, or t
  misc_feature (454)..(454): n is a, c, g, or t
  misc_feature (712)..(712): n is a, c, g, or t
agctgcagcccgagagncnnactggtacattcacatcagacactnantccagctgactgnacacnattgggcanactggttattttaccaaggctttgactgtagtggtgtgcntncntttaaggaatcaaatttgacttatggagccaataangcccttggaatgctggcntcagatttcatgtacagtcctgtacagggtttccgatctgtgagattttttatactgacaggatcatggccatttcacagacaactacccaaatatatctacagacggcactgctcctaccaacccgataccagagnactctctgtcccctcgtcagcaggaagtagccagaaagaacatgccgcccctcgtcctttttataactatgaggtctggattgacagagcagaagcatcaccattgtggataagcgcctcattttaaaattcaccttaatcaaanactgcctaaatccaaagggcatcagcctaatggctaaggtcagcatgatcacaaaccacaaataacatctccaaccaaaaacattccagacacctcccacagagaaatgctagcctcgggataacccctctcctgccggaaagctcgycmccccccasataaccacccctccgcccagaacattccaaccctgccacaaacttctcccccacacagaaacattccadgcttgttataagctccctcwccctaaaaccnacgtacattcttagtctgcaaggaaaagtgctcctgactgaccagccagaatcctctc

SEQ ID NO: 238183 - DNA, 852 bp, Homo Sapiens
  misc_feature (179)..(179): n is a, c, g, or t
  misc_feature (185)..(188): n is a, c, g, or t
  misc_feature (191)..(203): n is a, c, g, or t
  misc_feature (205)..(206): n is a, c, g, or t
  misc_feature (208)..(208): n is a, c, g, or t
aaacagcaccccagcagaggaatcactcccctgtttagggtacccagggaggagaggcttatataaagcatgaatgtgagtgggtatgagagtccagctttcccactgcactgctctggttaatggagcagactgccatcttctggtgccatttactattcaagtggctttggtgtttnttgggnnnnggnnnnnnnnnnnnntnntnttttttacaactaagtggattgattgaaatgctttgattcttcatttgaaatgtttctattccatatacccattatcttttatcctcacaaaagcccttaacattgtttcctttaatctttggggttcttaagcatcatttccaccaacagagatgtacctacccacagttgtctcagagcatggaggctgaaagtctgtgagggcaagagtgaaatggagcagaggataggctgtggtttggaagcggctctggaatacgctgggggtggcggtggggctgaaggttggttatgggatgcttcctgggctccggaacatctgtgccaaaaactggaggacccatcctcggctccagccagacgcttggggtgctatgtattctgaaccatagcactaggttggaaaatttggctcctaatctatactctgccatgtacagatcacaaaatatcatacaaggagccttaaaaggtcatctaacctaaatccagtttcccaaggagaacactggggcacaaagaagtgagaggtaactcgcccaaagttatatagctagtcagggacttcctcttcggagacaaaggaaatcagaatagtgatcttctgattcaccgtccctcgacaaacagtccacaaagtgct

SEQ ID NO: 238184 - DNA, 738 bp, Homo Sapiens
  misc_feature (21)..(21): n is a, c, g, or t
  misc_feature (55)..(55): n is a, c, g, or t
aaagactgaaagaatacattntatatctggattttacaaataaagatggctatantaatggaatttgtctgtgccctcgtcgcttctttggtacagatgtctatgtgatctggagctgtggttttcaacatgagtccctgaccagcagtttatcagcatcacctggttgcttgctaggaaggcgggcccagacccactgagtcagaaatgcatcagcaatgtggcttaataagccctcaggtgattttgatttacattcaagtttggaaaccactggctaagaggaagcattctgcccgtgctcttttagttggagtaggtgagtttacctgacccattttttctggctgctgcctggggtgatagggctgtaactccacctgctgccttagcatctggctttttgatggaagagcacctcgcctaaaggatttccagaccctcagagtatactaaactgcagatgaggcccttctctttcagtctaaaagagacctgaagccttcctgctttccctccagagatcaccaccacatctcaagtgtctctagcccagggcttatctgagaagcagaaatctatcccacacagtctgcctgggcatgtgtgctgagaagtggttcccttccttccatataatgtgttcctaatttagcatcaatgacacaatttcagcaagtggttatgtgccagcaagcacttaagaaaaaggtaaagagatggttacttcagggtcaa

SEQ ID NO: 238185 - DNA, 1000 bp, Homo Sapiens
catatcccasggractaaaaaaaattastkracttgtccargytmatkargaawtgcctcrctttgggctgtycwwtttsccmactmacycaakkggaagtkgggaccacsccatagaggtckcctcccactgcagctcccggtgctctcgtgttctgggaaggcctgggtgtgtgcacaaggaggcccggcccagggacttcaccaggggctgggtcacaagggcacagggtgtgtggaaagcgctgtgggggaagagccggtcaccggagagtgagcaggcggaktctccaagctggctgagccagagcagaaggcgaggattcccagccggacggggttctctcaccaacagctgtgatttcatcccgaagtggaagggggtctaaacagaacaggctgagagaggcgggactgggtcaagtgggtggagctcctccttgcatgactgcaactgtcggggctttccgccggctcacagcagttggggccagcggggagaagagaggcggaactgctgtgtcctcatgtggcgcagcctcaaactggcatccaggcactgggcccgtgcagagaaggcacctgcagagagcagggcagcccggcgcaggggcatgcgcctagaatcccagctactcggaaggccaaggcaggaggaccgcttgagtccagggattcaaggccaacctgggcaatagagcgagaccctgtctcttaaaaaacgatgatgatgaacacagaggacggggcactgtgctgggagccagggggcctgggaggagccgagaccagccttttacctcggggttttgaggccaacagggacgacagagacagtttctagttagagccttggctccatttttggatgatttagccccgagttcctgagtctattttatgccccttacgtactttgatagaactaaggaaatagtggttttgagtgaagggaaaggaaacccagaaacattttacgttgcttttacttctgtagtgt

SEQ ID NO: 238186 - DNA, 1000 bp, Homo Sapiens
caaarsttgtcttatctgggctacacgtccrattgctscctgcctcagtgctgtgtttgctgagcccccytccccaarwkggtatgacctgaccatcgggacgtcagagcgcggctcagwtgtgcttctccccagcttcccaacttcaggcatkctcttgtgktgtkcggggcctccagggtctggaagctggagcggatgctgaccccaacctggaggtggctgaacccagtgtcctctttgacctgtacgtcaatacctgtcctggccagggtagccgtaccatccgcacggaggaagccatcctcatctccctggccgccctgcagcctggcctcatccaggcggtgcccggcacacctgaaagttctaaggggccgaggacatcagtgaagcagcagtgaaaccaggggctctgcaggtcacttgggacggacgccaccagacttgtctccaaaaatcaccacctttaatactccccggcctgcacacacccacagtctcactgggctccaccctcacttactgcccgccgtgatggccttgaggctgcctgcccgcgccaggatgtttggcacaaagagcagccccgaagcccgctcaatgctctcgatgggcaccaggaagcgctccagtgggatggcctcatccacaggtgcgttgggcatcacgtaggtgcggagctcaatttgcccacctgctgcctccaggatcagcaccttgaagaagtgtgtgggcactgccacgtggttcttgccgatgacctggtactttacgtaggatttcccatcagcctctgtcctgtgggcagacccaggcacacgtgggcagggggcctggatgaacccaaagccacctcttccaggcagccttccctgatctgtcctctaacttctgtcaacctgcaggaccacgccctcactgtgagacttctgtagcctgcctggctcctccttgaggctggaactctctccagggtggttaactctttccctctgtt

SEQ ID NO: 238187 - DNA, 534 bp, Homo Sapiens
tgcctttgggagccacctggaatgtgccagctgcagtagccgttccttccacgcccccccccatgctgtctgtggggcttgccactgagtgctccatctccccatgtgctccatcccccggcatctgctgccattggtcctgcctgttgcgttacttctctgtgccctggagcccctcaagcacagaggcctcgaaaggttgatcagacatcctcagcacctggagcggggcctggcacacaagacggcaatgaacggccaaccctagaagttcaccccacaagacctgcagggcgggggctgagtgtccgagaagcctcttgggaagggatggtcttagacctagtggtgtcttcccattctgcagaggcctagggatgtccccaggtccccagagtgggaggggaagggtcagaagtccatggaaataaaacacagggccagctacaaaatttgtggggcccagtgcaaaatgaagatgcaagttcccttgttcaaaaagcagtaaaaaaaaaaacacaaaagttttttcaa

SEQ ID NO: 238188 - DNA, 458 bp, Homo Sapiens
cggcatcatcactcccaccaactggactgctggccggtagcaaaagaccagctggaaatttcataaaaggttagacaatccacagttactcagtgttacgcaacaggtctctgcagcacagagcacgaactggggagtcaggatgctggagtccagccctgcctctctgcggattccctgcttgaccttgggaaagcctcttggggtctcggggcatagggcaggactgagacgttgagaccccaagtgcaaagaagacacatttctcctaccacgagtaatcaaaaacactatgaaactgtaatatgggccgggtgcggtggctcacgcctgtaatcacactttcggaggccgaggagattgagcccaggagttgaagaccagcctgggcaacataggcagatcccatctcattttgttaatataaaatttttaaataataataaagctgtaatata

SEQ ID NO: 238189 - DNA, 835 bp, Homo Sapiens
ggccaccaagtcccagtggtctggagcaaaaggaagattttcaccggggaagagcagatagactgctggtttgccaggaacaatgccgccaaactgattgacggggagtacaaggattacctggcatcccatccatttgacacagggatgacacttggccagggaatgtccagggagctctgaagctggcagccttaaagatgcaagtgcatgaaggacagtgatgtggggaggccgtggggcagctcttttcatggcttgtacacgcctcagctcctggcaattagctggactccatgacccacccctggtgcagcatagatccgacgtctgtctgggcgaagggtaggggtgggtaggggcgggaagcctgagtgcaaatgtcatttccctctactgcctcttcctgcctctccccaccctgcccacatccacagaggggagagaagggtcatagctaaatgcaacaaagtctgtatcttgtcccaacctgcttttctgttctgttagcatatcataaagtaagcctttctggtgaaggaaggttgctatgaaactttttttcttggtggaaatggccaagtttaggcactctgctttttgccttacactaatgcttagaaagctgtcttttcagtggtgttgcagcccccagatgtgtggccaacctctgctgcaaaggaatctcttgctgagtccaggccaccaatcaggcaaatagcccatacatttgatcgttgtaaaccatgaagtcttttcttgcaagacgtttttcttctgctgtggtatcttgcccttaaaaattagttttcattaaaaagaaattgattgaaaa

SEQ ID NO: 238190 - DNA, 923 bp, Homo Sapiens
  misc_feature (233)..(233): n is a, c, g, or t
  misc_feature (244)..(244): n is a, c, g, or t
tatccgggctgtgggaagggaatgcgcaataactcttgttagcaagggaagtattgtcaaacgtggcattgtgcaaaagcctttgaaaaaaaaaaagaagattgccaaagtcttcgctttgccaagtagaatccggaaaaatcggaagaagcaattttaaacattcttaataggtcatcctgttgtctttatggcttatttgcctttatggttgtatctgaggaataatatgncagcatgaggnaacaatccattggtgatttattcaccagtttttattaatacaagtcactttttaaaaaatttggatttttttatatataactagctgctattcaaatgtgagtctaccatttttaatttatggttcaactgtttgtgagactgaattcttgcaatgcataagatataaaagcaaatatgactcactcatttcttggggtcgtattcctgatttcagaagaggatcataactgaaacaacataagacaatataatcatgtgcttttaacatatttgagaataaaaaggactagcaaataaaactcattttgcatttaaaagttggattatattttagtcccaagaagacaaagtcgcagattaacaacactttaaaaatattactcccattttattgtgttagattgcagtacaatgaatgaataaggggatttatttaaaagatcttaactttcttgactgatttaaaaagctaatcaatttattaaagccagaaatgttctcctctgggaaagcaatttctatctatttatctaccaatccccactcacatgtatatgtttgtgtttacatagagatagatggttttaagggttttcctattgttaaattatttcctaagacattggggttgagaccactaaacttataaaaaaccaaggaaagtaaagtttttcaaa

SEQ ID NO: 238191 - DNA, 687 bp, Homo Sapiens
ggtgcatcatgggttatatacagcaatagatcgagaagcgaacactgatgaaggggtcaacaaatcgggacactaattagatgtgggtcaagtgaaagcatccgggaaaaatccttcccatttcaaatgggtgggaacggtaccaaagggggggcgagcatgacgtacatgcggttgggacggacgcgaagaaagagctttatgctggtacatttccctgaacatcattcgcaattacaaagtcatggctactgagaatattcctgagaatcccctgaagtatctgtatccaaatattgacaaagaccatgcctttggaaagtattactccaggccaaaggaagcaccagagccaatggaacttgatggccctaaaggaactggatatatcaagactgagttgatttctgtgtctgaagtgtaagtgaacacagaagagtgacatgtttacaaacctcaagccagccttgctcctggctggggcctgttgaagatgcttgtattttacttttccattgtaattgctatcgccatcacagctgaacttgttgagatccccgtgttactgcctatcagcattttactactttaaaaaaaaaaaaaaagccaaaaaccaaatttgtatttaaggtatataaattttcccaaacctgatagcctttccgagagtctaaataaaagggcaaa

SEQ ID NO: 238192 - DNA, 1000 bp, Homo Sapiens
agcaacrgaacaraccyaccacctctacwttctaattgccmyccccatggwgrgcagaactagaaatakctcaacccattggacaagttattctacaaggatatacgtgattccagtgtacaagtcgtggtgtkgctttgctaggatgaatcaacagaaaaatgtgaagctgttattggtcattttaatggaaaatttattaagacaccaccaaggagtttctgcccccacagaacctttattgtgtaagtttgctgatggaggacagaaaaagagacagaacccaaacaaatacatccctaatggaagaccatggcatagagaaggagaggctggaatgacacttacttacgacccaactacagctgctatacagaacggattttatccttcaccatacagtattgctacaaaccgaatgatcactcaaacttctattacaccctatattgcatctcctgtatctgcctaccaggtggcaaaggaaaccagagaaaacaagtatcggggctctgctatcaaggtgcaaagtccttcgtggatgcaacctcaaccatatattctacagcaccctggtgccgtgttaactccctcaatggagcacaccatgtcactacagcccgcatcaatgatcagccctctggcccagcagatgagtcatctgtcactaggcagcaccggaacatacatgcctgcaacgtcagctatgcaaggagcctacttgccacagtatgcacatatgcagacgacagcggttcctgttgaggaggcaagtggtcaacagcaggtggctgtcgagacgtctaatgaccattctccatatacctttcaacctaataagtaactgtgagatgtacagaaaggtgttcttacatgaagaagggtgtgaaggctgaacaatcatggatttttctgatcaattgagctttaggaaattattgacagttttgcamaggttcttgaaaacgttatatataatgaaaacaaataaaaactataa

SEQ ID NO: 238193 - DNA, 947 bp, Homo Sapiens
  misc_feature (915)..(915): n is a, c, g, or t
gggctcawccacacgtccctgaagcccactgagaycctctacctcactgtggcctawtractggtwcctctmcggrcacwtgttggtagatcggctcarmaaaggggaggagattttcttcttctgcttmaattttttgaagcatattacctccgaggagttctctgctctgaagacccagaggaggaagagtttgccagcccgggatggaggcttcaccctggaagacatctgcatgctgagacgaaaggaccgtgrcagcaccaccagccttgrcagcgacttcwccctggtcatggagagttccccaggagccactgggagcttcacctatgaggccgtggagctggtcccagcaggagcgccaactcaggcagcttgcttgcagccctgagtgatcgagagactcggctgcaggaggtgcgctcagccttcttggctgcgtacagcagcacagtggggcttcgggcagtagcccccagtccttccggtgccatcgggggcctgctggagcaatttgcccgtggtgttggactccggagcatcagcagcaatgccttgtgaagaagccagcccatgacattttcctgctcctctctcagctgagcccttagcagagaatcaaagccatgcctggccgaaggggtacttccaggtcaggggaaatttcagtcccccatctccatcatgaacatggcagccccaaagctgagcaaggccaaagacagggttttccaacccccagcctcttgactggtgaccaccaccccttcttgtcactgtctcccacccaccccatctttgctgggattcccatcaactctcagaactgtgtggggtttccctggggccttgtggaagccatgacttcacaaagaccctacctgtcagttcttgtttctggggaggagggancacctgcactgagaatgaggcagtttgacaca

SEQ ID NO: 238194 - DNA, 889 bp, Homo Sapiens
  misc_feature (103)..(103): n is a, c, g, or t
gcggcgaatgggccgaggcatgagagtgaggctttccgccgcccattggtgacccttcagggcaggcagcctcagcaacgcccctggtggacaggatggtcgncaaagcagcctgagtatttttgtggacggaatcggaacacgctggctccatatcgtgaaatttttattaatttttttctttttcctttgttacttctttatcttttcctttcttcagactccgtccaaggagatgctctccccggtcttctgctgcaatttagattcctttcccttctctccagttctccttcccttaccaaggagaggggagcaaatggttttgggcaagggctttggccattcatgtcaagctggttgtgggtttttcaaggtgccatagccacccccaaatatgtttgtttaaagcgtggggttttttaatctctgccacccttgtcaagggagtcttgtaaagttgccgagggtaggttcatctccaggtttcgggattcccatccgtcctggcgatcctgccagcagtgggtgggcagcctgagctccctcgggctcgcctgccagcctggagttcttcctgtgctccttgatcacctgagctgcctcagattccatttggtcctctccttcctggaaggcttccttttatgttttgttttaatcccaaatgtctgaatgttttgcagtgtgtaggggtttgagccccttgttcattctccttcctttttcctcccgcttccctctccatgaagtgattctgttgacaataatgtatactgcgcgttctcttcactggtttatctgcagaaatttctctgggcttttttcggtgttagattcaaccctgcgctaaagcggggatgttccataaataaaagagcagtggggt

SEQ ID NO: 238195 - DNA, 868 bp, Homo Sapiens
aaaatgaggggcttctggccagcaattgactgtttaagaatcccttccagacccacatggtgggggaaataaagcaagaggctttcttgagcaacccggccgaacagattaagtaaaagaacttctgtttgatgccatggcaagatattccgttagtagggaaccctctgttaaatcacttatgtgatgttcataagggaattgcagaactcttagtgaatgggaagccggaaatagctttagaagctacccagctccttctaaagcttttagatttccaaaatagagaagaatttagaaggctactgtatttcatggctgttgcagcaaatccttctgagtttaaattacagaaagaaagtgacaaccgaatggttgtgaaaaggatattctcaaaagctattgttgacaataaaaatttatccaaaggcaaaacagatcttctggtactctttttaatggatcatcagaaagatgtttttaagattcctggaactctacataaaattgtaagtgttaagcttatggccatacagaacggaagagatccaaatagagatgcaggatatatttattgccagagaattgatcaacgtgactattccaacaatacagagaagacaaccaaagatgagctgttgaatttactaaaaactcttgatgaggattcaaaactttctgccaaagagaagaaaaaattgctaggtcaattctataagtgtcacccagacatctttattgagcattttggagactgagtttttaatatctgtatataagttgtgtattttaagaataaattatgtatcctaaatatccaatcacatttgtaagtgggaagctctaaatttaaaccgacctaataaaa

SEQ ID NO: 238196 - DNA, 708 bp, Homo Sapiens
tgtgcctatagtggaaagcacacgttttcctaggggtatctatcctttattcaaaccgggaagcatcggttggcaacagcagcaagcatccttcatgaaacgggcagcatccgtagtcacaacggccagcatcttttgccacagcggcagcatctgtcgtcacagcgggcatcatcctttgccatagcggcagcatccttcgccaaagcggcagcatccttcgtcatagcggcagcatcctttgccatagcggcaaggtggaaaccctgtccatccactgaggcgtgcatagactaaacatggccagtccaggcactggaatccaggccgtagaacggcgcccacggtcaaaaggaatgagaccctgatgcactgggcgacacagacgggcgacacagacttggagacatcatgctaagtgaaaagccaggcacacggagcggacggcgtgatcctgctcacgtgatgtgtcccgaatgggcacgtccagagggaagaagggagatggcgctgccggtgcccgggacgggggttgggagcgacggttgctggtttggggtttctttctggggtgaggaagtgttttgatattggccgttggtgatgtttgcatacctctgaatatgctaagacccacagaattgcacactttaaatggatgaattgtatggtatgggaattacaccaattatggtctcattaaagcag

SEQ ID NO: 238197 - DNA, 930 bp, Homo Sapiens
  misc_feature (913)..(914): n is a, c, g, or t
  misc_feature (916)..(916): n is a, c, g, or t
acagaggagactgacagaggaatyccagaatgtaaggatcatcaaacctgargccagcaggaaagagtcatcagaagtgtacttcttggccacacagtaccacggaaggaagggcactggtgaagcagtgaggatttcttgtgccattttcataatggtcattagctccttttaagctagaaacgtagcctgagctcctgaagagttcctgggagatttgagctgattttggagatggagcaggacaagtggggagtctctctctctctttctctctctctctttttaaccaaaaagagatgacaaaactaagttcaggggccatggaaaatgaaaaagtccgctatattgtgatttgggaagagaaagttatcaagagaaagaggtgaggatggaaggatggagaaaaacagactgtgggaaggatcagaaggaatccgccgaggcagggatgggtgtgcccatgtgtgccttgacgggacttcatcttatagactgttaaactgtcacacacaaacaggctttccacccctgctctgagagcaccacgcacagatttccagttcttagtgtggctgtttaaagtagaaaatctgggggctgggtgaggccactcatgcctgtaaacccagggctttagaaggctgaggctgggggattgcttgaagtcaggagttcaagaccaacctgggcaacatagcaacaccccccatgtctacaataatgaaaaaccaaaaagcaaaccaaaagaaaaatctgaaatttccatctggggattaacttctgtctttctggtgaacaatatagcaattcacgcattcttcaagcagcaaaagttcccggaacaattagggaagacgtcccctctgaatttatccaggcagtgggtctgctttggtttttgctgaaattnntntcgtgtctggctcc

SEQ ID NO: 238198 - DNA, 729 bp, Homo Sapiens
  misc_feature (698)..(698): n is a, c, g, or t
  misc_feature (726)..(728): n is a, c, g, or t
tccagaagtcactttggagtttggacctcagcaagaacaaaatcaaggcactccctgtgcagttttgccagctccaggaacttaagaatttaaaacttgacgataatgaattgattcaatttccttgcaagataggacaactaataaaccttcgctttttgtcagcagctcgaaataagcttccatttttgcctagtgaatttagaaatttatcccttgaatacttggatctttttggaaatacttttgaacaaccaaaagtccttccagtaataaagctgcaagcaccattaactttattggaatcttctgcacgaaccatattacataataggattccatatggctctcatatcattccattccatctctgccaagatttggataccgcaaaaatttgtgtttgtggaagattctgtctgaactctttcattcaaggaactactaccatgaatctgcattctgttgcccacactgtggtcttagtagataatttgggtggtactgaagcacctattatctcttatttctgttctctaggctgttatgttaattcctctgatatgttaaagtaatgggtgagaccagaaaaagaaatttcaataacagatcagtttggggtgcatgtatgattttgcagcgtcaaattggagtaagggaagatttctgtatacttgctggagaggaggaatgtgtantagttactcgatttagatkattttaaannnt

SEQ ID NO: 238199 - DNA, 855 bp, Homo Sapiens
  misc_feature (782)..(782): n is a, c, g, or t
  misc_feature (827)..(827): n is a, c, g, or t
tgctccaggccgaaaccgaggtgtggacctccaggagaacaacccagccagccggagccagtgctgcagcaactgagcccccctwgcctgcccgctgcccccgcctcctccgcctgaatgacccgactggaatccactctaaccaatcgcacttaacgactcgggccaccactgggggggcagggggaggggtccaccatgatttctccatataattttgatcataggccggagtgagtcattccacctgcacctttctgtacaaatactaattcaattttaagtcttaagtcacthwwttaatatatatgatcttctgctcttcccacttcctcccctttctactgctctcccattttcccttgctgggagtagccacatgctcttgccccccaacccttgtatatggggacagtggggtcagtgcagctaccctttctttccctctgcggaacagcggacccagcaagagcatccacatcctcactttgttcggagtggtctttggtttgggcggtggggcagaccttgggaaggggcttaggaagggagaggcagctcttccttcagctggctctcatcaggctgcagccccctccccgctcccacctccctgctgggaaaccacagcattatcacagcattattgtgacagccacgaacccattgcccacaacccctccaccctcggtcaccccaacctctggctctgagccctgttctgaccaaatcatgatgatgagtatttgggggtgggtgkgtaagggggggagtgggagggnacggaaccaactttttctgtattttgtattgtatgttttcttcanacatgtaaccaatcagtatcttgtcmat

SEQ ID NO: 238200 - DNA, 575 bp, Homo Sapiens
  misc_feature (107)..(107): n is a, c, g, or t
  misc_feature (560)..(562): n is a, c, g, or t
  misc_feature (572)..(573): n is a, c, g, or t
ctcatcctcttcttagtgctgtgacggcggggcctctgggtgcgagttcctcctgcatatgaaccgaggggaggaggagaagctgagcacgtgtgacattgccgtcnactcacattcctatcctggaaacatactgctgcactgacttttctccgtgtgaccccacaattgacatggctcctccatcccagcgctggaagggccagtgggaagaggaaatagatgtctgcactcctggctgcagctggacaacagaagccccatgccgcctgtccagttcggaggagaactagctgctgccttgccttccgggacctcgtttgctgaggagggacttacagactccactggtgttttgctgttgctcattccatgcatctttggcagctcttttcttctgctcagacccttccccgtgctcagacagtgcaccgctgtcccatctaaagaaacctgtcaggaatacgagcttctgggtatgtttcgtttcccattgctgtagcatttcttatcccctgagagctgatgattattgaggacagaaggctcagaaacagtcnnncacmcmaaannca

SEQ ID NO: 238201 - DNA, 915 bp, Homo Sapiens
ccaagattttatgattgccattttcgaaggtaaaatggacctggaaaaaggcagtcaaaggttgattccaggaggatacttaacttaaatcaaggacagtgcccaaagaattggaaggatagtccccaggtaaaatgtcagtgtcccagagatcagtaacccatgtgatgatccaacaagtgaagctaaaagtgttcctaaacccaaaggaaagcaaaccaaagatatgaaaaaacctgtcagagtacttgctgaaccacaaacaatgagtgttcttatcagctgtacaacctgccatagtgaatttccatctcggaataaactttttgaccatctaaaggccacaggtcatgcaagagcaccttcatcatcgtctttaaacagcgcaacaagtagtcaaagcaagaaagagaaacgtaaaaacagatagagattctgcctgtgcttttgtttgactgtctctagattttgaaaccaaaaaactgaactgaaatcatctaaagagttaaaatttcagtgatctgcaattaattacattgtggaagattattttttatcttgtaaaaacacttttttggtttaatatatatttttaaaacatttcactagtgattgaattctacttttgccatctgaattgacttgaatgtcttaaaacaggtaaatactgtaaagtgtgtattcttgatgtttattggctcatgtggacagaaatgtacagggagaattacattattttaacacacagaagtgcaactttctgctttattttctgaatttcacattacttttacttaatgcttttgtgttttgttaatacttcataatatgtgaaaaactcggatcttttaaaaagcatcatagatcatttttccatatacacggttccgattttaaaaattattttaaataacc

SEQ ID NO: 238202 - DNA, 1000 bp, Homo Sapiens
agcagcatttgccagagagttgttcaakkwttatakttctkksccagcctaccctgaaractgggatgttcagatktcacatttktgacargctgtctgtcggaataatkgctcttctcttaccacatgcccaactggttkgcaccacaaaatacgtaaagcctctggtacagaagctgtgcagtcatgaacaaatgatgtgcagcaagacctgttataactcagtgaacattgcctttctaattgatggctccagcagtgttggagatagcaatttccgcctcatgcttgaatttgtttccaacatagccaagacttttgaaatctcggacattggtgccaagatagctgctgtacagtttacttatgatcagcgcacggagttcagtttcactgactatagcaccaaagagaatgtcctagctgtcatcagaaacatccgctatatgagtggtggaacagctactggtgatgccatttccttcactgttagaaatgtgtttggccctataagggagagccccaacaagaacttcctagtaattgtcacagatgggcagtcctatgatgatgtccaaggccctgcagctgctgcacatgatgcaggaatcactatcttctctgttggtgtggcttgggcmcctctggatgacctgaaagatatggcttctaaaccgaaggagtctcatgctttcttcacaagagagttcacaggattagaaccaattgtktctgatgtcatcagaggcatttgtagagatttcttagaatcccagcaataatggtaacattttgacaactgaaagaaaaagtacaaggggatccagtgtgtaaattgtattctcataatactgaaatgctttagcatactagaatcagatacaaaactattaagtatgtcmacagccatttaggcaaataagcactcctttaaagccgctgccttctggttacaatttacagtgtactttgttaaaaacactgctgaggcttcataatc

SEQ ID NO: 238203 - DNA, 907 bp, Homo Sapiens
  misc_feature (98)..(98): n is a, c, g, or t
gacattctggaacccctggatgaggccagcctgctgcccatctatgcagtccctgtttccatgggctctgggccttcatcacagctggagggtccctncgaagtattcagcgcagcttcttgtgccgacggcaggagaacagtcgggtgatggtgtattctgccctgcgcatcccacccgaggactgagggaacctaggggggacccctgggcctggggtgccctcctgatgtcctcgccctgtatttctccatctccagttctggacagtgcaggttgccaagaaaagggacctagtttagccattgccctggagatgaaattaatggaggctcaaggatagatgagctctgagtttctcagtactccctcaagactggacatcttggtctttttctcaggcctgagggggaaccatttttggtgtgataaataccctaaactgcctttttttcttttttgaggtggggggagggaggaggtatattggaactcttctaacctccttgggctatattttctctcctcgagttgctcctcatggctgggctcatttcggtccctttctccttggtcccagaccttgggggaaaggaaggaagtgcatgtttgggaactggcattactggaactaatggttttaacctccttaaccaccagcatccctcctctccccaaggtgaagtggagggtgctgtggtgagctggccactccagagctgcagtgccactggaggagtcagactaccatgacatcgtagggaaggaggggagatttttttgtagtttttaattggggtgtgggaggggcggggaggttttctataaactgtatcattttctgctgagggtggagtgtcccatccttttaatcaaggtattggtatttgactaaaaaaaagaattt

SEQ ID NO: 238204 - DNA, 817 bp, Homo Sapiens
ccggctagaatttcctcaaggctgaatggattgactcccagaattcggaaaaaaaactgagtcccacaaagctctgtctgatctggagctcgcagcccagtcaataatcttcatttttgctggctatgaaaccaccagcagtgttctttccttcactttatatgaactggccactcaccctgatgtccagcagaaactgcaaaaggagattgatgcagttttgcccaataaggcaccacctacctatgatgccgtggtacagatggagtaccttgacatggtggtgaatgaaacactcagattattcccagttgctattagacttgagaggacttgcaagaaagatgttgaaatcaatggggtattcattcccaaagggtcaatggtggtgattccaacttatgctcttcaccatgacccaaagtactggacagagcctgaggagttccgccctgaaaggttcagtaagaagaaggacagcatagatccttacatatacacaccctttggaactggacccagaaactgcattggcatgaggtttgctctcatgaacatgaaacttgctctaatcagagtccttcagaacttctccttcaaaccttgtaaagaaacacagatccccttgaaattagacacgcaaggacttcttcaaccagaaaaacccattgttctaaaggtggattcaagagatggaaccctaagtggagaatgagttattctaaggacttctactttggtcttcaagaaagctgtgccccagaacaccagagatttcaacttagtcaataaaaccttaaataaagagggcttaatc

SEQ ID NO: 238205 - DNA, 869 bp, Homo Sapiens
  misc_feature (227)..(227): n is a, c, g, or t
ggcagaccgcttgcgagctgtggcctggacctggcgctgcaggaagcgggcaacgccgaggcaccggtggtgctggaggcggcgctggccacgctgctggccgtagtggcgcggctcgggcccgacgcggcgcggggacccgcggacccggtgctgctgcaggcccaggtgcaggagggcttcggctcgctgcggcgctgctacgcgcggggcgccgggccgcaccnccgccaacccgccttccagggcctctttctgctctataacctgggctcggtggaagccctgcatgaggttctacagctgcctgctgccctgcgcgcctgcccgcccctccgcaaggccttggcggtagatgctgccttccgagagggcaatgctgcccgcctgttccgtctgctccagaccctgccctacctgccaagttgcgctgtgcagtgccatgtgggccatgcccgccgggaagccctggcccgcttcgctcgtgcctttagcacccccaagggccagaccttgcctctgggcttcatggtcaacctcttggccctggatggactcagggaagcacgggacctgtgccaggcccacgggctgcccttggacggagaggagagagttgtgttcctgaggggtcgctacgtggaggaagggctaccgcctgccagtacgtgcaaggtgttagtggagagcaaacttcgaggacgtaccctggaggaggtggtcatggcagaggaggaagatgagggcacggacagacctgggtccccagcctgaggagggagcgtgagcctcccagagccccaggactgggccagagcacttaggtttctttttccatggtttccaggtaataaaaggaactgttttgt

SEQ ID NO: 238206 - DNA, 866 bp, Homo Sapiens
  misc_feature (10)..(10): n is a, c, g, or t
tgtctagggntcggaagggggaaaccccaaagggtgacccctttgccgttttgcgaagtgacctccaaaagggccaagaagggtgggaaccaagcggtaatttcctgacggggtgcaaaaccctgcgttccagtaaggcctgggatcatggcatttggctcagatcttggaaagccaccgggacttctcaaacgcagtgcagtcaccaattgagtaccagagacgggagaggcaggacaacagcctggggcggccaagagggcctggagtggggagccctggaagaattcggcttggagatcaggcccagggcagcacacacacacccatcaatggctctctcccctctctgctgctgtcacccaaaggggaggtggccagagccctcttgccactggataaacaggcccttggtgacatcccccaggctccccatgactctcctccagtctctccaactccaaaaacccctccctgccaagccagacttgccaagctggatgaagatgagctgtaactggtgaaaaccatgggggtggtgctgactcagccgcctattccccaaggagcttcagggcagtccttctggcactgctccagaattcctccttcttggtgtgtctggagggtgggcaaggctgggagggatatcaacttggaggagaacacctagacccaaggacttttttctgcccaaggaacacagtttccttcagctcccatccctatgcatgcatcatggtccccccaaaaggaggatatgtgggtgggtgggagggctggggcaggggccagatagaaattattggttttgttttttaattttgtttttcctgttttctagaaataaagggtttgttaatcac

SEQ ID NO: 238207 - DNA, 921 bp, Homo Sapiens
tgtcgaaaaagcctaagaaagcttttagaaaaagggctttctaaaatatgagaatatgaaaaaaaaaaacccataaggtgtatttagaccgttataattcattaaatatctttggcctataggtcccccttgaagccattagccattgataatttacctgtttaaatggccccagtttgaactcacaagctttaaggacctacatgttattccaaaagagaaacgtttaaagtgccaagtttccctttggaatgatctctgttgatggcactctggaattgtttcagttaagtcattttaaacatagcatttattatcactgtggatctctacttgttgggtgttatgaattctttgaagaaatatattttgaagaggtgtgggaggaaggaatacattttataaaatgttgtagtgaagcccacaattgacctttgactaataggagttttaagtatgttaaaaatctatactggacagttacaagaaattaccggagaaaagcttgtgagctcaccaaacaaggatttcagtgtagattttgtctttcttgaacttaaagaaacaaatgacaaagtttgaatggaaaagcctgctgttgttccacatctcgttgctgtttacattcctttgtggagcctacatcttcctaagctttttagcaggtatatgttgaacacttctgtttcatggttgagacagaatcagaggccatggatactgacaactgatttgtctgttttttttctctgtctttttccatgactcttatatactgcctcatcttgatttataagcaaaacctggaaaacctacaaaataagtgctgtggtttatctagaaaaatacggaaaataccgctgttacttttggtgaagaaaatcaagtttgtatagtttatctcatataacaagaaagtga

SEQ ID NO: 238208 - DNA, 888 bp, Homo Sapiens
gaaacccccggaagtcacccgccaatgtagtcctgcctccagaaaacaatgggggaaccatgtccataaaaatcattcacaaagcaaaagaaattagggcaacaagtatccacagggactcggatttggggggtgaaaagattatattgctgaaaaaccacttcctacatggaaaaaaaagtttttaaaagaagaagagggccgaggggacctctagcattaccccgtttaagggcccaccatggtgtgaggaagacccatcccctcataccagaactccaaaatggtcacctgcccatggcccctcctattggcagacccctttcctcccatgtacactgcaggggacagaaggggggcccaatcccttacatactccctggccgcctgccctggtggttcccaaggaggggtatgtatgagagccgctctcctgctacctcccaccactgtcccagcagtccctcggcacacaggcatatcagctttcacactttccccatgcactctctcccacccccttccagggcctctgctccaaaggaggcctctggaacccaggactctggggttttacaagagggctggggtgtggaagggcaagctgcaccaaagacggtggatatagccaccgcccccccgccgctgcctagcatctgcttggccaattagttcagcctcagaccatggcactttgagggggtctctacctccccatcaacagctgcagggggaccccagtgccaacttcctctcccactagggccctgccttcagctggtgcttgctgcgattcctgtgccttatgtaactgcccttccttcccttgccctaggaaaaaggctgcatctttatatgttacattccatataaacgtttgtaactttt

SEQ ID NO: 238209 - DNA, 900 bp, Homo Sapiens
  misc_feature (15)..(15): n is a, c, g, or t
ccaggagtagttttnaaattatggtgggaatggggacaaagaacataagggactgtccttcttgaactctggctttgggcccatggaagatggggacaggaaagattgataacagtggaaccctgtggagaatagaagaatggaaattctaaaataccagttcccaaacaaaccatctctccattggaaaaggagctgttgcaaaccgtgttcatttaagcttctgatgaaaagcaatgtatgtttataagcttgcaagtaacagacaagatgttccaaggccgatgaggaaaatatcgcttccctgtctctgcctctaccttgctgtgcctctctggctttagcagcattggatgttgaattggtttggttcatttctctgaagtcggactgtcaggaggagccagaggttggctttctgggatgtgaaggggacagtgtcagcctaagcctctggagatgcttaggatgctgaattttaaccccttctttcactgcatggcccttcaaacagggattggcaggctccgcgagttacagagtgggtgagtcttggagagaaccaacgactaaggtagcttagctctctgctttgttcttgggagccaagagaatgcaagatcctggtgggtgagcagtggtatgaagaggggacactggtgggtgaacagtggcatggaagtcactgatgcagcctctggccctcagtctccctatcggcaaagtggggggctcttcctatctctaaagagtttcatccctgacaggtggatgggtgaaagatccagagagtgggggtgaggggtgggccctgaagactttttgtctgtagctcttgcatattgagtgtataaacccggcttctggaccaacccaagattaataaacggggcagaaaat

SEQ ID NO: 238210 - DNA, 890 bp, Homo Sapiens
  misc_feature (38)..(38): n is a, c, g, or t
ccccaggcccgttaaaggttggaaccggacccccgganaccggttccgagggctttctcttttggcccgggaagtttaaaaaaaaaaaagaagcccctccgtggagggaaaaactgcaaaaacctgcccagtgagatcaagtttgccctaaagggtcgccaggccggacgtaaaaaggttgcttgaagccctagaggagctgggaaccctgcaggtgacctctcagatcctccagaagaacacaagacgtggtggccaccttgaagaagattcgccgttacaaagcgaacaaggacgtaatggagaaggcagcagaagtctatacccggctcaagtcgcgggtcctcggcccaaagatcgaggcggtgcagaaagtgaacaaggctgggatggagaaggagaaggccgaggagaagctggccggggaggagctggccggggaggaggccccccaggagaaggcggaggacaagcccagcaccgatctctcagccccagtgaatggcgaggccacatcacagaagggggagagcgcagaggacaaggagcacgaggagggtcgggactcggaggaggggccaaggtgtggctcctctgaagacctgcacgacgtacgggagggtcccgacctggacaggcctgggagcgaccggcaggagcgcgagagggcacggggggactcggaggccctggacgaggagagctgagccgcgggcagccaggcccagcccccgcccgagctcaggctgcccctctccttccccggctcgcaggagagcagagcagagaactgtggggaacgctgtgctgtttgtatttgttcccttgggtttttttttcctgcctaatttctgtgatttccaaccaacataaagactatgacggttttt

SEQ ID NO: 238211 - DNA, 686 bp, Homo Sapiens
tttgaaaracacacgttattttattaatatagccatctctccccactgccccagtggtgaaggtgtttgcattgcaacatggaggggcaccaaatgctctgcgggccctagcccgctgccacaggctaggcctgcctgcagccaagaaggctgctcaaactctagatgccatttggaggcatgaggacctgagcccagaggtggcagtgtcctacccagggaagtcaacagatcgtgctccaggtcccagctctgggctgggccaggactaaatcctggctcccctttcttggtactaaggggattagtgcttggttgtctgtagggggtcagagtagggagggttccaggaagggttccagagtgggctcacaggggacctcctcccctggcctcttggagtccaggtcgtcgagggcgcaaagctgcacgccatcctgggcaagctgggcccgcagcgtgggcgcggtgaggacgcgcagctcatgcagccgctcccaagagcaagagaaagcgtcggggccttcaccgcagccgccggtgggaggcacactggggtagccggggtgcgccatcagctcggctgtcagggtgtggcccgctagggtaccttccaggacccgcgccagggccccggacacgcggtgagcggacatgtgccggccgcaggtgctcaatcccgggaa

SEQ ID NO: 238212 - DNA, 893 bp, Homo Sapiens
cccccctcctaactttattggggcccaacatattgttgcgattgtttgtgaaacttccagaaatcctggaaaagatgtccttctcttagaagaatctgaaggctttattgaagcactttgatctcttttgagttttttagcagaataccacgatgacttcttcccagagcgggcttatgtcgctgcctgtgaggcacattacagcaccaagaacccccgggcaatttattaaaatgttgttggttctgtaagagcaactgctctgtctagtttggcgctctgggttccaggtgaataactaacaaggtggtgggtctttacccacagcgcaaacacaatgcccaccttggggctctgttgtttgagttgcccacatactgcagttattctgttaggaatgattccctgggtgcctgaaagtgctctgacacgacacttgttactttgcaggccatctgtgatggcaaggaaaaagcaactatgttcacagtgaaatattcgtggaataggttaggccatttcagtagacattgcagttagttagcaagaaccacattgtctctttatttgttagcattaaacaaatttttttttgcaaattggttttatttttttgatgaagccgagcaactctgtccaaaaaggtttagtttgtactcggaaaccacaaagtagtctcaaagtattttagagggaatcgatattgatggcaaaagaaaatttgcagctatgcatttgcttctaacggttccctctctgtgaaacattatttttggtgatctaaagaaagcattgcctttcttatttgagattttacagctatactttgttgtgtaatgttatggttccctttctgtaaaaggttatttctgggactctgaatcaagcctgtc

SEQ ID NO: 238213 - DNA, 929 bp, Homo Sapiens
aaaaaawwaawttattcawaactttactcttctttcctttttctattcttattaacattttcaaatactcaataaatktcttycawawtkaataacawaaaatctttttattttkcakataktgatmtytyattyattttcattctggttgaaaaaaatctcagtggcttctcttcattccacgagaattttgatytttaacagcagtctctctytttctcagcatygcaaatatatatgtatatatacattcatgaccaaagtatcgcttactgaccatgcagctgtaaaccttctgtgcctatcaaacaaatacatagcatgaaactaatyttagaagtttcatgggggaattttaggggaaagtataaacctaagagtgagtgaatggagatgattcatggaaaaaaaaataaaaatctaaatgtgctmttaggcagagttattaacttctyttagttgttgtttgagatggggttttgctcttgttgcccaggctggagtgcagtggcgtgatctcgtctmactgcagcctccgcctcccaggttcaagcgattctcctgcctcggccgcccaggtagctgggattacaggcatatgccactacagccggctaattttgtatttttggtagagacggggtttctccatgctggtcaggctggtccccagctcccgacctcaggtgatccgcccacctccgcctcccaaagtgctggaattacaggcctgagccaccgtgcctggccgagttattmacttcttaagagcaatgtgctaataaatactcattgatgaccmgctcamatttaggtcattcagacatccagacactggggcacatattctgcaagmaatgctgagacccctgacatagagaaagcaaaggatatgcctatgattagtctaaaatgcasccmycmccccc

SEQ ID NO: 238214 - DNA, 1000 bp, Homo Sapiens
ttwttttttttwtccrgttgtattwatttgkgtttttmcccatttgagtgrgtgtagacttatatatctgacttaaatccttktcagacacacatatctttctcccaatccatgcctccctattcattctctgtccagagttttttgctaaagatagaattattaatgatacatcaagtagtggaagtgttttgaaaattctttgaagaatgtgagagctacaccttctaccatgaggcttccaaggttgtatttaaatttgactgaatatctggatggctaagaacagacatttatcttacacatggaaaactgacgaaacctataagcctatgtgtttgacagtgaagtatgttttatggacttaaatgccacaaacagttaagtccattggcttggagatgacaagcacgagtttctggtatgtctagtgttctcattcactgattcagtcagtacacagataatcactatagagaacttaagaggctggcttatgttatacctaaatttttactttcttgtatacaacaatgctaaaattgagcagattgataactgccagcaaaccatagatttaagataaatgaatgatttacccaaccctaaaattccatgggtaaaaattttgattcctttattttcaatactgcgttccttataggtctyacatgcatatgcaaggatattttatcttattcattcatttcatactctcaaaacaccaaacttcaaaaagttaattattgtcataatgcattattccatgtgtggtgtcaatacattttagcggacaaagaagaaacatgccagttaaaacatttctgctactgggattctttattaattatttgagaatgttattttgctagttcttaaggttaagtttttcatcaaagactcaggtacctattattgttccctggtgaaactgaggagaaaagttaatcaaccaggttactcccacagtttgcccgtgtgttatgtatcagttatacag

SEQ ID NO: 238215 - DNA, 786 bp, Homo Sapiens
  misc_feature (758)..(758): n is a, c, g, or t
agtgaggtgtccaatggccggtatctcccacacagcctggcactccaaccgtaccctttatgagacctgcattgaaccttggctctcctgaggatatattcagggtccccaggaactcctcggtccagagaccaagtggtggccttggaaagcagatgtcaggctttggtgtgcctgtgaccacctcatggctcccatattatcccccatttttagtagagacggggttttagtagagacttggcctcccagaacccccttcctctgctcctccatgaatgacaattccaggcctcccctacctcatgtcctctcatttgggggattgctccgtgctgtccctttctctcaaggccgaagttgggaagtgagaaaccatgtttttaacttgtggctgcttttgctgctgctgctcctccgtatctggctgtatgggtggagaacccaccccctgcccaccacaggggtctccttccaggccactcaggacatttttagcttctctcctccccatgttcccttttttctctaaagtcccctgacatcagccctcccaactcctaagagggactacccatgagagtggggttctgaggctcccctatggggacagttccgttcttgaagtgtcagtgttggggaatatctgtggcctatgaggcccatctcaggtttggggatcccccagtccctatgatcagtgttggagtacccccctgggagagcctagtttctccsaggccccaggccctcttttnactacctttgaataggtgttatccctgt

SEQ ID NO: 238216 - DNA, 722 bp, Homo Sapiens
tttttttttttatttaaactttttttattttacattctggggaacatgtgcaggatgtgcagatttgttaaacaggtaaatggcaactttccttctttagtgagcaaatctttcagtaagcaaagtacaggtgttctctgtgatatttttatttttgcaatttatgtttaaggagcaaatctatgcaaggtagcatctttctagatctggaaagttgaattctttctatatcacagacctacactcacagttgacatcaccattctagacaaagccataactacaacctaagcacttttatttaaaggaatgttcatcaacatccactctccttggtcttgagccaagcccagaaataacaaggtcagatggtcatgatcaggaagaaagtaaactcagacttgaagaaatatactgtcaaattccccatattccaacctgctgtgcttgattttaatacttcttttattaaggtgattctggtagaatttggctgaggactcctcccaaaatctcttttgccacgtaaatacactccactagtttttcaagataggtttttattaatatatggattttattttctggtgctcaagacaatgtaatgctaaactgacaaatgggaatagtcagagtttttttaggtacagtttaattcttaatataaaaagtaaacagatttataagaaacattctaataaatacatcaccatgatttttaa

SEQ ID NO: 238217 - DNA, 1000 bp, Homo Sapiens
  misc_feature (449)..(449): n is a, c, g, or t
  misc_feature (506)..(506): n is a, c, g, or t
  misc_feature (611)..(611): n is a, c, g, or t
cctgartgctcgraarrccttatkatcgrcagtgactgtggtgcttggggcagtctytacgagawgctccatgcctgccgcccttctacagccaagatgtatcccagatgtatgagaacattctgcaccagccgctacagatccccggaggccgracagtggccgcctgtgacctcctgcaaagccttctccacaaggaccagaggcagcggctgggctccaaagcagactttcttgagattaagaaccatgtattcttcagccccataaactgggatgacctgtaccacaagaggctaactccacccttcaacccaaatgtgacaggacctgctgacttgaagcattttgacccagagttcacccaggaagctgtgtccaagtccattggctgtacccctgacactgtggccagcagctctggggcctcaagtgcattcctgggattntcttatgcgccagaggatgatgacatcttggattgctagaagagaaggacctgtganactactgaggccagctggtattagtaaggaattaccttcagctgctaggaagagcgactcaaactaacaatggcttcaacgagaagcaggtttattttttccagnacataaaagaaaaataatgtttcggagtccaggactggcaggacaggtcatcagatactcagaggctgtatctctgccctgccaaccttgacaaatggcttccaatgttaggtttgctacaagatggttactggagctctmgctgcctattttgtgtttagggaagggaaaatggaggaaaggggagaagagcaaagggcgcttttaaagagctttcccaaaagctccacccaatgacttctgcttccatctcactaaccacccacccctacctggaatggaggctgggagatgtggcttatttgctgggtacgtgactatccctaataacaaaggggttctgacactaagacattaggggagaatgttgggtaggcagccagcactct

SEQ ID NO: 238218 - DNA, 814 bp, Homo Sapiens
  misc_feature (107)..(107): n is a, c, g, or t
tgagggcagaagcctacctgggttcctggggaaccccgagggcccgggcaaccttagcccgaaccttacaagggctttgaagggctcctgctgcccaccgtgaatancaagcctgggtgcaccggcccctgcagtaagcttccagcccctagccctgggaaaagaagcgccctaggctccacggctttgcctttggcccaggtctcccagctcctaagtcccctggccttcctgcccaccccagtaccccccagcttccagagggccggcctggcatcctgggcggcactgcctccctcctggagcccacctccggtgcacttggtctgttccagggcagccctgcccgctggagtgagccctgggtgccggttaaagccctgcccccatctccccttgagctgagcagggtggggaacatcttgcacaggctgcagaccaccttccaagaagccctcgacctttaccgtgtgttggtctccagtggccaggtggacaccgggcagcagcaggcacggactgagctggtctccaccttcctgtggatccacagccagctggaggctgaatgcctggtggggactagtgtggccccagcccaggctctgcccagcccaggacccccgtccccaccgacgctgtaccccctggccagcccagacctgcaggccctgctggaacactactcggagctgctggtgcaggccgtgcggaggaaggcacgggggcactgagggcgcagcccctccaccgcagccctgctgcttctgaggacttaggtattttaagcgaataaactgacagctttgagaaa

SEQ ID NO: 238219 - DNA, 825 bp, Homo Sapiens
gatgcggctggtacaccattgaaatctagacaatggcgcggcgtaacacccctgttgacagcaacggtacccgccaaccacaaccggcctcattaacctatggcctggcaacgggaaaggggcctccacgcttcaggggtagggccaggggcccccacaccaccctcgggtactgagatcaccctggcagaggtgcccctgctgaatgaggtggctccggagccactgctgccagcaggcgaaggctgtgccacccttctcaactttgatgagctgcctgagccgccagccaccttctgtaacccagagaaagtgaaaggggagcccctggctgccccccagaaccccaactctgccctcagcccttgaggagctggagcaagagcaggagccggagccccacctgctaaccaatggcgagaccacccagaaggaggggacccaggccagtgaggggtacttcagtcaatcacaggaggaggagtttgcccaatcggaagagctctgtgccaaggctccgcctcctgtgttctacaacaagcctccagagatcgacatcacatgctgggatgcagacccagttccagaagaggaggagggcttcgagggtggtgattagcggtggcgccagccctaggctacccttgccaaggccgcccacctgcatcagcctctggccagacggcccgccgtgcctgcattcgcagcagctccgcctggcacccactccggattccggccctggctggggacttggccgcttccctacccacagggcctgacttttacagcttttctctttttttaaaaagggtgataggagac

SEQ ID NO: 238220 - DNA, 908 bp, Homo Sapiens
gagaacttgaaaaccgttacaccggcatggttggttccagtggtgatgaaacttgggatctgcaatagaaaacaggagcccctcagaaaggcaaatggcttatgaaccacagggtggctccggatatgattattcctatgcagggggtcgtggctcatatggtgatcttggtggacctattattactacacaagtaactattcccaaaaatttggctggatctattattggcaaaggtggtcagcggattaaacaaatccgtcatgagtcgggagcttcgatcaaaattgatgagcctttagaaggatccgaagatcggatcattaccattacaggaacacaggaccagatacagaatgcacagtatttgctgcagaacagtgtgaagcagtatgcagatgttgaaggattctaatgcaagatattttttcttttttatagtgtgaagcagtattctggaaagtttttctaagactagtgaagaactgaaggagtcctgcatctttttttttttatctgcttctgtttaaaaagccaacattcctctgcttcataggtgttctgcatttgaggtgtagtgaaatctttgctgttcaccagatgtaatgttttagttccttacaaacagggttgggggggggaagggcgtgcaaaaactaacattgaaattttgaaacagcagcagagtgagtggattttatttttcgttattgttggtggtttaaaaaattccccccatgtaattattgtgaacaccttgctttgtggtcactgtaacatttggggggtgggacagggaggaaaagtaacaatagtccacatgtccctggcatctgttcagagcagtgtgcagaatgtaatgctcttgtaagaaacgttttatatttttaaaataaatttagtgaacc

SEQ ID NO: 238221 - DNA, 877 bp, Homo Sapiens
  misc_feature (214)..(214): n is a, c, g, or t
caaccttatccttggagagaattcctccaagggggcccaaaaacgaacccctccgttggtccgcctaattcaagtgcggccccaaccggtcgcaatcagttttaagcggagcgagcccctgacagtttgcagagaaaaacagggcttttcgtgccgtttaagctttgcttgcaagaatgggatgcccggcaatcgttcctgctctcgcggggcnccgggcctggggcatgcgttgcccctgcccggcccggtgactgcgcctccctcctccacctgaccaacgcgacattcctcccctcacgcctggcccggtcccttccagggcaactcccagggatgtggtgacatgcagggttcaagtgttcttggttccaggcacctcccggctcacggggagctcagaggtccatgccgaggagaccaggcaggacctcccgaggctgcgccccggccggcccatgcgttttgtgatcccaagtgactctgtgggaagggtggggacgaggcgtcgggagggtatacagggagcccctcccgtgcatggctgcccccccgttcattttctccaccacagccgcttgcacgtatagatactgtggtcccctttcttttaatatataaattatgtatggtgaagtggagtgtattgtgtaggtcccgtatttaatgcctctgactgcctttgaagcgcagccctctgtggcccgcagccccctgagcctggctgttgtgtggtatttatgctctctttgtctgcctgtttctaaggaaatgcatgtgtgccctgagccgtgatgatcctcccatccgtgttgtgagcacaggcatttgtgtctggtctgtcctccctgtgatggtcggcatttccggtataaaa

SEQ ID NO: 238222 - DNA, 693 bp, Homo Sapiens
agcatggttccgacctttccactaatagactcaagttcccaaaaccagattagaaaacgcatcgtacttaaaaaggtgagtaaagtgttgcctgggcttatggttcctcttcaaatagcattgggagatatttacacacgacttaaaaatcttgttcgaactttcaggttaacaaatagaaatattatacacaaacctgcggaatggactttaattgctatggtgttgctgtcattactgaccccaattcttggcattcagaaacattctcaggaaggtatggtgtttacacggtttctagacaccctccttgaagaattacatctaaaaaatgaagaccttgaaagtctaaccatcatatttagaaccagctgtttaccagagtgatatattccatgaagacaaaatagaagatgaacttctattcaccgtttctggaattctagccgccatgatggtctggtggtgactgataactagttttattccaagacatacctttacctctttaagtttcaatctcccatctcccagtccttcagtccccaactgcagaggatgacctccccagatagaggagaatcattactccaacaagaataaccaagtctttgtatccctagtacaagacatagtatttttattcgaaaatgaatgtttaagtattaaattaaactgaataaatcaagaaaa

SEQ ID NO: 238223 - DNA, 890 bp, Homo Sapiens
taaggcaagcccctttaaagttcgggcaagctggacaaagcctccaaaaggagcatccgtgggttggaatacactgcccctccttaaatcactttgctgttaacagacctgggggtgctgacaccctcagcagtcagcgatgagctcatcaagctctatctgtaacctgtgagcccttttcctgccaaggtgcagcttacgtagttgaggcagggtgagtagctgcttgacaccccagtgagtcaggccaaaactgagatgtgtttaatgaagatttatggagtaaggacttaaaatcatacatcttggagaacctttcttactcatttcagtcccatctaaaaatgtgtcagctattctaaatcccaacttaaattgttcttacggtttctagaaactttccttttcagtttccagaaatacaagttagataattggctacttaactgatgaaagatgagcccaagtccacctgtcttcatcctcccctgcactccagactgatctgcctaaagcacgcgagatgcaggcgaaaagcagccacacccctctgccacaaatgaccaacagctggtcaggacgttacacgcggtgccttgtaagaggcaagaaacacttgccgaatctgcatctggcttccagtggtaagcacattcctcagcaggatcaagccaaacagtaaaaactaccaagagaacacgaggaaggcagaaacgatgtttagcaacagtattctgcatggttcactgcttaagaaaatgccttctggaatatttgtaaactgaaattctgtatgtgtaagagatgtttaaatatgtttgggtcctaaacagctttttaaaattatacttgggaataaattcagcatcttttcaaataaactctataaa

SEQ ID NO: 238224 - DNA, 1000 bp, Homo Sapiens
  misc_feature (999)..(1000): n is a, c, g, or t
aatgkggraagcyttwacaaaagctcccmcgytaattwacackgagwattcacagcagtgwttatgagtgtaccarttgtgtataavtttcgtstgcayctccatactcattcagcaccagaaaktyatctctggagaaaagccttakgagtgcrgcaagtgcgggaagccttcacthcaaagacccamcctcatcaggcactggaaagcccacactggggaaaggccttatgtgtgtagtgagtgcgggagagaattcatccggaaacagacacttgttctgcaccagagggttcatgctggagaaaagctttaagagtgtagcaaatgtgggggaaagtcttaggccaatgcccccgacttactatatggtggggaactagcagtagttaatgagtgcagcagatgcaggaaagcccttcccctggaggctgaaccttacccgccattgggaatttcacaccggacacaggccttagcagtctaagcaatgtgctgtctctgttcagcccaacagctcaccctagagtggaactctgggagcagccattgggagggaaccatcagtaagaagtgaaacttcatagatatggacattcccactggggagattccctgtgagtgccaagtatgtgagatgctttcagcagctgtgttgcactttttaaatggctattggcctttgctggggcaggagccatctgctcctaccatctggcagaatcatactgcgtttaccatttaccccagcatgcttgtgacgggcagacctctcttctctccccagtccctaaaaggtgttgtgagtggtctcacagcccactaggggtcttaatttcctctcttttgatgtaaatggcatggaaataatcagctttgttcaagaggacacagaaggattctgcaaatagcctgcagagacttacctgtgttgattgatttcatatgatgctcgttatggatatatccaatatccaagtcacccagctctggtactgnn

SEQ ID NO: 238225 - DNA, 795 bp, Homo Sapiens
aaaagcttacaagaccctttaaaaaattagttgagaagaagagaagaagaaactcacccagcaggaaagtacaaattcagccgtgcaggagccgagcccaattaatttcattagaggaagaaaaccagcgcaaggaatcctctagttttaagactgaagatggaaaaagtattttatctgccttagacaaaggctctacacatactgcatgctcaggacccatagatgaactattagacatgaaatctgaggaaggtgcttgcctgggaccagtggcagggaccccggaacctgaaggtgctgacaaagatgacctgctgctgttgagtgagatcttcaatgcttcctccttggaagagggcgagttcagcaaagagtgggccgctgtgtttggagacggccaagtgaaggagccagtgcccactatggccctgggagagccagaccccaaggcccagacaggctcaggtttccttccttcgcagcttttagaccaaaatatgaaagacttacaggcctcgctacaagaacctgctaaggctgcctcagacctgactgcctggttcagcctcttcgctgacctcgacccactctcaaatcctgatgctgttgggaaaaccgataaagaacacgaattgctcaatgcatgaatctgtacccttcgggagggcactcacatgccgcccccagcagctcccctgggggctagcagaagtataaagtgatcagtatgctgttttaataattatgtgccattttaataaaataaagaggtcaacggccgctgtttatatt

SEQ ID NO: 238226 - DNA, 1000 bp, Homo Sapiens
tttttartaacmccgcccactttyctyttgttyttytkgaggcaggaaagmacttctccagcggcaagtgaagcccgragscttgttktcccatgccccaagtcctggccytggccatctgcrgcttktgtgccatktctcagaatctmcccaaascccgtgtgggtgatgtggatgcggggtgagcaggagcagcagggcactcagcgaggggacatcttgcccagtgctgatgggacatggtatctccgcgcaaccctggaggtggccgctggggaggcagctgacctgtcctgtcgggtgaagaacagcagtctagagggccaggacatcgtcctctactgggagcatcacagttccgtgggcttcatcatcttggcggtgatagtgccttaacttcttctgataggtcttgcgctttggttcaggaaacgctgtttctgttaagacacaccatgagcctcctcgtcacccttctccttttggggtgagagaccagcagcccaagggctccagacacacctgaacacatcgtgatgatgacgtcctctcaactctytttgtaaaaattttgttattttygcttgtttctgattaatgattgtttgtcaatataagctcaatttaattttgcaggatttgttgttctgacctgggttctgggactttymmmttcaaattttatctccagatggaatggggtcctmgcaacctccacatgttcaactattaatggatcatcaggcctgttttagatatccctmactccagagggccttccctgacttacaagtgggaagcagtctcttcctggtctgaactcccgccacattttagccgtactttgctaactgtgcccctcacttcctcttcttcattgcagttatttagatcccccctttccttctaatttttcagctccttcaacscaaagtacatgtatttttaatatatgcatccctggtgmaggatcttgcctgcatgaaasctgttctcaata

SEQ ID NO: 238227 - DNA, 909 bp, Homo Sapiens
gggagcccctacccgaaaaggccgccccccccgcatggattccccccaaaatggccaagtgacgacccgcccaacccccccgcgaggactggtggcagcctccagcgggaaaagtcccattagggagaaccaggagcgtgggggccctgaccgggaggagaagctcccccgacggccaaaagctggcctgtctgctcttccgacgccagttccccagcaaaggggcgctcatccggcaccagcagctctcagggctccacaagcaaaaccttgagattcaccggcgagcccacttgtcagaaaacgagctagaagcactagagaagaatgacatggagcaaatgaagtaccgggaccgtgcagctgaacgcagagaaaagtatggcatccccgagccgccagagcccaagaggaggaagtacggcggcatatccacagcctctgtagacttcgagcagcctactcgggacgggctgggcagtgacaacattggcagtcggatgctgcaggccatgggctggaaagagggcagcggcctgggccgcaagaagcagggcattgtaacgcctatcgaggcccaaacacgggtgcggggctccggcctgggtgcacggggcagctcctacggggtcacctcaaccgagtcctacaaggagacactgcacaagacaatggtgacccgcttcaacgaggcccagtgagcagcttcaagagcaacttctccacatgttgggtgtccatcctggggcagggaaggacagagtgttggatggctgggacggggccttgctcttgtcggccagcccactccccagccagagagggcttgaccaaatcaaattgaggtggtgacttttgttggaaaattgggctgggatcacgtcctgttttgtataaaagcgtaaaaag

SEQ ID NO: 238228 - DNA, 867 bp, Homo Sapiens
tgaacaaacaggtatttaattcgaatgggggaatatggatggtcagatgagatggtgaacgagcgtgaacgcctacagttgtggaaaaaaaaaacggggaccttttaaagccaccaataaaacaccggaaagatgcctgggggatcactgtccaccagggaagaatatacgtcccttggaggttatgatggtcccacggtccctggacagtgtggagtgttacggacccagatacaaacacctggagggaggtgacccgaatgacatcgggccggagtggggtgggcgtggctgtcaccatggagccctgccggaagcagattgaccagcagaactgtacctgttgaggcacttttgtttcttgggcaaaaatacagtccaatggggagtatcattgtttttgtacaaaaaccgggactaaaagaaaagacagcactgcaaataacccatcttccgggaagggaggccaggatgcctcagtgttaaaatgacatctcaaaagaagtccaaagcgggaatcatgtgcccctcagcggagccccgggagtgtccaagacagcctggctgggaaagggggtgtggaaagagcaggcttccaggagagaggcccccaaaccctctggccgggtaataggcctgggtcccactcacccatgccggcagctgtcaccatgtgatttattcttggatacctgggagggggccaatgggggcctcagggggaggccccctctggaaatgtggttcccagggatgggcctgtacatagaagccaccggatggcacttccccaccggatggacagttattttgttgataagtaaccctgtattttccaaggaaaataaagaacagactaactgggtc

SEQ ID NO: 238229 - DNA, 801 bp, Homo Sapiens
cgcagggagaamgragcggggcgcgrrgccsgaaccgagaccacgcggcggggggcacagcgcaagggggrgggggagcgggccacgcagaggcaagaascggcgcggagaggccagcccgccgggaacgggagagaggcgagcgcaggccctggaacgcaaggccgcagagctggaggaggagctgaaggccctgtctgacctccgcgctgacaaccagcgcctcaaggatgagaatgcagcgttgatccgcgtcatcagcaaactctccaagtgacccggagggactttcccgcacccgtatttatacagctgcttctgccacacgcaccccttcccccgtgtgaacacgagtgacagggctccgggggaagtctcagagaagccatagcccccctgggacctccggactgggaggggagcagagtccccaggagccgagggggccacccgaggccaggatggaggtgggaggccgagccaagcagggggacgttgccagaggggaccagggccagagacgggaccaggaaggaactgaggaccaagaagtgcaaggatcagtagccaggaccagagtggccgcctggaggtccccatctcacgtgtgatgccaccccgtcacccctcccctcctgagcagggatccaagaatgtgccaagagtcccgccagcctcagccaggtgggcctgtatatagggtccatgtgcaatagggagggacgtcttctattttttgctgccccctccccgcccactgtctggggcagggggagaaggtattttcgagataaagcacag

SEQ ID NO: 238230 - DNA, 633 bp, Homo Sapiens
acaggcttmatttcactgcagaaacgggttggctgaagggaacaggccagcgaggtgggctcaggacacccccaacagccaggatgggggcacggcaggatctggcgcccagaagtcagagggaggcccaggaaatttgcgccagttttcctgccttgtggctgcctgaggagccctcactcccagttctgtggtgcccagggtcacccagagttcaagtcagggctgtgccaagcctgagagcccccacaaagacggagcaggcggaatagggtggcagctcacagccctgaacatacaggggattcctgcggccccacatgggcacagccttctcacagcacccctcaacacgcacagcggtgggcttgtgggaggtgctggtggtggcactgtctcagctcctggtggcctctggacgggctctggccctacacgtctgtgctcctggcactgaagatggatgctggggtgggatgggcaggcattgggggccgagagcctgcccccaccccacccagcctctgccttccatgccacatcttctcacgcagcctctggtacttcacctccagaaccttgttcttcaccgactgagggatgtcgggcacgaaccaggcggcgatgagcttg

SEQ ID NO: 238231 - DNA, 892 bp, Homo Sapiens
attggtatttcaattgcggggcttaatggtgaatgtaagactgttatgtaatttatggcgtcagaagtgtttgaatccaagatttgtatcgaatagaccactgcctgggtctcgtcctgtatctctaattggaagcaagacccagataccaacacaacgatatggccggagaccatatggtgttggtctccttattgctggttatgatgatatgggccctcacattttccaaacctgtccatctgctaactattttgactgcagagccatgtccattggagcccgttcccaatcagctcgtacttacttggagagacatatgtctgaatttatggagtgtaatttaaatgaactagttaaacatggtctgcgtgccttaagagagacgcttcctgcagaacaggacctgactacaaagaatgtttccattggaattgttggtaaagacttggagtttacaatctatgatgatgatgatgtgtctccattcctggaaggtcttgaagaaagaccacagagaaaggcacagcctgctcaacctgctgatgaacctgcagaaaaggctgatgaaccaatggaacattaagtgataagccagtctatatatgtattatcaaatatgtaagaatacaggcaccacatactgatgacaataatctatactttgaaccaaaagttgcagagtggtggaatgctatgttttaggaatcagtccagatgtgagttttttccaagcaacctcactgaaacctatataatggaatacatttttctttgaaagggtctgtataatcattttctagaaagtatgggtatctatactaatgtttttatatgaagaacataggtgtctttgggttgtaaagtcaactgtaaaaaaatggttccgccg

SEQ ID NO: 238232 - DNA, 892 bp, Homo Sapiens
ttgaaaaacccagtaaatgtttgtcaagaggccatgaattatagaacccatcctggggggggtaatgccccccaagtcaaaattcttgctgagggcaaaatactgggtttgtgaaagctgttagcccgattttcaatgtatcccaggtagaattcatctgagatcttcaaagttaacattgaggagggtttgggaaaatcccatagtcatctaacttttttcttttaaatcaagctgggtcctctttctcctctccccatctgcccccatccctgctagatgagcttggggcagagggcgaagctgacctgcacccctgatgtggcatatggagccacgggccaccccggtgtcatccctcccaatgccaccctcatctttgacgtggagctgctcaacttagagtgaaggcaggaaggaactcaaggtggctggagatggctgctgctcaccctcctagcctgctctgccactgggacggctcctgcttttggggctcttgatcagtgtgctaacctcactgcctcatggcatcatccattctctctgcccaagttgctctgtatgtgttcgtcagtgttcatgcgaattcttgcttgaggaaacttcggttgcagattgaagcatttcaggttgtgcattttgtgtgatgcatgtagtagcctttcctgatgacagaacacagatctcttgttcgcacaatctacactgccttaccttcacttaaaccacacacacaaggtgctcagacatgaaatgtacatggcgtaccgtacacagagggacttgagccagttacctttgctgtcactttctctcttataaattctgttagctgctcacttaaacaatgtcctctttagaaaaatgtaaaataaaggctcctgtgctt

SEQ ID NO: 238233 - DNA, 426 bp, Homo Sapiens
tgwttmtatatmcmmgagtctgmtgatgattttgtattgttccccccctctcaaaatgcgaccagtaagaagctttacaagatggtctgcatgtgtacaggtgccakcavggagccaaattcgctgagtttcctccycchcccchctgttcattcattcattcattcccttatgctacasgaatttgttgagcttccagtgtgccasgcaagtsgcaaacatttcttgaaaagttcagaagcaaacagtcatcatgagcttgatasccagttacattttgagtgacatatgatatattacctggcatagtgctattttgtgcatttagattgbcccasctgagsccaggcgtagtggcttacacctgtaatctcagcactttmvgaggcyaavgtgggbgakcrcbtgaggwmggagwhsagacca

SEQ ID NO: 238234 - DNA, 872 bp, Homo Sapiens
  misc_feature (850)..(850): n is a, c, g, or t
cagcgaggcgagccctcaagatcaacgggccagcccccctaaattaaacaggcagccagggtcttctttttaacttataagggaccatgttggcggaaaaaaaaaactggtcaagctgaaatcgggacttaaggtgtccggggataacggccgtatcggggccctgactcacaagatcactcacctgtccacactgcaggtggggtttttaaacgtcaagtgcctgaagaccccgtgccacacttcaggacacatttgttacttcgtgagcaagcccggaggctcggagccccctgccgtgttcacaaggtgacaccttgtttgtggctggctgcgggaagttctatgaagggactgcggatgagatgtgtaaagctctgctggaggtcttgggccggctccccccggacacaagagtctactgtggccacgagtacaccatcaacaacctcaagtttgcacgccacgtggagcccggcaatgccgccatccgggagaagctggcctgggccaaggagaagtacagcatcggggagcccacagtgccatccaccctggcagaggagtttacctacaaccccttcatgagagtgagggagaagacggtgcagcagcacgcaggtgagacggacccggtgaccaccatgcgggccgtgcgcagggagaaggaccagttcaagatgccccgggactgaggccgccctgcaccttcagcggatttggggattaggctcttttaggtaactggctttcctgctggtccgtgcgggaaattcagtcttgatttaaccttaattttacagcccttggcttgtgttatcggacgttttaatgcatatttataagaganagtttaacaagtattattccca

SEQ ID NO: 238235 - DNA, 971 bp, Homo Sapiens
  misc_feature (809)..(809): n is a, c, g, or t
cttttttaaaaacmcttcaaaawagcacaaaaccaaaacaamaaaacgaktgcacgattttttcaaactagsccrgykggattccagcttttcttctactagtckgatgttttawaaawcaaaacctggtttyccttctctgacattttttttttgttttkttttttgktttttttttttttttggccaaatctcgtggtgtttcgcagaaaaaatccagaaaatttcaaatgcagttgagtattcttttttaaatgcagattttcaaaacatattttttttcaggtggtcttttttgtgtctggcttgctgagtgtaaaagttgttatctggacgatctgtctctctgctccaaagaaattttggagtgagtggcagtcctgcgccagcctcgcgggacacgtgttgtacataagcctctgcagtgtcctcttgttaatggtggggttttctgctttgtttttatttaagaaaataaacacgacatatttaaagaaggttctttcacctgggagcaaatgaacaatagctaagtgtcttggtatttaaagagtaaattatttgtggctttgctgagtgaaggaaggggagcaaggggtggtgcccctggtcccagcatgccccgcgcctgagactggctggaaatgctctgactcctgtgaaggcacagccagcgttgtggcctgagggaggccctgctgggaccctgatctgggccttcctgtcccagggcctatgggcaactgcgttgaaaggacgttcgccaagggccgtgtgtaaatacgaactgcgccatggagaggagaggnactgccggagcccttgccagatctccctccctctctccgtgcagtagctgtgtgtccgaggtcagtgtgcggaataacagccaaggacgtgaagagatgtacgggggaaagagaagttggggattggatgaaagttttaaggttgtttattttaagaaaata

SEQ ID NO: 238236 - DNA, 707 bp, Homo Sapiens
tcaagggagccgcaaacccactgtggtacccaacgctccagatgggatcaagggctccacagagagctccaacacccccacagaagatgaggacctcaaagtggcgaaaacaggagatcattaagattacagaacagctgattgaagccatcaacaatggggactttgaggcctacacgaagatttgtgatccaggcctcacttcctttgagcctgaggcccttggtaacctcgtggaggggatggatttccataagttttactttgagaatctcctgtccaagaacagcaagcctatccataccaccatcctaaacccacacgtccacgtgattggggaggacgcagcgtgcatcgcctacatccgcctcacccagtacatcgacgggcagggtcggcctcgcaccagccagtcagaagagacccgggtctggcaccgtcgggatggcaagtggctcaatgtccactatcactgctcaggggcccctgccgcaccgctgcagtgagctcagccacaggggctttaggagattccagccggaggtccaaccttcgcagccagtggctctggagggcctgagtgacagcggcagtcctgtttgtttgaggtttaaaacaattcaattacaaaagcggcagcagccaatgcacgcccctgcatgcagccctcccgcccgcccttcgtgtctgtctccgctgtaccgagg

SEQ ID NO: 238237 - DNA, 908 bp, Homo Sapiens
ataagggggcctgttcccaagttcaaaaaggccctatgcctggtggaatccagggtcctggtcccattaataaaggggcaggtggcctcctcaggggacccagacaggtcccaggcattccaggggtgggggatcctggagctggtatgcagggtacaggcatacaaggaacaggcatgcagggagcaggcatacaagtaggagggatgcagggggcaggcatacaaggagtcagtatacaaggaggaggtatacaaggaggaggtatacagggggcaagcaagcaaggtggaagccagcctagcagttttagtcctgggcagagccaggtcactccacaggatcaggagaaggcagctttgatcatgcaggttcttcaactgactgcagatcagattgccatgctgccccctgagcaaaggcagagtatcctgattttaaaggaacaaatccagaaatccactggagcgtcttgaaaggttttagaaaatatttggctgtagtctcaaattttattctgtagcatggagaatgggtgcaaaaagctgacttctgtatccccacacttggattagggtttccctcctcctagaacctaatcttattttttgttctttttctttctttctgttttccttttttttttaattgagggtggggggaggagggagtgcgtctgttcactttaagttactttaaaataactctgaacatgattatattatgccaaataagattacaaagaataagcagcaatattgaagcatctacagtatgttaactacattttttaaatgtcgagtaaaacttcgtgaaaactgctcataaagactaaaagttgacctgttaaaacgttaatgtactaagatagttttaagatttttggttgtataacaaaataaaagttt

SEQ ID NO: 238238 - DNA, 695 bp, Homo Sapiens
aattcccaggctgtgtaaaacatcagaggggttctcactggaggaaagcgttataagtgcaggcaatgtggacagtttttttcacccgccgagcagtctttttaaacatcgaagtattcgcactggacaaatgcaggtgattgtgtgcaatcctttaggcagcgtttcaacctcattcagcagcagagagttctcagtggaagaaatcttgaaggtaccagatggaaatccgttagccacgcctccagtctcattcaacactggacagtttacaatgtggacaatgtagtgaatatggaaaaaggtttcagccaaaggcctaaccctattcaacaccagaaagtttagaatggagaaaggccttagggtgacaggttatgtactgtctctgaatcaatatgacctcacttaaaacagaaactctgaggatggcctttatgagggagctggcaattgaacatcattcatctaaatatgcacactggaggcaagatgagaattcctgacagattgtccttcctgagaagacagccctctgccttggagctccagagagagggagccctgtattcttggctgtacccgtcgaatggagttttgatctcgctgagtttggagttgggggaggaaaggagtggtcttggttcaaatggactcacttttgctgttcttggaatgttgatcttcttaaataa

SEQ ID NO: 238239 - DNA, 687 bp, Homo Sapiens
aaaaaagaagcagcaaggggtaaaatggagtggggaaccccacccgccacccgtcaattagcccctgcctccttcccacactcgttgtcttggcttgtgctttctcctctccccatcggggatccgagactctgccaggattcacatgccactgaagcccactcagtgccctctggtgaccacacataccattcccccggactcccacccagcaggcagctgtgaccgcagaagggcaggatgaagtgggccaaggtttgggacaggttgactgtgtaggtgacagggagggaaagatgatggccaggggaaagagcatcgtataggctaggggattgaactgtggactgattcagtgtaaataaaaacaaattaacaggtagtagttcctgtcagttctgttggaagcagcccactccctcacttttactccttcctccaaccctcaatcagagctacttacagccaggcaggatggggctttccccaaagcaattggccgtttgtccagtggcagacaatggtggctacagcctttgtgcttttaagagtgggctgggattgtggagactgcccaggggcttggctttgtcagaacttgtacaatcttcttttgatgaaattatctgaactcaacatctagcacatagaatgtgttcaacaaatgcttgttgaatagatacatta

SEQ ID NO: 238240 - DNA, 912 bp, Homo Sapiens
aggggcaaacaaggccctcacaggcgagttcctgcaggggcctatctaagaggactttgggggccatcagctgcaatccaaggtctgtcaaactcagcccctaggaaaagaacaggccttgggtctcccctagtcctggccagaaggatgatctcgcttttcctctacaggcctataagaagcaggtacttcagttctaaattctgacttgtgttcttttcgtcttcataaattctaactaaggccactgtgccactgtgcacccttgagtaccattgatccaaagctttcccacagacctccctggcccacctagaggctttcttggtcagtgcctgtcaaggctccagtcctgctgagccaaaggctttgtcattcctttctcttcctgtacatctgagcagacccactccagctttctggtgtcacaggcgggaatgttagttagtaggtagacttagatcccatttctgtcctgctcccaggaagattcttaggtcctcttcaatccagcagcccctcccagaggtgtgatcagcaggatgctgaggaaccatgttgcctttcctgtcaatcacagccaccttcctgttatctcctaaatggatctggcttttcctggaggctgccatggttggaagatggtatcagagggcctgcctgggcagtctgtctccgggccagggtcagggaccctctgcctctggcagccttaacctgtcctctgctaggaccagggtgatttcaagccagggaagcaactgggaccctgaaaactgtccctccccagcccgctccccctctctgtgccctggtccccttgctgccatgtggatgctgttgtgattgctgtttgtatattatcaaaaatgtttgttatattaaaaatgttgtgatcgtgaaagattaaaa

SEQ ID NO: 238241 - DNA, 1000 bp, Homo Sapiens
  misc_feature (969)..(969): n is a, c, g, or t
  misc_feature (976)..(976): n is a, c, g, or t
tacaatkwcctcyccccatgagcgaggacgcaagcgcagtcatcacccgcttwatmacagagaaacgagtcttwaagaactgggcacggacattcaatattcacttttttcaaaccagactggaaaccagaatcacttgctatcaatcatcctgagaataaacctgtgttctaaggaatgagcatgccagactgtaatcccaggtattcactgcatcagacaccgagacactgaacttcctgagccaccagacaggaaagggtagcagaaaacagcttcactcctcaggaagtaccatgsacagacgcctaccaggggtgacaaagcagtgcagttggattgtaaggaaaaattccggaattaatgcatcctaatgaatgttgtccccttcaatggtgttaccttaggagctgaacattcaattcagtaacaccactatgactaaaaacagtttggatctcttagtattgcctttgaaactgcaacataagcaactcaacaatattagttgcattcctttatagacataccatgtcaaagacgtttttctatcaagttgtattctttcctgttctataacctttgtcatctgttagactctgtatgtgtgatttgtaaaaagcaggctgaaactatggacatgatttctgaagagcacatctccactgactttcataaagcaaatgtccaatatttatttattgagagttttttagtgcaatctgggccagtatttttatagattatgattatgtggtaatttatccttcctaactctttaatcctgaatgatggttggaaatggcctagaattaggttactctgttcacaatgctcattgttagcatgcaattggtatttgacttggaagtgttgtgttgtattttttgaacccctaggcttcaggaaaactgctyttttgtaaaaagaatagcgatgacattttctaatgtgcagaaatgttccaanaaggacnaaaattgaaaactcaaaaaatatg

SEQ ID NO: 238242 - DNA, 736 bp, Homo Sapiens
cctttgtgcacggaaggtgtgaccatgaagctcatggatgaggtcgccgggattggggctgcacgccactgcaaaaccaacattgtcacagcttccgtggacgccattaattttcatgacaagatcagaaaaggctgcgtcatcaccatctcgggacgcatgaccttcacgagcaataagtccatggagatcgaggtgttggtggacgccgaccctgttgtggacagctctcagaagcgctaccgggccgccagtgccttcttcacctacgtgtcgctgagccaggaaggcaggtcgctgcctgtgccccagctggtgcccgagaccgaggacgagaagaagcgctttgaggaaggcaaagggcggtacctgcagatgaaggcgaagcgacagggccacgcggagcctcagccctagactccctcctcctgccactggtgcctcgagtagccatggcaacgggcccagtgtccagtcacttagaagttccccccttggccaaaaacccaattcacattgagagctggtgttgtctgaagttttcgtatcacagtgttaacctgtactctctcctgcaaacctacacaccaaagctttatttatatcattccagtatcaatgctacacagtgttgtcccgagcgccgggaggcgttgggcagaaaccctcgggaatgcttccgagcacgctgtagggtatggaagaacccagcaccactaataaagctgctgctggc

SEQ ID NO: 238243 - DNA, 875 bp, Homo Sapiens
ccagggcaaacaagggaggagtggggaccaataggaaaaaaagtgattcccccagggaggaactcgaggggggtgaaatggaatattgagggccccgcgttgccctgaaactagtgttaaaaagcccccgaataattcttggggaaggtttagaacaccaccttgagaatttaagggtcgaaaacggccaacgtgggcagaaaaaccgggccagcttttaaattcctggagccaagaaccaaggaacggctgggtcttaagatgccaaacgaggccgctgcccaaaaacgggccaaaaaccagaaagccttgcgaagaataacggagaatctggccagcctcacccccaaaggcctgagcccagccatgtcgccagccctacagcgccttgtgagcaggacggccagcaagtacacagaccgggccctgcgggccagctacacaccatccccagcacgctccacccacctcaagaccccggccagtgggctgcagacccccacaagcacaccggcgcctggctctgccacacgcacccctctcacacaggacccggcctccatcacggacaacctgctgcagctccctgcccggcgcaaagcttcggacttcttttagagccaggcctgggctgggctcatagacgcttcacagagcctgcagggcagctgtacacccagcagaggactccagccttctcggggcccaggcctgggccagaagctgttgaccataccaggagtcactggagaaaggggctgtgctggggccagactggcacaaggcactcgtgcccacaccacaccccagggccttgccaagctgtttgctgtttaatgggccccttaactgtcattaaagaacgcctaggacag

SEQ ID NO: 238244 - DNA, 1000 bp, Homo Sapiens
tgccagatttttttyttgacctagagtttcacawacatagmaggagggaaagtcyccccatcycctaacaactgtgtgctaagtaagtaacttggccaagggtagttttcagctcaatttatagaatagtccatagagactttgagaaacatggtgataggcagggcctttcctaccatgtttcaatacctacaaacctattgaaagagaacagtaggtaaaacatttcctawagttgaagcaatagyttcgtagattcttggttactttatyttttttaatgctttacatttgatacaactattgaagatcaattttaaaaatagctttccagtaatatmttttaagtaatatatattttaatatctgtaaaaagtgacagtggaagactttgaatttctcatatatggtatgtttgatgtaggacctcactgttaaggcacaaattatttcaaaggaagttactctaaagacactcagattatttcagaaaaatgcaataaggggaatagttttggggtttattttttattttaaaagaaaattgacttatttaccacaagctatttttttcccttctggctgtaaggtttgtacagactggtttggtaaatgctaaacttttgtgtcttttgcctttttaaaggaattgttaacattggaattgagggtatgtacagagaagttggtgtcaacaccatttaaaaagtcatattttttcacaaatatagaaaatcattttacataagaattttaagtatttgcaataaatatatgtatatagattgtatgtattcctatattcttatttttcattttattattaagtaaaagatcattaaaagtgaaaataaaaaccttggagttttttggtgaatcttgaggtttaacatacatctgagagtggcgtgggtaagagtcctcagttactgccttatactcctatgggatggttcccacagattgtatggaagagagtaaaatgaggaacttggtgata

SEQ ID NO: 238245 - DNA, 935 bp, Homo Sapiens
  misc_feature (904)..(904): n is a, c, g, or t
tgggactcatcaggaaaggattctgctttcaaactatactgaacattcctgtcctagcgtccctgccaccaggcccyaatgcatctgatccttgaatatactctcaaagaattcactctcgttttattaagagaactaaattgtttctaaatgtagatggtccctctggaaaagcagttttcagcaggggtggtaaccccttcagagggagtttggaaatgtgtgggtatgattcttggttatcataatgatgggggtgctactggccttctgctgccatgggaccaggatgctaaatgtcaaggtagtcctatacagtgaagaattgtcctgctcaagatgccaggatttcccccagtgagaacatgctctaaggaatgaccacccctttcttttattctcccacagtgctccatgtacagaagtaagcatagcagtcatatgagcaaccacattcctgaacctttcctcatgctggctctacacttaatcctttacttgtatgtttctgtaattcttacataaattctattaagagggtggcatactgtagtggatgaagctgaggcttatagtaggtaaggcacaaagttaaaaagtaacatcactgggtytcaaacctactggtctctgtgactaaagaacactttcagaaccacttcttgattctgccaccacttgatcccataacaggctaccccttggcctcatgctggagttgtgtgtgtctgtcttcatcccaggctgagctccttgaggtgaggatgttgtgctgtttgcctccctcacagtgccttggtcttagtggatgcccagttgtcttgtgaatgacttttaagaagtgtacttaagagaaaaatcctaccttatttgaataattacaagtcatgtttttgttgcttanaaggtgataaatacagtgtatattatttbtt

SEQ ID NO: 238246 - DNA, 907 bp, Homo Sapiens
aaccccaagcaaactggttgtttaaggtttccaggaacccttttttggggaaatggttttttccttttaccaagtttttacagagatgttagggtatatcccatgaatgcaattttggcattttaatttccaacgtatccctgtagttttaattcctcaattgttcttaaaagaactgttgatactataaagcatcagtgaatcaatatattttaaaacagaaaaggggcttctcagatacccctccatctactggcccatcccctctcctaaacaaaactccttcaaaacaggttaaaaaaaataatgttgtcatgaatcttcacagtaacatttcagaaaggtgcttttttggtactcttcatgggaacagtttagcagccatgagtgatcttcctttgaaagagaatgaaagaccctgtgacatttcacttcaaaaataagccctgtagctctttacggtcgcatagtataaaattataccctgcatgctgaccctcgcttggaatggaatgccagaaatgcatggcagcagctaataagtaaagctgattaactatttatttgtcaatgttattatttaatgagctttcacatgtgatttgtttcaaaactttaattttttaatgttttgaaactttttcatggacctaaatattttcctatatgatttgtggttgattagaaatatgaaatacatgttgtagatatgtaaaatgaatattttagtctccttattacatatatgttcatggtgaactttatcaatagtatggatctttttaaatcaataagatgctttgtaaagttgaaataagtaatactttcttgtttaatctgtgcaatcagaaggtgtcttgaccttcaattcaatggtttcttttaacaaaaataaacactgctaaaa

SEQ ID NO: 238247 - DNA, 822 bp, Homo Sapiens
acaccagattggatgaggacaaatatgaagaaaggaataaaacaacatctagacacttacccctggacactcaaggccaagaaggaaaagggcattttttatattcaactttgaaaggcagtgtgggtctgtctttaaagtgtttacaaaaaaagattatataaaaaaaagtctagtgtcggctggtgttttccctcgtgatgtttaaagcgtgctgtttgctgccaggccataacccactcagtaacagaagaacacaaataaggcctcgctgacagccttctaacggcgggcgagcacacggtctcttcccctgccccaactggccctctccaccaccaacttctatactttgggtttgtttggatttttccctctatttttctggctggttttttgctcttttctccccttgagaccctaatatcttgacttcattgccaaaaaacaacccattgagaactttcttcctactgatcccatctcttttcccttctttcctcctggttccggtcagttcagaggatttaacaatcacaagtgtcctgcaaaaatgcctgaacattattcttaggccctcgtggattttttttttcagaaaacttaaacaaaaaaagacttactaagaaatatgtacagctacccctgttttcaggcactatgtttgagaacattttagccattgatgttcacacgtggcatcagcccatgcaagataggtttctgtatttatatattaaaatacaaaaaaaaacttataaaatgtttaaaaaaatgttcaaagcttgggagaaaagctttcttcattagtcaaggtgtttt

SEQ ID NO: 238248 - DNA, 1000 bp, Homo Sapiens
  misc_feature (134)..(134): n is a, c, g, or t
tgcaraatkgaaatyttmaaaaabccybaaagctcataaccarktaaakkkggggraggggccmwtcamrktccckcaaaraaamaccaattttgamatttwtwttaaggggaacagkraataggcmmwwatancggkggctwwtagccmcctttagtcatttttaactataaaataaacataagtacctatkgaatmacaaaataaargttwttttwttagaattaggaatgtytttccctctgggcaacctgaacagtccagttacaatgaaatctaagaacagttatttccacagcatagggtgctctatgcacaaaattacagggttaggagcatttaatcaatttaccattctgattgtctcaccaacccaccccatcccatcccccaagtgctctattaccggggtttgtagctaaaataatttgttacattaactccttttccctcttctactaaatttcagttcctaatcatggttgaaccactttattacacagcagattcaaccatttcaaatgaagtcagccagtcttggatctgttgtatatgggtgtatgtatacacgtgtatctaacatatttatttaaacacacataaaacacatacaatctgggttgtggaaaattacagataatttagtctgatattatatgctactcaattttaccactgtggtttgtgtcctgagctttggatcaaaattttattttaaatcactgaaagtccatctgctgctgaatgaattgttcaaatgaagcatgcacttttcaaaagacaatgaaactgacctcaagacatggagaccttggtgcttactgtgaatagatccctcagataagacttctgtaggtgaaacagggaagctgtcatggcttgcctatcccagctgggggcactgaatctactaataacacaagcaattcactctgggaattctgtcaaatatggtggtatctgttaaaagcttggaagtagaaaagggccagttcatytt

SEQ ID NO: 238249 - DNA, 890 bp, Homo Sapiens
  misc_feature (835)..(835): n is a, c, g, or t
gaacttacaggactttgttggtgtgttgacattgaccatgcagaccaatttgggcacaactggacattgattccttttacacaagagctgcctcccaaagatagataaattttcccagccctaaatatgaatcatggggcaagatattggtcgtattgatggtgaacctttcctactggattctttgcatgccacatagcaggattcattgcctttctctcatcatggatggcatgcagcagcacccaagtattcttcattctttgcagggaaaaaattgtgcatgggggctgaaatgtagtatgtgtagctcaattagtctctcctctgtgatgcaaaatggaatattcaatggcagaatctgcccttctgagatgctgaccatccaaaacaccttgtttatggtgcaccatgattagctcacacacaatgccaaggctgtgcttctattatctgatacatagtttgacaatgggtaattctactcagaccctccctactgattggctaggatgcctgtcaggaactcattatgctactggttgtttggggatccccatagtggactactttcaggaatggcatgaattgtaaccaactgagtgctgcccccactgttacggaagtttataaaaccttagttccagaagacccaaaggagagtactggtttgtgtttggtgcttggcctagatccagccaccactctgaaactcatcacatcttcattgacagggagggagcccaggacatatgtgtggctcattgaccagaaggctttcttagtcccaacagccatgaaccatgcacttatggatacccagccttttagggcntacgtgaaatgcatccttgtaacatcattgattctttcaataaatagccttctga

SEQ ID NO: 238250 - DNA, 852 bp, Homo Sapiens
ctctctttctccggcttcttctcttataccgtcccggctgtgtgggttcaggttggggctgctgtgtggtccttcccagaaactggcagtagagggcagctggggcatcctaatgcttactctggttgttaccaaagaaaatattggggtcactggcgagcccacccacactcaccagaatctccactgtagtccccctaacaaacagcccttcacttcctctcccacttcagcaatttgtattttgatgccattggcctcagatcagagtgttttaaatcatcacgccctggcttatccctggtcgagccaggacacggggtgcttcagtgggtctgtcaccctctctccttgaagcatgttgcttttatttatttacttttactctcaccctgctcctgtaccagcaggggccacttcaaagccaaggtacagggtgataacttgtggtccagcatcagttttctccacttctttctcccactcacccccagcaaggtgcctggggagacttgagcagatgtttcattttggcctggccagtggctgaaagccaggcctccaatgcactgtgacctctggcttccccagcagctttcccagagaggcagaggggccttccacagcccgggttctcctgctgcctcctgcctgctgcagctgcaggcattctgaggggcaacgtggaggaagggccagggatgcatgggattttaattgtttcatcacaccttccccgtggcaaagaaacagtcagtcctcttcaggtgtcttctggatttctggtgatggacagagaaatctttttacagtttcaaatatgttcaacaaataaaaagtgcattttttatt

SEQ ID NO: 238251 - DNA, 903 bp, Homo Sapiens
aaaaggtacagaccaccgccctaggacatgggccaccatagggactgtgcccaacctctctgaaacaagcccagctaaaaaaggacagcacccttctcaagaccttggtggaaaaacaagagaatggtccccactcaaagaagtcctttccatgttgggggacaacccgcaggagcctgtaggaagattggcaaccaaaaactattccacaacccagcaactgacaggcgcgggccagccaggtggcgcagcgactacggcacgctcttcgtggtgctggtggtcataggggccatctgcatcatcatcaatgcgcatggcctgctctacaaactgctggcagcgccggctgcccaagctcaagcacgtgtcgcacggcgaggagatgcgcttcgtggagaacggctgccacgacaaccccacgctggacgtggccagcgacagccagtcggagatgcaggagaagcaccccagcctgaacggcggcggggccctcaacggcccggggagctggggggcgctcatggggggcaagcgggaccccgaggactcggacgtgttcgaggaggacacgcacctgtgagcgcagccgaggcgcaggccgagtgggccgccaggaccaagcgaggtggaccccgaaacggacggcccggagcccgcaccagccccgcgcctacccgggccgcccccgcggcctggccctcggcgcgggctccttcccgcttcccccgacttcacacggcggcttcggaccaactccctcactcccgcccgaggggcaggcctcaaagcccgccttggccccgctttcccgcccctgaaccccggccccgcgggcggcgggcggcgcttcctgcgccccgggactcaattaaacccgcccggagaaccacgccgggccca

SEQ ID NO: 238252 - DNA, 904 bp, Homo Sapiens
gtgtaaaagcaaaaatttttagtaaaaagttttggccaatgtagtccagagggtccaaaaccgccttccggggatgccggttgcaaaaccccaggtgcaacaccaaagcagtgcccggtgcaacctggctgtccaagaggtgtgacccttgacctctgtgctacctgtggaacacgctgaccattggcacagtaaaaatgtgtcctgcaagaactgcagtattcaacggggctccaaaaagcatctattgctggcaccatctgacgtggcaggctgggggatttttatcaaagatcctgtgcagaaaaatgaattcatctcagaatactgtggagagattatttctcaagatgaagctgacagaagagggaaagtgtatgataaatacatgtgcagctttctgttcaacttgaacaatgattttgtggtggatgcaacccgcaagggtaacaaaattcgttttgcaaatcattcggtaaatccaaactgctatgcaaaagttatgatggttaacggtgatcacaggataggtatttttgccaagagagccatccagactggcgaagagctgttttttgattacagatacagccaggctgatgccctgaagtatgtcggcatcgaaagagaaatggaaatcccttgacatctgctacctcctccccctcctctgaaacagctgccttagcttcaggaacctcgagtactgtgggcaatttagaaaaagaacatgcagtttgaaattctgaatttgcaaagtactgtaagaataatttatagtaatgagtttaaaaatcaactttttattgccttctcaccagctgcaaagtgttttgtaccagtgaatttttgcaataatgcagtatggtacatttttcaactttaaataaaggaatacttgaac

SEQ ID NO: 238253 - DNA, 916 bp, Homo Sapiens
  misc_feature (12)..(12): n is a, c, g, or t
  misc_feature (69)..(69): n is a, c, g, or t
  misc_feature (164)..(164): n is a, c, g, or t
ggtggttcaatnaagtctgtgaaagctggaagtgggggcaaagacaacctcaaggcaagccccaagatnctgtgcgagaaagcgccttccggcaactataagggacttccccaagctggtggatgatgaaggggcagatcgaggaagcagaagggagatgatgnagaaggcgcgggaagcctaataaccaggggttgaaaaaagtgtccccaactccacaacccctgtggcttttgctctctcggctggaggagaagattgggcagcttactcgagcacgggccattttggaaaagtctcgtctgaagaacccaaagaaccctgggctgtggttggagtccgtgcggctggagtaccgtgcggggctgaagaacatcgcaaatacactcatggccaaggcgctgcaggagtgccccaactccggtatcctgtggtctgaggccatcttcctcgaggcaaggccccagaggaggaccaagagcgtggatgccctgaagaagtgtgagcatgacccccatgtgctcctggccgtggccaagctgttttggagtcagcggaagatcaccaaggccagggagtggttccaccgcactgtgaagattgactcggacctgggggatgcctgggccttcttctacaagtttgagctgcagcatggcactgaggagcagcaggaggaggtgaggaagcgctgtgagagtgcagagcctcggcatggggagctgtggtgcgccgtgtccaaggacatcgccaactggcagaagaagatcggggacatccttaggctggtggccggccgcatcaagaacaccttctgattgagcggttgccatggccggtctccgtggggcagggttgggccgcatgggaagggctctgagctgtgtcctccttcattaaaagtttttatggctcg

SEQ ID NO: 238254 - DNA, 867 bp, Homo Sapiens
  misc_feature (107)..(107): n is a, c, g, or t
aggctttatagccccttttaaagggttttcttgccaaaaaaccccagccgcaagggaagaacaaaagcaagagtcctgtgctggattttggggcagcaggttggtcncatgcttgataggtgggcggggggtcgggggtcttcttgtttccactaacagggaacaaaggcagaaacccatgacagggctgtccccgccagggccccggtgggtttgtctgcacttggtgctcctgcccacaccaagccactttggtgacaatgacccttccaagaatctttggttcaaggagcaccagttccctcttcattcttgaagcagggagaaattgacctttgccttgtcgcccaggaagtggggctcggcacccataactaacacctcccacccttggaaaccatgtcttctgggggtgagatgaccattctgggtctaagactgtttcaaagaagagctcatagactgactggtccagaagacagagggtacaacagtggcatcacagtgacagtgtcatggggagctgggcgggcccagccaaaccctccttcttcctagagcccagccagcaggcaggagttcctggaccctcaggacagtgaacttccagacctcagggcaggtctatgggccactgcaggagatgagaccagccttctgtgttcacctaacgatttatactgtgtatctgtctttgatggaattttgtaactttttatatttttttatgcaaaagcagcttcttaacagatggcattttctgtgactctaggcctcacaaaagagccagagttctggacccatgtttggagcatttgtagccttattctcttgcgtgtaatctcttaccctaaaaaaagccataat

SEQ ID NO: 238255 - DNA, 884 bp, Homo Sapiens
  misc_feature (178)..(178): n is a, c, g, or t
  misc_feature (228)..(228): n is a, c, g, or t
ttcttccctggtgaaggccaactttaaagggtgtggtcctctttcctttcccaatcggaattagatgatgtttaactgtaaaacttaaagctggccgctttctcagtagcttcaaaaaagtctaaattgttatttatggaatgggccacagtattcagtttacccgtacatgctcctnccgcccctcctgttggcacccttgcatcgcccaggcctgattcctcctgngggtagttcacccccacgggttcatagttcagcggcgaatgccaggcagctgttttctggctgagcaaacagcacctttctcattgagcttcctctactgacctctgtcccccttgggatttcatcttctgaccgaaccctgatgttcagtggcagagacagcccatagccagaactgtgggtagaccagggttggggtgtgcggtttgggacagcccaaaccccagccgctgtgtcaaggcctaggacgccatgctgccatcaaaagggggttccaggtttccatcagtggcctaaagaagggacttcttgttgtactgaggagtgcggaattaaagagatttgactccctttagtattgggggcagtccgttccccagacactgtggcctctgaagtggaaactgaaagctgcatacctgggaaagaactttctaggaataggcaatggccttcagtggaagagggagggctggaggtgtgcccagtacttggatgttcatctgtccacaacagctttttgtttttttaaaaaagctaaaatggaaatggattttatcataaaggatgacatcgttttcttctacaattaatacatgttcattgtataaaacccaaaaagcagctaaaaaataaagcggggaaaggaacctact

SEQ ID NO: 238256 - DNA, 1000 bp, Homo Sapiens
tatwttttkawtttgtttccccatccaaatycatktkrgatkgtcccmatktgacaktttgggagtkgtacccttaagagcatttrtkcatkgaggaayccccytgatgakggaataawkcagtctcttttgaktkggagakatcttgtgctcatgkgactggattagttactgtgaggaggttkgttgtaataaagtgagtctgcctcttgtgcttggtgtcttttgcgtgtacctgtttccccttttgtttctttgccatgttttgatgccctcaaaagaagttgtcggatgtgactgcccagtcttgaacttcccagccctcaaaactaacagaacatatcttccagtagcttcctgagaaagtgtatatgcaaagcacacttctgagatctttcagatggttttgccacattgcccaggatggccttgaactcctgggctcaagtgatccacttgccttggccccccaaagtgctgggattacaggttgctatgaaaagaaaaatcatgatattaaattttagcatcgatattatggaagctatgcctggactcaacaacacgaacttctactcaccaaggctgatcttgtactaatactaagtgcccaacctgacaacagagaagatgatgagcctttataagacaccattccttaggggcatcagccagtcccatggtgttaggattattacatgggacacctttcatcatcatgaaaacagaaacttttcctcatggaaatgaatatgtattttagacacacatttaccttctttgctgacaatgattctgtcatcaccatctccatggacttccagaatgccttaatcatcatcagagtatcctacacaaagttgtctctgaccaaggaactcatttaatgggactgcatcccttcaagattttagcttcttccagaagtcccctcckccatgactctagctctcactaggctccagaaatactatttcttcctcttgccctcttaggccta

SEQ ID NO: 238257 - DNA, 877 bp, Homo Sapiens
  misc_feature (107)..(107): n is a, c, g, or t
  misc_feature (109)..(109): n is a, c, g, or t
  misc_feature (142)..(142): n is a, c, g, or t
  misc_feature (856)..(856): n is a, c, g, or t
tttgagtttgctgctccccctgctggctcttgagcctgaccacaggttcagacagctccagttaggctataaagtcacaatgcccctatttccagaaaaaaaaaaananagtatgtaatgaccctctcgtctccgggagcgnaaaggctctggtgctaaggaaaaagctgagagttactttttaaaaagagattactgtcaaccaacagtaaggattctgctttggggaagagccaaaaagatgggacgtgaatagtcagttatggagtacagtctttctctcacaaaattgagcacattttggtgagccatggggaacaaggctcaataattgtgtgatgaaaagggatttaattgcctgatttttataaaaagaggtttcacaggttttcagtaaaatgaaaccgaactgaatactcacagtgtgagtgggtgtagaggttagcttctgagtgctgtgggttttgggatgacatgaacctcagggtatctctagtgactgtggtatctctctgttaagagaagggtctgatcaacaacttgaaaagctaagactggtttgaaacttatacctctggggatctaaaatgtttccaataaatgacaattcgttcccttttctaaaagatgtcatagttcttcttttgatgtggatagtagtgatagttataaaaaatgctaaatttatatatctcaattcaagcactacattgaaaaagaagcaaattagtatgacttttttctctttccaaactgaagcatgaacatacattagagcaaaagcaatgagaaaaccgcaggtcggcaggcccctccactgttagttaagacctgcagtaggggacataacttactncctgcttcagtcttacttcct

SEQ ID NO: 238258 - DNA, 894 bp, Homo Sapiens
tttatttaargaaaaatgggaaaaagatttktwatttgaaaagtgatgggatakggdtaaaakrtggaaaattttaaatttatgtrgttgggaaagtaaaatggggggkggtagttaatgaattttaaataggggggdgggggattwagaaaaaatttgaatatgrtgatargaaaaaaaaaaaattagaaaaaaagattgttaaaaaaaaatatdtamaaaatgtttagattctgtaggtgttaaaagcctttctggaagtattgcattctgccgtgtttataggtgttcactttcctccagagctgattaactactgacatgacttggctttctcatccagaaattatggaaacagggtctgtcagtggcaggaggccgtgctgtgttttacttggatgacacaatgcagtttacttgcctcttcatacccatgcatgctgctcaccctagacaatgacatataagccgtatatagatcaatgtccacatatatatacacacacacatatatatatataaagtgtaacaaggaacactaaaacagtgttgattcttgtctctgaagacaaataattaaaccttttttttcccaactaaagaatggathhaahhaaactatgtattvmcmaaaaagtagcctagcgtgttagagatggtgaatatattccattttagttaaagaacaaatttcctgaattttaagcattcagtgagctgccaattttgattttgtgttgctctttmcccvvtttdttttttctyysyyyytcttwwaawrrrrgaggaggggmmaaaagcagcaatactgtgtttgvaaattatactctgtatmtggttttcctgtgtatgttaaccacttaaatgttattatmctgctbtggtktkmgmgtg

SEQ ID NO: 238259 - DNA, 1000 bp, Homo Sapiens
aaacccttgatkwagcatkkggaacctttagtktgyyacmcytcaaagcatgaagactcacactgagagaacccctatgaatgwrgcaatgtgkwaagccttcagatkacctcggaccttcaaaggcatgaaaagacacacactgaggataaaccctatggatgtaagcagtgtgggaaaggctttagatgtgcttcacaacttcaaattcatgaaaggacgcacagtggagagaaacccccatgaatgtaaggaatgtggaaaagtattcaagtatttttcttccttgcgtatacatgaaaggacgcacactggagagaagccccatgaatgtaagcaatgtggaaaagcattcaggtatttctctwccttgcatatacatgaaaggacacacactggagataagccatatgagtgtaaggtatgtgcaaagccttcacttgttccagttccattcgatatcatgaaaggactcacactggagagaaaccctatgaatgtaagcactgtggtaaggcctttatttccaattacattcgatatcatgaaaggactcacactggagagaaaccctatcaatgcaagcaatgtggcaaagcctttattcgtgccagttcatgtcgagaacatgaaagaactcataccattaatagatgagaaatccttttagtggaagcaacgggagaagctttctgttgtcccactkcctttgaaacacaagaaaagagagtggtgaaagaacctctggataactgctttttgaattgagaagagagacttgcgataggacaataaaatctagaagaacttggatggtttcgtaatacaattcacctatagccaatcttgcatgagatttcaaaggcacagaaaaggaaggcatcagtcacatattagaggccccacacagggagagaggtgtgtggctacccgcttccagcccattttcctgattctttggcttgttaatcgagaatatcccccaaatcacttgtctctg

SEQ ID NO: 238260 - DNA, 997 bp, Homo Sapiens
  misc_feature (327)..(327): n is a, c, g, or t
  misc_feature (428)..(428): n is a, c, g, or t
  misc_feature (810)..(810): n is a, c, g, or t
  misc_feature (952)..(952): n is a, c, g, or t
  misc_feature (983)..(984): n is a, c, g, or t
  misc_feature (986)..(986): n is a, c, g, or t
  misc_feature (988)..(988): n is a, c, g, or t
cccatragacctgttcccgagccaagcagaaacggcttscaaatctccagggcgraacsgaagcggtgggaaatggatcgaggcagggtcgcctttgtgaccagaagttcccaagaccaaggacaagtcccagggagcccaggccaggcgggggcccagagggcttcccgggatggtgggcgaggccggggccggggccgcccagggaagagagtggcctgagcccaagccgcaccggagcagcggctggattgaacgccccagattggggcccgagatgtggccctcggtttcctttcataaaggagttgtgtccccagcccttcnactccagtaaagaactgaattggccaggggtccacgtcagcgtttgggatgggggattctrgmmcmcactacaaagcaacccaaagagtcctgggccggcnacacccgagagtccctcccacctggtttcttcctggaagctgggtctctcccctaccctgaacgtgggttkktttcattkgttkcagcarcarccatragtggcccctcccccaagtcccaccaaagagccgtgcaagcagacaktttacactttyagcagatgwgyttgaacctcagragggttgtggmacaatgaggaaggaaacgtgggtggaaaggtacgctggcctgctctgctggctgggccagtaactggggatggggctggggacagggcccactaagcaactggtkattgggggaggrgctgggraattggktagcaraaacaggctgaggatcggcacgggagcatggcagccaacgtctcgggtaaggagnaggcatgttkgctktctctgggggtttgcagattttcaggaggtgggggtagtgggtattggtaaaaaacctaggtgtgagggctgggcaaggtgtgacgcctgtaatcccagcaatttgggaggtcgaggggggtggtaanacgaggtataggggtttgagamcaccctgannananaaggagaaa

SEQ ID NO: 238261 - DNA, 805 bp, Homo Sapiens
  misc_feature (783)..(783): n is a, c, g, or t
gatctgtgggttttcttattaattatctttagtcttgtgatcacacataattttaaaatttgtgtatatctccgttactttaatccttttaagttggcaaaagcaccattcccaatcaaatacacagttctacagttttgtttctgaatggctgtttaaagacaatcctaaattataacttagtttgacttagattgtaaagaattcaagagtgaagtttaacttgctactattttaaaagcatgtgaccttatagatctgtaagatgtgagaggtgttgaataatctttaatattacacataaaccacactaaaatgcctttcaataagtaaaagaaaccattttaaatacagggaattataattagattggcatagttaaggccaaaactatagacattgctaccttatttatcttcaacccttgcctttaagaggcaaatgaacatgaacacaaaacacaggtgaatcttgcttggttctaagacagtgaagcaatttccccagtatttaaatatattcacataaccagttatataaatctaaatataaaaccaatctccagtaagttttaagatggcactcaccatctttgtgaaaagttgaacattactaacgaagtctaatcatatctttaaaaggggtaaacagtgataccatttactgaattggagttactattaaaattcaaaaactgaacatattcatttaaccacaagccagtcttagttttaaatcaggactgcccaacaaaatatctgtcagtcattcatgatctgaatnctggtgtatgagtaatatcaaa

SEQ ID NO: 238262 - DNA, 897 bp, Homo Sapiens
acatcactggggctggctggaatgtcctggcaaccgtaaggagccctggctacaagaacgacacactgcgctctggggtggtcagtgtggtggactcgctgctgtgtgaggagcagcatgaggaccatggcatcccagtgagtgtcactgataacatgttctgtgccagctgggaacccactgccccttctgatatctgcactgcagagacaggaggcatcgcggctgtgtccttcccgggacgagcatctcctgagccacgctggcatctgatgggactggtcagctggagctatgataaaacatgcagccacaggctctccactgccttcaccaaggtgctgccttttaaagactggattgaaagaaatatgaaatgaaccatgctcatgcactccttgagaagtgtttctgtatatccgtctgtacgtgtgtcattgcgtgaagcagtgtgggcctgaagtgtgatttggcctgtgaacttggctgtgccagggcttctgacttcagggacaaaactcagtgaagggtgagtagacctccattgctggtaggctgatgccacgtccactactaggacagccaattggaagatgccagggcttgcaagaagtaagtttcttcaaagaagaccatatacaaaacctctccactccactgacctggtggtcttccccaactttcagttatacgaatgccatcagcttgaccagggaagatctgggcttcatgaggccccttttgaggctctcaagttctagagagctgcctgtgggacagcccagggcagcagagctgggatgtggtgcatgcctttgtgtacatggccacagtacagtctggtccttttccttccccatctcttgtacacattttaataaaataaggggtggcttc

SEQ ID NO: 238263 - DNA, 600 bp, Homo Sapiens
tggtcccgtgagcgggaggacgcgcggctttttccttcctgcaggtccaagccctcggagcccccatcccttatcttacccccaccgcgctcccccaggagcgctccctcagctctctcctcatccatcaccagtggagtttttttattttttatttttttaaaagtttaggtgcctttgcggatgacctcattttgacgttgaaaaaatgattttttaatatgtgaacactgcaaaaatgtgtttaaattatcttttttaaaacctattcaggattattagcctggacttggacacagagtttgtaaataaaggtgtctgtgcagattttcccactgatttatttgtataaaaatactcatcttttcagacttttttgtaaacccccagttgtgaaaactgcagtttagcagtgacctcagcaacccctcctttttattttttcctttaaaaacatttcagttaaattaagctactgatttggatttgttttatcgtatcctaaagtctttgttgttgaaatgaaaggtattttggggttatttattatgaaaacaacatgctcttaatgttattttcaatataagagatttttaataa

SEQ ID NO: 238264 - DNA, 864 bp, Homo Sapiens
gccttaaggggggaaaatatcgcagaggacgcgtgccagacggaatagaggaaccaaggtacagccggtgggggaaaaatgtaatttaagcgcctgcattttggagttaagggaaaataaggacctaatggtaacccaaaccagacgttgtaatgcaggtccacttctgggaacctaaaagtgagctgggaaaggactgcgcaaacaaagagaccctttattgacctaacaatgggccattcattctataggcaaaaaaagctctagacagattggaataggaaatggatatttgcctttaagctgcaacccctttgtctgtcttcctcattttgttccttgttttttccctaaagggaagtcaagttgcctgggttgttcccctcataaggtattagggacttgtgtcacatctctctggagttttctattttaaagaggaatctgaaagcaataagctctttggtcttcttaagatggctacacctcaatttaagatggggtattctttcactagttgaggagtagaagaggatgaccagctagactcccatggaattggaactcctattccttgcttagacattacaggttatgctttgagatctctttggggtgaaggattgaaattaaaccctgagccaccgtgtccttgtagagcacagagtagagaacaactggcagctttgaaaaaacaccatgaagaagaaatcgttcatcataagaaggagattgagcgtctgcagaaagaaattgagcgccataagcagaagatcaaaatgctaaaacatgatgattaagtgcacaccgtgtgccatagaatggcacatgtcaatgcccacttcgtgagacagggtccggttt

SEQ ID NO: 238265 - DNA, 1000 bp, Homo Sapiens
  misc_feature (34)..(34): n is a, c, g, or t
cctycatttttttcccttttcccaaaaatdctanahacamtssasvvaaccccacgawscaaacatgkggaaaacytccattttctccabtctttcggaaacatgaaagattcamactgagagaaaccctacgaatgcaaacagtgtgggaagaccttcatttatccccagtcctttcgaagacatgaaagaactcatggtggagagaaaccctatgaatgcaaccagtgcgggaaagcattcagtcacccctcctcctttcgagaacacatgagggtgcacactggagagaaaccctatgagtgcaagcaatgtgggaaaactttcaattggcccatatctttacgaaaacatatgagaacacatactagagagaaaccctatgaatgtaagcagtgtgggaaagccttcagcttgtctgcttgctttcgagaacatgtgagaatgcaccctgaagacaaatcctatgaatgcaagctatgtgggaaagctttctattgccacatatccttacaaaaacatatgagaaggcataccgcagagaaactctataaatgcaagcagtgtgggaaagctttcagttggcctgaacttttgcaacaacatgtgaggacgcacactgtagagaagccctatgaatgtaaggaatgtgggaaggtcttcaaatggccatcatctttaccaatacatatgagactgcacactggagagaaaccttatcaatgtaagcattgtgggaaagcattcaattgttcctcatccttaaggcgacatgtgagaatacacactacagaaaaacagtataagtgtaatgtaggacatcctcctgcaaatgaattcatgtgcagtgcttcagaaaagtcacaccaggagagagatctgatcaaagttgtaaatatggtgttgcctttatgagttccttatcctgaaagtggacactcaaggagtgtgtctgtagttcatttgcaaataaacatttagttgaaaaataattctccaa

SEQ ID NO: 238266 - DNA, 1000 bp, Homo Sapiens
taggggacrgactctcctgcttwaacttgtggagctrakrarttkkcccmccarataagggtggwytgcttcccccacccaactaactcaaatgttattctcttttggcaamaccmamacaracacmcccargawtaatactttgtgyccctctatccaaatcmaattgacactcagtattagccatcacagtgaggttttmccatgttgcccargctgttcttcacctcctggcctcaagtgattctcctgcctcagcttccccaaggtgctggaatwacaggcatgagccactgcgcctgaccagaaaagtggtttacctgataaagtggcatttgaactgagatctgaaagtagaatatacttgaagtagatgaagagaggaatgacaatatyttatagcagaaaggacagcagcccttggtggcaggaggcatgttgtattccaggaacgaaagaccaatgcagctgtagtggagagaatacctgagagcatgtgatcagatgaggcccacctgagggcagatagggctagactaggcatagtgtagccacaaaagggctttcagtcagtgataaggatttgggtctttatcttaaaaagacaaggagaatccatgttacatatyttaagcaggaattgaaggtggggtcttgaggaaggtgagtggttgggcaacgagacaggaatggtgaaactctgttagtctacaatgtgcaaggtggcagaagtgcatgccaaaagtggacataggcaggccaggtgcggtgctcacgcctgtactcctagcactttgggaggctgaggcgggggggatcacgaggtaaggagatagagaccattcggctaacacagtgaaaccccatctctactaaaaatacaaaaagttagctgggcttggtggcgggcgcctatagtcctagctgcttgggaggctgaggtaggagaatggcgtgaactcgggaggcagaggttgcagtgagctaagatcgtgccact

SEQ ID NO: 238267 - DNA, 976 bp, Homo Sapiens
aaagaaayaattcctggcaattctggggcccchaatayattytttttacstaaacccagaaagtcgkgargcgktttttktacatytyccccaaattgcataattcccmccttccattytaawtttaaaaaattaaagtaggaagagktmaaaagtttgaacttttcaaattctcccaatgaccccccccccccccsscccmssscccccccyttttttttttttttttttttttaaatagagtggggtttcaccgtgttgcccaggctggtctcgaacccctgggctcaaatgattctccagcctcggcctcccaaagtactgggattacaggagtgagttaccaagccaggcctggtcagggctctttgaaatgttttccttgtcagactgttaccctttagagacaaggcctcacaaaccaagtaaacacttctatccatcactccttacagtcggcgatggcttcatgctgggctaaatagtatacaacaggagaaaaggctcagcaatggcagtgaggaaaaatgctcccttccctgaaggacaatgagtctttccagaacccaggagacaggggagacagccttaggagaaagcacatgtacagcattgctcaatgctgttcttggagcaatctgaatgtgctaaatattcagaaaattcctgctgccgagggaaaaataaccaaactcatactattttcctagaagttcttacttaaataatactacccaaagaggagtgaaaagcttaaattctcaaatctggatgaacaacataatggctgtattgggagcaggcacacagaacatagccactgagtgtacagttttggaactggagagctcttggtagagcagggattgaggagtccacacaatctgagctgctttccaccaaggcatgtcaccccttatacatattcactggaacaaagacagctgtattttctagtatatctgcacatcccggg

SEQ ID NO: 238268 - DNA, 892 bp, Homo Sapiens
aaaggaatggaggaacctgaaaaaagaaagatttttgtgaagaaaagcccaagtaatgggttcagaaaaagaatgaccaaaaaagaaaaggaagagacccaataattaataaaggaatggaggaaacagcagcaaagtaactggagaaagaatacttgcaagaaaaagcaaaagaaaaatatcaagaatggttaaagaaaaaaaatgctgaagaatgtgagaggaagaagaaagaaaaggaaaaagaaaaccaacagcaagctgaaatacaggagaaaaaggaaatagcagaaaaaaagtttcaagaatggttggaaaatgcgaaacataaacctcgtccagctgcaaagagctatggttatgccaatggaaaacttacaggtttttacagtggaaattcctatccagaaccagccttttataatccaattccgtggaaaccaattcatatgccacctcccaaagaagctaaggatctatcaggaaggaagagtaaaagacctgtgataagtcagccacacaagtcatcatctctggtaattcataaagccaggagcaatctttgccttggaactctgtgcagaatacaaagatagcgtatgtggaaaataacatgcttttatctggagctatttaatttaaaaatcagaaattgttttttactgctcagtcaataactcaacacttaatgtgattattgacaaatagcaatttttgcatttgtatatggagtccttagagttgaggaagatattttctggattttggtttttataaacttttcaaggttgatcttggcatgttgttttgcagaataagtggctgaatatgtaagaattgtgtttgtatttaggcttgtattaaaacgtacactgtcaatacccaataaaac

SEQ ID NO: 238269 - DNA, 848 bp, Homo Sapiens
  misc_feature (115)..(115): n is a, c, g, or t
  misc_feature (175)..(175): n is a, c, g, or t
ggccatcagcaggcagttattgtcccagttttcttccaccggataaagaagaaagccaggatccatactttcactgtgcctcctgcttataacaagccatcaatatcattgctcncagtgttaccttggactgagccagaatgtgattttcctgatgaaaaagactcatactggnaattctagggctgccaaatcattttatgtcctatatacttgacactttctccttgctgcttttcttctgtatttctaggtacaaataccagaattatacttgaaaatacagttggtgcactggagaatctattatttaaaaccactctgttcaaaggggcaccagtttgtagtccctctgtttcgcacagagtactatgacaaggaaacatcagaattactaatctagctagtgtcatttattctggaatttttttctaagctgtgactaactctttttatctctcaatataatttttgagccagttaatttttttcagtattttgctgtcccttgggaatgggccctcagaggacagtgcttccaagtacatcttctcccagattctctggcctttttaatgagctattgttaaaccaacaggctagtttatcttacatcagacccttttctggtagagggaaaatgtttgtgctttccctttttcttctgttaatacttatggtaacacctaactgagcctcactcacattaaatgattcacttgaaatatatacagaaattgtaatttgcttttttttaaaaaagggggctaaagtaacactttcctacttatgtaaattatagatcctaaattcacgcaccccgtggagctcaataaagatttactaaa

SEQ ID NO: 238270 - DNA, 918 bp, Homo Sapiens
  misc_feature (275)..(275): n is a, c, g, or t
aggcgaggacaatttcaataccccagttttgcctcccttggattttccaatctcccaggactttcctcttatggagctctctgaggaatattctggaaggggtttaatggataattaaaaatgaaaggccacagaaaagggaaaaagaggaaataatgcaggtaatcgttaatccagcaaaaaggaatgaaaagggaaaaccacatagaagggtaatcccggaaatgcttcatctggtggactgtgggagcagaggcattgccaggacttggganacagtcactgtgaaatgcgctgcgtatctcattcactcacttcagctaatgattccgacttggcagacgctaaactcatggaggttcggtttctcctgatacaaaccaaatggctacctggaagaatttctttcaagcaacagttatttttcttatcttcagggttaaaatgtataaaagttatgtgtaattaatctataatgccataaatgataatgcaaaacctaaataatatggtggccggaggggctgccttatatttgaaacatgctttctatcatgcattgactgtatgcattttgttaatgcacattctgtttgtttaaggtgtgtaagatacacacccttctagatgaaactatatgtgccacactttgcactactcataatgataacctcaagactatcagaagaaatatttaaatttccattttatgaagaaaggaaccaaattattatgctttttaaaacaaattaccagtttacataattaatcagggtgcattttaagttctaacttcgtttattgtataatgcatcatttgaaaataccaaggaggaaataccctttgtttttaatgatgcaagagtggacgtaatgctagttggcaggattttatgtaagaaatcaataaagtaattg

SEQ ID NO: 238271 - DNA, 755 bp, Homo Sapiens
aactaatcctggtaacgcgaacctcgcgaaagcctccgagaaacaaaaccattttagcactcttccaaaaactaccaccatttttctaaagccaccaatcatctcttccctggactaataccaaacccttcctaattatctccctgcctctgctattgattcttaagggtccgttttccacacagtagccaaagcaatttttaaaaaaattattttaaaatgtgattctcttctttgtggctttccatcacagcctagaaaaaattgaaagatctgtaaggccctaatgacctgtccttcactacgtgtctgaccctatagcctactgttctccccttgtgcggtgtactgcagccacgttggccttcttggtattctttgaatacaagggagcttctacttcaaggcatttacattggctgttgccttagcttagaacgctctttctccagatagccgcagagcccgctctctcacctgactcatgtctctgctcaaatgttaatgatcaagaggcagtccccggcctccctcttaaaattacaacctgtcactctccaatcctttcctcacgattttctcaaaagcacttaccgctaaccaacattatatctaaatttttttttgtctctttttattggaatgtaagtttcatgtaagcaggaactgtatatcactgctataccctcagcatttaaaacaatggctgtacatcatacatactcaataaatatttgttggataacctaaaaaaa

SEQ ID NO: 238272 - DNA, 803 bp, Homo Sapiens
ccccagtgcagtcgcccccaggcccagccccaaaagatggggggttcaccaccgtgccccgcaaggacagcctgacccagggccaggagcggggcaacctgctcaactagggcccctgctggccttcctgccattgctgcaccaggactgcaaggagtccccacaccttggcagctcagggtccacagtccaagcccttgacctctcctctatccagacgcgcacagctgtttcctgtgtggatggggtcaggttgtgggccatgccaggcctgtcaactgcgttgactgactgcagcagcttgcctcatggttttccctttttcttagaatatttattcttcagaggtaacatgcagttgggtctcaagacctttcctccaatcagcccaacccagcccagactgggcttttctggggagctgaggagtttatcagtattcatcttccatcctttcatagtcacaagttttgttattttgtttttttttgggggtgatggtgtaattgttaacctcatttccgtttcctacctgtttgcttccccccccagtcctccgcatgagctgttgccctccaggggcctggcacagctggccttggggacgagggagaggactgattcagggccccctcagctgtctcctccctccctctggaaaggagggtggggctcaggggcctcaagctgggctctgtgtgaggcctggcccccactcccaaccttggctctagactgttactcttaagctttgagaaattttcacattatgactattttaaaatcaaataagactattttac

SEQ ID NO: 238273 - DNA, 896 bp, Homo Sapiens
  misc_feature (168)..(168): n is a, c, g, or t
  misc_feature (266)..(266): n is a, c, g, or t
  misc_feature (291)..(291): n is a, c, g, or t
  misc_feature (315)..(315): n is a, c, g, or t
ccccacaggtacgggggccggggtctacggaccccggaaacccaagccctaggcgggtgtccccacaaccgatccccggagtcgaagccgttccaggtcttcaagcggatctcgctacagccgctcgaagtctcggtcccgcactcgttctcgatctcggtcgacctncaagtccagatccgcacgaaggtccaaatccaagtcctcgtcggtctccagatctcgttcgcggtccaggtcccggtctcggtccaggagtcctcccncagtgtccaagagggaatccaaatncaggtcgcgatcgaagagtccccncaagtctcctgaagaggaaggagcggtgtcctcttaagaaaatgatgtatcggcaagcagtgtaaacggaggacttggggaaaaaggaccacatagtccatcgaagaagagtccttggaacaagcaactggctattgaaaaggcgcagttgtgtagcagttgagtaatgctggttagctgttaaggtggcgtgttgcagtgcagagtgcttggctgtttcctgttttctcccgattgctcctgtgtaaagatgccttgtcgtgcagaaacaaatggctgtccagtttattaaaatgcctgacaactgcacttccagtcacccgggccttgcatataaataacggagcatacagtgagcacatctagctgatgataaatacacctttttttccctcttccccctaaaaatggtaaatctgatcatatctacatgtatgaacttaacatggaaaatgttaaggaagcaaatggttgtaactttgtaagtacttataacatggtgtatctttttgcttatgaatattctgtattataaccattgtttctgtagtttaattaaaacattttcttggtgtagcttt

SEQ ID NO: 238274 - DNA, 778 bp, Homo Sapiens
cagctaataagcccatacttgaactcaaaatccagttcggggaaggaagataggcctctgaaccttcggaggaattcttaacaaacaagcgggtccaggggatcgtattcttaagcaacagttccatcaggggctccaccacaacaccctcagaggcaggcaacgagctggacatggagctggggaagaagtaggtgaggaagaaacaaaaagcaggggcaatgaggccgaggagaccagcaccatggaggaggacagggtcccagtgatctgtatttgatgaggaggagccgaggccccagcttcatccagcttcaaccaatgcctggacctgtccacctgagaggcccctggggcctccccagctgctggccagaccctggcgctgccacagtcctggcactgcccaaggccatacctgcctagccctttggctccatcctgtggatgcccactcacccctcagactcctgctgcccatgctgtggccggacttgtcagcagggggcctggtgggaggagcgactgccctgcccaaatgaactgccacagcagggacagctggaccgcagagtttatttttgtatttctactgggcctgcacactccagcccaaagggtctgtggccggaggccccacgagcaggccccagcagtcaccggctctggtcttgggccggccccggtgcccacctgtacccccacctcgcccatttggccgcgtgcactgagtgtcactttgctgcagctcgtttctttccaataaaagtttctggac

SEQ ID NO: 238275 - DNA, 838 bp, Homo Sapiens
  misc_feature (320)..(320): n is a, c, g, or t
tgcaccacccggcgccgcctggaaccaccaggggtaacgaccttgccctccgggggtttttggtccacgggacaccggggcaagctcgaagccggcttcccgggttccgcctactcgtcggaagacaacggctgcgaaggcgcgctgagtcctcgaagcgcgagctactcggcttcttcagctggttagggggctactaggcgccctcgacctatgagcccaagccccggaacccgagcgagcggccggcgcgctcatcgccggggagcccgccaggtggaccggcccgcgctccgcccccagcgagccggggacccacnccaccaccccccgcaccgccgacgccgcctcgttcgtccggcccagcctgaccaatgccgcggtggaaacgggcttggagctggccccataagggctggcggcttcctccgacgccgcccctccccacagcttctcgactgcagtggggcggggggcaccaacacttggagatttttccggaggggagaggattttctaagggcacagagaatccattttctacacattaacttgagctgctggagggacactgctggcaaacggagacctatttttgtacaaagaacccttgacctggggcgtaataaagatgacctggacccctgcccccactatctggagttttccatgctggccaagatctggacacgagcagtccctgaggggcggggtccctggcgtgaggcccccgtgacagcccaccctggggtgggtttgtgggcactgctgctctgctagggagaagcctgtgtggggcacacctcttcaagggagcgtaactttataaataatcagt

SEQ ID NO: 238276 - DNA, 898 bp, Homo Sapiens
ttggggggccctttttgcggtttgaatcccgggctttcccggggtaaatgtagggaggaaaaaagccagtgtcccttttctaaaggcgacaacttttttgggtgtggcaaacccttccaccagggaaggtgtctggacctcatggttgtttggctggtcacagtccttgagtgtggacctggcaaggggctgtttaatctaagctgcaggttccttatctgttcacaccctgtgcgtcctcaaaggacagtttttttggtggtgtgtttttttgttttttttttttttggtagatgcatgacttgtgtgtgatgagagaatggagacagagtccctggctcctctactgtttaacaacatggctttcttattttgtttgaattgttaattcacagaatagcacaaactacaattaaaactaagcacaaagccattctaagtcattggggaaacggggtgaacttcaggtggatgaggagacagaatagagtgataggaagcgtctggcagatactccttttgccactgctgtgtgattagacaggcccagtgagccgcggggcacatgctggccgctcctccctcagaaaaaggcagtggcctaaatcctttttaaatgacttggctcgatgctgtgggggactggctgggctgctgcaggccgtgtgtctgtcagcccaaccttcacatctgtcacgttctccacacgggggagagacgcagtccgcccaggtccccgctttctttggaggcagcagctcccgcagggctgaagtctggcgtaagatgatggatttgattcgccctcctccctgtcatagagctgcagggtggattgttacagcttcgctggaaacctctggaggctcatctcggcgttcctagaaaaaaaagcctg

SEQ ID NO: 238277 - DNA, 826 bp, Homo Sapiens
gatactgtgtagctaccttcattttgggaattggagatcgtcacaatagtaacatcatggtgaaagacgatggacaactgtttcatatagattttggacactttttggatcacaagaagaaaaaatttggttataaacgagaacgtgtgccatttgttttgacacaggatttcttaatagtgattagtaaaggagcccaagaatgcacaaagacaagagaatttgagaggtttcaggagatgtgttacaaggcttatctagctattcgacagcatgccaatctcttcataaatcttttctcaatgatgcttggctctggaatgccagaactacaatcttttgatgacattgcatacattcgaaagaccctagccttagataaaactgagcaagaggctttggagtatttcatgaaacaaatgaatgatgcacatcatggtggctggacaacaaaaatggattggatcttccacacaattaaacagcatgcattgaactgaaaagataactgagaaaatgaaagctcactctggattccacactgcactgttaataactctcagcaggcaaagaccgattgcataggaattgcacaatccatgaacagcattagaatttacagcaagaacagaaataaaatactatataatttaaataatgtaaacgcaaacagggtttgatagcacttaaactagttcatttcaaaattaagctttagaataatgcgcaatttcatgttatgccttaagtccaaaaaggtaaactttgaagattgtttgtatctttttttaaaaaacaaaacaaaacaaaaatccccmmmmtatat

SEQ ID NO: 238278 - DNA, 892 bp, Homo Sapiens
ccaagagggtaacgcccattcccggccaacccaaaaaactccgggttccccccctgccctatgtggtgcccctttgggttcctgtgaaggccataagaaaaagcccagtgtgcccactgggaaagggcacgggactgggctcctaaccccggggtgtgttgggccaaaaaaccctccaagcgtctcccatattgccgtccaagtcggttcataaggcaactcggcgtggtttcaaaggtggaacagccagcggcagctcagagcagggcactggtccggcgaagccaagtccactctgggggagatctggcggggaccacgggccactgctcactcactggccccgaggggggtgtagacgccaagactcacgcatgtgtgacatccggagtcctggagccgggtgtcccagtggcaccactaggtgcctgctgcctccacagtggggttcacacccagggctccttggtcccccacaacctgccccggccaggcctgcagacccagactccagccagacctgcctcacccaccaatgcagccggggctggcgacaccagccaggtgctggtcttgggccagttctcccacgacggctcaccctcccctccatctgcgttgatgctcagaatcgcctacctgtgcctgcgtgtaaaccacagcctcagaccagctatggggagaggacaacacggaggatatccagcttccccggtctggggtgaggagtgtggggagcttgggcatcctcctccagcctcctccagcccccaggcagtgccttacctgtggtgcccagaaaagtgcccctaggttggtgggtctacaggagcctcagccaggcagcccaccccaccctggggcccgcctcaccaaggaaataaagactcaa

SEQ ID NO: 238279 - DNA, 831 bp, Homo Sapiens
  misc_feature (13)..(13): n is a, c, g, or t
ccgggatcaagcncagcgacgagtacagattcggcgcgagcgcaacaacatcgccgtgcgcagagccgcgacaaggccaagatgcgcaacctggagacgcagcacaaggtcctggagctcacggccgagaacgagcggctgcagaagaaggtggagcagctgtcgcgcgagctcagcaccctgcggaacttgttcaagcagctgcccgagcccctgctcgcctcctccggccactgctagcgcggcccccgcgcgcgtccccctgccggccggggctgagactccggggagcgcccgcgcccgcgccctcgcccccgcccccggcggcgccggcaaaactttggcactggggcacttggcagcgcggggagcccgtcggtaattttaatattttattatatatatatatctatatttttgtccaaaccaaccgcacatgcagatggggctcccgcccgtggtgttatttaaagaagaaacgtctatgtgtacagatgaatgataaactctctgcttctccctctgcccctctccaggcgccggcgggcgggccggtttcgaagttgatgcaatcggtttaaacatggctgaacgcgtgtgtacacgggactgacgcaacccacgtgtaactgtcagccgggccctgagtaatcgcttaaagatgttcctacgggcttgttgctgttgatgttttgttttgttttgttttttggtctttttttgtattataaaaaataatctatttctatgagaaaagaggcgtctgtatattttgggaatcttttccgtttcaagcattaagaacacttttaataaacttttttttaagaa

SEQ ID NO: 238280 - DNA, 846 bp, Homo Sapiens
agggtggtccgttgccgcctgcttaaaaaccgatgggaccacggtgcttcaccccccgggctgtttttgacattctttccccccggaaggagggaccaccccctttgctgttaaagttgcttgccgctctgtaaaaaaagaaatcaaggattcaaaaagatatccagaagctcctgtcaggcatcgcagttgactttccaagtgcgacactcgtgtgtgtaggcacagtgcagatgtacgcacacacacacctccggcttggggccccaggcccgcactgtgctcacggatctgctctgcccaggttctgcgggatggtgcagttccccggcgacgtgaggaggcaggccctcctgcagctgtgtctgctcctctgccaccgtttcccgctgatccggaagaccacggccagccaggtgtacgagacattgctcacctacagtgacgtcgtgggcgcggatgtgctggacgaggtggtgactgtgctcagtgacactgcgtgggacgcggagcttgcagtggtgagagagcagcgcaaccgtctgtgtgaccttctgggcgtacccaggccccagctggtgccccagcctggtgcctgctgaagccagtcctggagcccatacctcacccctgcctggtgaggatgtcttgttcctgagggaggccggtgtggaaagcctcgcacagtggtgcctccagctgttgaagggtagcgctggcccttggaggctggcactagctgacagcttttcctctctgcacctgcgctctggtgacttggggtggacgcctctgccttcacttgaacacaaatggcttcctataaaatcattcgcaagaagttcc

SEQ ID NO: 238281 - DNA, 885 bp, Homo Sapiens
ttcagawacataattcagaaatttattttaagcttttcagttaagcggaaagtggggggggcacatttgtttcttgtttttktgcacctgctaagtcaaataacaagtgaaagtaaacctaaagttagaaaccaaggtgaaatgaatgatccaggaagggataccatctgtcaaaggaaaaaataaaaataaagaaaaaaaagaggcaaagacttggaaagagactaagaaaatgtacaaatattagttaaaaaataaggaatgcttttaattcattaatgtttcctctatttatgaattgccatggtttagctaaggtcaatgacaaggagggcccttgtgttaaagagggaaaattctttattctagaagatattgggagtcatagatttttctgtgctgttattccagtgtctacaccagactgcagaaccatgattctccctcgcaattatgctcctattaataaggtcttcacttctagccttacagcaagtgtgtggcatggtgcagagccttggagctcagggctgcacacctgaagttaccctttagtaggggtcccctagagtgaatgacagttttgtggctgaaacctacacaaagaggaagaggaatgaggcaggaagacccgtacctaaccataccctctttggactgcagaaaactgatggcaacatctcggggagtggctgcccaccaaagaggaccctgagaaagaaaagagcataacctgggaaatgggctacatgggggcaagggacatggtgagcgggcaaagttgagatggtgttttccttgagtgaatgtctttcaaaactaacaacatactgtgtagttgtctaacatgctgatggaggaacactgctgggccctgaaatccta

SEQ ID NO: 238282 - DNA, 871 bp, Homo Sapiens
  misc_feature (162)..(162): n is a, c, g, or t
  misc_feature (211)..(211): n is a, c, g, or t
ggcccttaatagacatattttttataatatgggtatccctgagagacagatttaggtgtaaacattattttgctttacagaaaggaaaatgaggcaggttaacttacaagacatctggaccagaatatctgttgataccacaaccaatgctttcccacgagnctatacatagatatactaaagccaatacttttttttttttttgacatancagcacacttcctaaatcatctgagatcctgaggcactgcttcagactggtgtttcttgtagcttcctgtctgcttaggcaacataacagaagtaccatcttcccttaattcctaataaatattagatttttttgtactaagattcaacagcagaatcctaattaatctctaacacaacaagctatgaattatagaatactatatcttcctactgctctccctgatcttattccagccacagaattctaattgaatgtgaaacggctacttatcccagtccttggccatctggccatgtttatctttcttctcacctgctcatcaaaatatcttcatcagatactacgatttctgacctttatctcccataggagctagtcccctaaaactgcttattctttcagtggcagtcagctgtttccttatcaatagttatagcgtagtacctgatttactatagatgatggttctaccacctcatggtctgctcctaacacccatgtttcagctaaggtgattctctctgcctgctgcacagcccatatcatactattcctcaagttctcatgctactccaagctttatctggccttccttacagtctatcctttgccctttgttccatctacacaaaacacctgctcccccttttcccattc

SEQ ID NO: 238283 - DNA, 909 bp, Homo Sapiens
ctggtgctacacccggcttatggctggaaatcaaagacgggccgccatttgcgtaacagcaccactcatcggatgataaacacgtttctgagtcaaaatacaagttcccaagtgacggccctgaagccccctgtgtgcaaaggccagggaaacggcgcggcgggttgctagcccccaccgtaaaggtgcagggcctggtcatatcacagatgctgcgcaagagcgtgaggactcgcgactggctcagcactctggagccccggaatgtgcgggccgtcataaagcgggtggtggaggataccaccgccatcgacgtgcaggtggggctcctgtacgaagagggtgttcgcaaggcccagagcagcgactccagcaagaggactttctccgtgtacagcagctctcggcagcagggccgctacgcccccagctatacccccagtgccccgatggacaccaacctcttgagcaatatccagaagctattctctgaacgtattgatgtgttcagccctgtggagttcaacaaggtgtcggtgctgaccggcatcatcaagatcagcctgaagacgctgctggagtgtgtgcggctgcgcacctttgggcgcttcgggctgcagcaggtgcaagtggactgccactttctgcagctctacctgtggcgttttgtggccgacgaagaactcgtgcacttgctgctggacgaagtggtggcctctgctgccctgcgctgcccagaccctgtgcccatggagcccagtgtggttgaggtcatctgcgagcgcggctaggcgcagccgctgccatgcaccggtctgtccctgcaccccatggcacccaggatctggtctcggtggtccttccccgcaggcaggtgtcaggaccggcctaataaacatgtgggcctcc

SEQ ID NO: 238284 - DNA, 845 bp, Homo Sapiens
acccccccaagccaagttccagtttaagaaagtgtggcaagagggggggaccgggtggaatcagcggcggttcaaagctgcgcggggttgggggccatccgggcaactcaccctggacagtcagcttgcggaatcgggccagcatttctgcggggggtctctagtaaaggagcagtggatactgactgcccggcagtgcttctcctcctgccatatgcctctcacgggctatgaggtatggttgggcaccctgttccagaacccacagcatggagagccaagcctacagcgggtcccagtagccaagatggtgtgtgggccctcaggctcccagcttgtcctgctcaagctggagagatctgtgaccctgaaccagcgtgtggccctgatctgcctgccccctgaatggtatgtggtgcctccagggaccaagtgtgagattgcaggctggggtgagaccaaaggtacgggtaatgacacagtcctaaatgtggccttgctgaatgtcatctccaaccaggagtgtaacatcaagcaccgaggacgtgtgcgggagagtgagatgtgcactgagggactgttggcccctgtgggggcctgtgagggtgactacgggggcccacttgcctgctttacccacaactgctgggtcctggaaggaattataatccccaaccgagtatgcgcaaggtcccgctggccagctgtcttcacgcgtgtctctgtgtttgtggactggattcacaaggtcatgagactgggttaggcccagccttgatgccatatgcctggggaggacaaaacttcttgtcagacactaaagcacatgtttgcctttttatgcc

SEQ ID NO: 238285 - DNA, 589 bp, Homo Sapiens
  misc_feature (580)..(580): n is a, c, g, or t
agaagaaaaggggggtggataaagggtaaaaagacgaaaaaaaggaagcatatgatggaaggaaaaataaattaaggcatccaggtaaactacaaaaacagaaatgttcagtaaaggatggactgctcgtggattgagtagcaatttaaaaaaaaaacaaaggtagctgtgatacaaaccccaggacacccacccacccaaagagccaaagaatagttcctgtgacattccgccttccttccatgtagtccctcttggtaatctaccaccaagcttgtggacttcaccccaacaaaattgtaagcgttgttaggtttttgtgtaagattcttgctgtagcgtggatagctgtgattggtgagtcaaccgtctgtggctaccagttacactgagattgtaacagcatttttactttctgtacaacaaaaaagctttgtaaataaaatcttaacattttgggtctgttttttcatgctttgctttttaattattattattattttttttacattaggacattttatgtgacaactgccaaaaaagtatttttaagaatttaagcgaaaataaagggttactncttgtgaag

SEQ ID NO: 238286 - DNA, 881 bp, Homo Sapiens
tttgtctgtggttcttcccacaccttccagattgtatggcttccaagtctaaaaacatttactttttggccctctaagaaaaaggtaagacacctagtctaatggcctttgggaaaaaacaaatcactaactcataatcatttatatccattattttctgcataaatgtaatgctattgtacagggtttggtagaataaatattcagactgactaaactgttctaaatcctcacaaaaaagtccccaaacaacatgcctcctaaaaaacattttcctatcttttacaagaggtatgaacatttgtagggttccacatttgcatctagaaatccaatgctctttagaatgttattacgaatagaaagatggccaggatgacctttagtgttacatgatgttcagcaaattttaattcaaaccttgatatgcctggacactgaaaagtaaacgcatcacctcctattttataccctaccttctggttcccaattgggagagcacatagagggaaggagacaatatagaaactacggagtccgctggtagtgggctgcatggtgtgacagagcccttctctgtaaaatggaaatgacaccactagccatctcaatagttacaagaattaaaagagatacagtacctgaagtgcttagcgcatggtagcatttcataaatgtttagtgtcaatactaatgctctaataatgtaaattgttaataatttatttccctaatatcaggaaatcccagttgtctatgtggcccagtgcttaaaaacgccttcttgcatgaggggattgaactatacaatgtttgttaactttgtatttgtattttttccctataaaatcttaaaataaaattaggaggatgtgtcctga

SEQ ID NO: 238287 - DNA, 812 bp, Homo Sapiens
accttgccccaaaggaggcagaaaagagtaaagggcccagggttcagggcccctggggcttggctaaaagcccagccctatggcctgtggtccagtcagtgcccgggggcccaccccgtgcaagtgtacgccttctccatcaaaggcccttcctatggagaggatgtctccaatacaacgcaagccaagaagaggaagtgcagcaagacccagtgccccaggaaggtcatcaagatggagtctgaggaggggaaggaggcaaggttggctcggagctccccggagcagcccaggcccagcacctccaaggcagtctcaccaccccacctggatggaccgcctagccccaggagccccgtcataggaagtgaggtcttcctgcccaacagcaaccacgtggccagtggcgccggggaggcagaggaacgcgttgtggtgatcagcagctcggaagactcagatgccgaaaactcgtcctcccgagagctggatgacagcagcagtgagtccagtgacctccagctggaaggccccagcaccctcagggtcctggacgagaaccttgctgacccccaagcagaagacagacctctggttttctttgacctcaagattgacaatgaaagtgggttctcctggggctacccccacccctttctaatttagtctctgagtcccaaaaagaagtgcaggcagagccatctgccaggcccaggagagctctgagctctggccaacaactgcagccaggctgggcagagcactccggctcaccgggctccggcggtcttgcggcgtaaagagatgccgcc

SEQ ID NO: 238288 - DNA, 904 bp, Homo Sapiens
aatggacacaagggtggaaggccagtgacaacccccagttcaccacgaagctgtttcttttgtgtaaatccgattctgaattttataaggctaagttaagaatgggcactgccgggcccctaatatgtaacataccgattgggcatagataaggatgtgagagtggagtaccttccttctcaagtctcgagatgccagtgaaaccagtattccctgacttgggtttcacactttatcgcccaccccatggggtcctgtgtagcctttggccacgcactgacactgcccaggccaagcaaaagcagagtgtggttaagagacaagggtctatgtcatcatcccttttgcttatggtagtgggctaacataacagcccctttctcaagcagagacctggcccctgggccagccagatggaagggcctatcttagccagctggagcttaagccaaacctgttctgtcccactggccagccatctttgctcacatggaaattcaaatgccattcaaaggccactggtgctttatttttctatctgctgagtaaactgaaatgagatgggtcccaaccaccactgtaattttcaagcctattttatttgtacctgtaaatactgtacagctaatatatatatatatatatatatatgtgtgtgtgtgtgtgtgtgtatatgtgtttatagagatacacacacatatatatgtgtgtatatatatacacatacatatatatacacacacgcatttgcacagacacacacatatatcaattctcatgagtgtattataatctctggtgggggcaagtgtctggaaggcctgaggggcacttcagatgagaatggagaggtagggagccaggtgcagcaggatccctcaaatcaataaagcattaccagaga

SEQ ID NO: 238289 - DNA, 923 bp, Homo Sapiens
ggcgcggaaggaatactgtccccaaggagccaccctcactggccgttcttgtccctctggccccttcccacttgcacatgtccacactgaccaacatctgtagacatcttgaagttgtagctgcagacgggggaccagtggctcccattttcattttagccattttgtcgcctgcacccactcccttcatacaatctagtcagaatagcagttctagagcacaggttctcagtctaagctatggaaaagctccccttatccaacagagtttaaaaagtagtgacttgggtttttgcgagtgctttgtttactaaggactttggggaggaaccatgctaagccatgaccagtgaggagaagcaacagagcctgtctgtccccatgagcggagtctgtcctctgctcttctgcagtcaggtcactgcctactgcctgggggctctagtcattccagtggaagacgaatgtaacctgcgtggtgatgtgacaactgtttcctccctgaccccagaggatctggctctaggttgggatcaatcctgaatttcgttatgtgttaatttacttttattaaaaaagtatagtatatataatacaaaacaataacccttctggggtttcttgtggcggttgaaatagtcccacatgtggtcatcagaaaataagccattcctcataccaatataggatcagctccttgacctctgaggggcaggagtgcttcctggtgtgtgtattagaatcccttcctgccttgtttcatggcagtgaaatgcctcttggtcctgtccaagtgtatctttcactgatttctgaatcatgttctagttgcttgaccctgccacatgggtccagtgttcatctgagcataactgtactaaatcctttttccatatcagtataataaaggagtgattgtgcaa

SEQ ID NO: 238290 - DNA, 528 bp, Homo Sapiens
gaagatgaagttttccctcaagcacagctggaacagtccaaggccctggagctgcagggggtgatggcagcagaggctggggacctcagcacagccctggagaggtttggccaagccatctgcctgctgcctgagagggcttcagcctacaacaaccgtgcccaggcccggcgactccagggagacgtggcaggcgccctggaggatctggaacgcgcggtggagctgagcggcggccggggccgcgccgcccgccagagctttgtgcagcgcggactcctggcgcggctgcagggccgagacgacgacgcccgcagggacttcgagagggcggcacggctgggcagccccttcgcgcggcgccagctggtgctgctcaacccctacgccgcgctgtgcaaccgcatgctggccgacatgatggggcagctgcgccgcccccgtgacagccgctgagcgccgcggacccgggcgtccgcgggcgaggggacgggactgggccctgaaccaataaagccgtcgggcctc

SEQ ID NO: 238291 - DNA, 873 bp, Homo Sapiens
gctctcataacaccctttcccaacaaggggaagtgaacctcccacccagtatatggtgcacctttcagcccccgtcgggtgtagtgtccatttgtaaagcccttgtggtgccacaaagggtagccaaggtccccttgaggctagtcctagtgaacctcaccccgaggccctgcatgggccagcccctccatctgtacttggtccaactgcaactcatcatcgggtgactggttatcacaccatcgctggcccctttgggccctgcatgtagtgtgggaggctcctgttagctcctcactgtggtaaatgccacacacctttaagtagataagcagacgatagttatctgttcttttgacttaatctcatttggtttgattttccctctactaaggctttcctaccttcttcaggctgcctaagacatgtaacgaaacacttcaataattgtccatgaggagaaaaaaagcatgtgtcatgcatgaaggaaactgaacttgaggtggcctccttgcttgttacatacctgggtatgtgtaggcagtttagtgcatctttgcctctcagttgaaacctgtataaccctgttacaaagctgtgttgttgcttcttgtgaaggccatgatattttgtttttccccaattaattgctattgtgttattttactacttctctctgtattttttcttgcattgacattatagacattgaggacctcatccaaacaatttaaaaatgagtgtgaagggggaacaagtcaaaatatttttaaaagatcttcaaaaataatgcctctgtctagcatgccaacaagaatgcattgatattgtgaacatttgtatatatggtattaataaatagagcaattacaa

SEQ ID NO: 238292 - DNA, 866 bp, Homo Sapiens
gggttaagatggtcattcacaaggcgaagaaaggttcgaagagaagttgaggacgcagtgccccccataagagggacaaaaggcgcctctctgggggggccggtggtccggcaagaagggcgctcgtggggaaaggggtgacaggggaagtccccaaacaagaaagggtgggggaccaaactcaaggagccatgtgttgaggtcctctggggtttggcggaaggcggggaaattagagtgcaggggttgcaaaatgaacaaggaaattgtctaagcccaggtaaggggtcttctttaaacaggggcccgtggccctcgctgaagcgctcagtcccttcgcccgggccaggggccggtttctcttccgtaaaaggccactgcgcaggtccccagggcgccccctagtggccatagcctggttaaaggtccccagtgcctccttgtgcatagaccttcttctcccacccccttctgcccctgggtccccggccatccagcggggctgccagagaaccccagacctgcccttacagtagtgtagcgccccctccctctttcggctggtgtagaatagccagtagtgtagtgcggtgtgcttttacgtgatggcgggtgggcagcgggcggcgggctccgcgcagccgtctgtccttgatctgcccgcggcggcccgtgttgtgttttgtgctgtgtccacgcgctaaggcgaccccctcccccgtactgacttctcctataagcgcttctcttcgcatagtcacgtagctcccaccccaccctcttcctgtgtctcacgcaagttttatactctaatatttatatgggtttttttcttcgacaaaaaaataatggaacgtttctctaaa

SEQ ID NO: 238293 - DNA, 913 bp, Homo Sapiens
gaacagttcctttttctggggcccaagtgatggagcccctgacccttgggaaaagccccctttctttgggccaaaacttggaaatgcatcgggaaaggaaaaaacttccaaagaaaagaattttaagtgttaatgactctttctgaaggaagagagagacatttgccttttgtttaaaagatggtaaaccagattctgtttccaagagccttggctctcccttggaggacctttaggtcaaactccctagtctccacctgagacctgggagagaagtttaaagcccaactcccttaaggtctccaaaccagacggtgacgcctgcgggaccatctggggcacctgcttccacccgtctctctgcccactcgggtctgcagacctggttcccactgaggccctttgcaggacggaactacggggcttacaggagcttttgtgtgcctggtagaaactatttctgttccagtcacattgccatcactcttgtactgcctgccaccgcggaggaggctggtgacaggccaaaggccagtggaagaaacaccctttcatctcagagtccactgtggcactggccacccctccccagtacaggggtgctgcaggtggcagagtgaatgtcccccatcatgtggcccaactctcctggcctggccatctccctccccagaaacagtgtgcatgggttattttggagtgtaggtgacttgtttactcattgaagcagatttctgcttccttttatttttataggaatagaggaagaaaggtcagatgcgtgcccagctcttcaccccccaatctcttggtggggaggggtgtacctaaatatttatcatatccttgcccttgagtgcttgttagagagaaagagaacctacctaagggaaaatagatattatttaaactc

SEQ ID NO: 238294 - DNA, 905 bp, Homo Sapiens
  misc_feature (184)..(184): n is a, c, g, or t
gtttggtcataagccctgagccaaatgaaatgagccaccgtgaacagacatctgccatgcccccaggtgggctttcggtggccctaccccgtaacagttctctctgagaaactggagatgtcttgttagcataagtgtcttcattcccacctggagggtttgggagaggagcaaagcagttganaactagttaatgagctacaagagtcaaatagtcctctgaatggagtccccatcacaaaacagtgcccaggaggctggctcctcaagctacccatgcccagcgccctaaagcaggaccagatgctttggaattggggtgaaacacccacatggcagcctgctagcagcagtgactttgacttctggtcttaaagagtccctcacttcagccccaggagctattggtgggttttagcagttttgtctttaccgtttttagttctccttgattctttgttttcttcctttatcgtttttaggtttggtatgtgttgttttatttccatggttcctcaagtttcctttttaaacatttgcatttgctggacaattgcaattttttttaaaaaattcccctacccctgtttaaagctgaaaaatacatttggttcatgtgcattgtttacaaagcaaaaagaaaaaagaggaaaaaaaggcaaaaaatattgtgaaagaaaaaaaacaacttaatatattttggattaatatttggtatttcttttaaagtattttttgtgctgtgaacattttctgccaaagaccatgatgtgtgtctgtatgtttaagttatcgtaaatatttaaaatgtaaacatggctgttttgttatgccaccctgtaccaggattgctgccgcattccactgggtataacagtattttaattaaaaaaaaataattaaaa

SEQ ID NO: 238295 - DNA, 840 bp, Homo Sapiens
  misc_feature (802)..(802): n is a, c, g, or t
cggagggccccgggagtcacaagagccgagcggccagtgcacatcaggcagagcaggcccggggcaggggacgacgcaccgggacagggctctgcaggggaccgtgactacaggccagctgtgagtggtcccctacagaggctgcccacccaaggtttggttggggtgaaacatgatgtcaacacatacacttaagaaggtgggaaccgggggccgggcgcggtggctcacacctgtaatgccagcactttgggcagctgaggcgagtggatcacctgaggtcaggagttcgaaccagcctggccaacatggtgaaactgcatctctactaaaaatacacgaagaaaaaaaaaacagtgggaacagagttgtcacctacctaacagggctctgagagagccgggaggcccaaagtggctggaagaaggtaaaggaaaaatcctgtcttgggctcaaggtcacagagtggggcccagggggagttcctgctgagggcagggccttgccaggcttcagtctccagtgccaaaggaggaaatgcccaggctgtcagcatttccagatgagagcagaagggagaagcttaaacccaagtcacacatccagcaatggagtccgacagcccagcaccatctgggaactgagaagcacctctgcccggcccccacaccgtgtggaaagtgaggagcacctctgcctggccgccaccccgtctggcaagtgaggagcgcctctgcccggccgctgtgcaaccttccaagtgtgaagtgacagccttgtgtgtgatgttttctgccattcncccaagtttgcactttcgaccattaaaggtttactttt

SEQ ID NO: 238296 - DNA, 821 bp, Homo Sapiens
aaaaaacmccttcttaacttcaasaattatatgstaatttysawaatttygaaaatattattattgaaaataaaatcttgatctcaactatcccccaaatgcatcctataagtccatcctaatgagaaatgatgttctatttaaggaaaggaaaatattccgggaaggcaaaaaatgcagtgctgtttggaagtgtaatgatyttatcacatggtgaatgactactaagagtaatgattatatcacattgtgaatgactacttgccacagtaaaaatacatgaagaatgtgttaggtttaaacgtcgtttctttcttctaaaaaatatttggttagtaccttcactgagcaatagtggaaaaataaaaaaataagtaaacagaaaaaactaaagttgtattttcccacaaatatagtatgaatgaggtcatattaaagaacagcaactgttaatgtttgttcacaaattcagaaatctaataggaaaacatgatactttcaatgtgccaaaactaaaccttagtatacaactaaaaatctcctgccttcttgcctacctgtcttccctcttctgttacagaatttgttcctcaaagtagatgcaatgtttctaacacaatttaaattaggaaatatatatgaatgtcgttgaagtctattttgagactgctaaagctattaattgatactgtgtttttatgcccaaatcccagtatgtttatgtaccaataatgactcttacccagcgcatgtctttatcagtgtgtactcgtgacgatttgtgtgaaaatagacttgatgtttataattaataccatyac

SEQ ID NO: 238297 - DNA, 777 bp, Homo Sapiens
  misc_feature (55)..(55): n is a, c, g, or t
actggccaggcgggaacccccatgacggcggttatccttggtgtttaagggcggnacaaagggcacccaaactttggggatggtacttaacgctcctcagggggtgccaaggagccccctgggacagggttaaggctcccaaacagctcctcaaggtggcccagctctccagggagcttctggcccaaggccgtctgagggatctgctccttaaccccccagtgccttggcgagggcaggttccaagccacagacgcctgccctgagtggactctacggccagtccctggtgccctcctggccctgctgcccagtgagggctcctacgggtgggttcattggcctgggcccagcaagcccccacctgcattgaccttaggcccatagagagggcctgtcccggtgctgccccagccaggatctggtcgctgccccagggggactgatgggcagagtcgcccctgtggctggactgtgaccatccctgatggggcctgaccgcgggagctgaggaagcgccgctccaccgtctgccctccaaggacccgcatggaggcagtgggctggcagcttcctgctgctccctgtcagagtcaaagcacaaatcctcaggacgggctcaagggccagggcagccgagggaagctccaggtggggaccacgtcttcctgaggttggtgcccactggctgggaccctttgcagtggggtggcctcccctctgtctgcctggtggagggagccgtgggcgtggggacggactaataagccaccaggg

SEQ ID NO: 238298 - DNA, 914 bp, Homo Sapiens
ccsccccccascsgggggkcgcccgcgcgtgggggagcccccgggrcstcccgkaccgsgaccgsgacccccacgggracasccccsgagcgcctgcgcggggagytggagcgcgcgcggcccccgcacctsccgcccgccgcccccgccttggacggcgcgctgctgccctcgctgggagccctgcacttcccgcgcctctcgcccgccgcgctgcacaatgggctcctggcgcggaccccgcccgccgccgccgccctcggcgcaccgccccccctggtgacggcggccgggccccccacgccccccgggccgccgcggagccggactactccgctggggggcctcgggccgggcgaggcgcgcgactactccccgtcccgaaatcccccggaggtggaggcgcggtagccccggggccgcagacgcctctccgagcggagcgcaccgctgtccgtctctccatcagttcctagaactcaagcacagctcccgccgatcctggggcggcgccgcctctccacccgcagcctgcggaggcggggacttgggtgtcggcttttctgagggtgatcttttgttttccgagtttgggattcggctgttgggaaaaaaaaatcgcgtttgtaccttttccccccacagatgagaagtgtttgtaatggatttgtatttttcttaattttatgctctttagacgtttaaaagaaccaaaaaagaaacttttgcttcttcgttttcggttgggatttgcagtttaatggcctcagatccttctccagatccccagggtttctttgtcttatttatggagaaaaaccggtcactttgtccagcrmactgtgaggcccccactcaggccagccctggcccccccttggtacttggaacmgaagttacagatwatatwaaaa

SEQ ID NO: 238299 - DNA, 1000 bp, Homo Sapiens
tcgctstggtgtgckttmttcmgcmcmcmtcmgctcctgctggctacmgcmtccctgtggstgtgtggcctgcmtttttcmtctcctyttkccmcccccgtcttcatcaccaagcccccgatgggcagccaagtgtcctctatgcttaagctcgctctccaaractgctgcccccagctgtggcaacgacactcggccagagaccgtcaatgtgcccgcgtgctggccgacgagaggtctccccagccagggcttccccgcaagaggacatcgccaacttccaggtgctggtgaagatcttgcccgtcatggtgaccctgtgccctactggatggtctacttccagatgcagtccacctatgtcctgcagggtcttcacctccacatcccaaacattttcccagccaacccggccaacatctctgtggccctgagagcccagggcagcagctacacggagtcctggagatggagcgcttacactacatccaccacaacgagaccgtgtcccagcagattggggaggtcctgtacaacgcggcaccactgtccatctggtggcagatccctcagtacctgctcattgggatcagtgagatctttgccagcatcccaggcctggagtttgcctactcagaggccccgcgctccatgcagggcgccatcatgggcatcttcttctgcctgtcgggggtgggctcactgttgggctccagcctagtggcactgctgtccttgcccgggggctggctgcactgccccaaggactttgggaacatcaacaattgccggatggacctctacttcttcctgctggctggcattcaggccgtcacggctctcctatttgtctggatcgctggacgctatgagagggcgtcccagggcccagcctcccacagccgtttcagcagggacaggggctgaacaggccctattccagcccccttgcttcactctaccggacagacggcagcagtcccagctctggtttccttct

SEQ ID NO: 238300 - DNA, 1000 bp, Homo Sapiens
taatttctgaagwaatctaagatatttaaataawaawtttaatgmctggtctwaagattaggaaaatatgctkctttattgcwttccmaagtagcatctkgctagmctwgttgagtcagataacagagagataccacatggcaagaaaaacaaagtgacaattgtagagyccycaattgtgtttacattaatagtggtgttttacctatgaaattattctggatctaataggacattttacaaaatggcaagtatggaaaaccatggattctgaaagttaaaaatttagttgttctccccaatgtgtattttaatttggatggcagtctcatgcagattttttaaaagattctttaataacatgatttgtttgcctttctagatttctttatctttctgaccagcaacttagggagcagaatttaaattaggaagacaaagggaaagattcatttaaaccatatttttacaaagtttgtcatttgccccaaggtcaaattttaaattcttaattttcattttatttcccattttaggtaaaagtttgcatttaatcttagaattatgttttttttgttagtagtgtggaaacttagagaacttattgtatggtgccttgcaaaaatagagatagaaagattttagcatgcataccaatatagtatattacgcaatatataagcacacctaattaacagattaatatcagtaaaggtattgctgctggaatgaagaaaatgggatacgtttgtttctttttttctattgttacataattgccatgtggacttgtttatgattattgtgtagagtagcatttaagatttaactgtagcaaaaattactttaaccgctgtatttaagttagcatgttaattaattgtgtagacattttggcacaccatcacttttaactatatcataccaatggttttgtgcccataataaaaatggaaaaacctgttgaatgttacgtattggtatctttaatttcaacagt

SEQ ID NO: 238301 - DNA, 1000 bp, Homo Sapiens
aaaaaawmatamcatwaaatwtwttawtgaccagtttkyctttgagrttwttytacaggacctctgcaamaattgtatwaattwatataaatatttgtgatattcttaaaggccaagcaatgggcatttatgatggctaatcataaatacacaataatatatattacatagtatatattaattgacaggttgcattttttctttgagcttatacacttttggaaaaagtctaccttttataaatatcaagttggatattcttgtctgttgcatttgctaaataagagtcaatagttaagaatctgtttcttttatatatgtcggattgtatccatttggaatacagaatcccctgcataaaactagcatgttttgctgaagtacttgttaacttggctctaaaatattttttattttcctaatatatagcatttatttttaaaagattaatcccttcacccatttctgcaaggctcttttgtagctcaaaaaattaccataaagggaaagaaagtcctccagctccctactacaattactttagaattgaggtcagaaaactttttctgtaaaggatctgctgcatctattcaactctgcagttgtagtgcaaaaccagcttagacaatagcaaatgaatgggtgtggccatgtttgactcatggttgtagtttgcctacctttgctttagtgcatctaaattaacactgttcatataaaatatccagcaagataaacaataatttggtgctaaaagagagttacagaatctttttcttttagagtcttttaggaaaagtatcatgtattgcttggaaagtattctctattttaaatatatctatacagtttctttctttccttaccctgagatatttattaagaaagggtaatctggagtctagtacataaaatatctttgggtgtatacattatgtaaataggaagtgatattatttctagcattgtaagaaccccagctcccaaataataatgactc

SEQ ID NO: 238302 - DNA, 1000 bp, Homo Sapiens
  misc_feature (982)..(982): n is a, c, g, or t
  misc_feature (984)..(984): n is a, c, g, or t
tcctctagggcggtgtggtcctgttagcgtccaccagawtamagaaaagagtaatggcagcttgcccctacctgccctccccactcaacagaggaggcccccagtccccccacctcctcgccsccgccgtcgtcgccggttactgttctgggacaaggaractcagatctccccggagaaattccaggaacaactgcaaaccagagcccactgctgggaatgtcccatggtgcagccgcccgagaggaccatcagaggcctgcggagttgttcagaaccccaactctctctggctggctaccccctgaactactgggtctctggacccattgtgcccagccacccccaaaagccctcaggcgagagctgcctgaggaggcagccgctgaggaggaaaggagaaagattgaagttccaagtgagattgaggtcccgagggaggccctggagcccagtgttccccttatggtgtctttagagatctccctagaggcagctgaagaggagaagtcccgcatcagcctcatcccaccagaagaacggtgggcctggcctgaggtggaggcgccagaagctcctgcattgcccgtggtgcctgaactccctgaggtgcccatggagatgcctttggtgctgcccccagagctcgagctgctctcactggaagcagtgcacagggcagtggcactggagctgcaggctaacagggagcccgacttcagcagcctggtgtcacctctcagcccccgcaggatggctgcccgggtcttctacctgctcctggtgctctcagcgcaacagattcttcacgtgaaacaagaaaagccatatggtcgcctcctgatccagccggggcccagattccactgaggttagagtccatttacaaagctgccaggaaaccggccacttctagtaaaccacgtcgtgcctcactgggtcctgcttacctcatttctgaatgtgcatttccagccttctngntctcagagctattgtt

SEQ ID NO: 238303 - DNA, 925 bp, Homo Sapiens
  misc_feature (89)..(89): n is a, c, g, or t
  misc_feature (242)..(242): n is a, c, g, or t
  misc_feature (261)..(261): n is a, c, g, or t
  misc_feature (264)..(264): n is a, c, g, or t
aggtcagaaggtctaagcccatctgggcataacacggataaaacccggttttttcttaaaataggaaaaaatttccaagcttggtggcngggcggccgtaagttccagctactcgggaaggctaagccaggagaatgggcgtgaaacaggaagccggagcttgcagtaacccgagatcgcgccactgtactcaggctgggcgacagagcgagactccgtctccaaaaaagaaaaggaaaaanaaagtgtgcagcacctacncgngccccttgtccctgctgtggccacgtgacatgcctgctcccactctgccttcaccgtgactgattctgaagcatccccagaagctgagcagatgccagcaccatgcttcccgtacagcctgtggaactgtgagccaactaaacctcttttctttataaaatacctggtctcaagtatttctttataacagtgtgagaatggccgaaaacgacacccagatgcaaacattacctgcaggccactgcgtgctgactctctcaccaagcaggagcgggcccctccctcacgcggagccgctggcacggacagccccgggaaggtcaggctgagcgtcctttcctctgtgcacccccggagggtgctcccattggctttctcagatagcaccatctcagggtccagctggccatggcctggattaagtttaaaatgctgggccagtccccacttccctatatatgactttttacaagtctgacacttgaagcttttgggcctcagggagcagcttgataagtcaaagagcgcctgcctctccctctgatcttcttccacactgacttctgaatcatcatcagaatctggcagatgaccgtcggccaaatcatccctttttatgaactcagctttagctttatactggcagggtcgagatcctgtc

SEQ ID NO: 238304 - DNA, 998 bp, Homo Sapiens
tttttggmatatattttgttkatkaytttcaattggggttctttgcccbccttttgggttactgttggtatttccatttctggctymatttatggtaaccatcaaaactgcttatatttctggttagggcgaagccatttaggaagaagcatttcaccagaacaagtaaaagttaattgcagcaatgatgtcagttttggcccctagtttaataaaaggataggcaaatatcataggaaatcttcatggtttgtaggaaatcagtgtttgcaacgtaggaagtttcatgggatagggaaggtataaatcaagatagtaagggyyttgyyttatatgtcattgtcttaccatgctccccacctatttaatcttctgtyttaagctaaatttatggaaaarcacctacctttttgagtggcagaagttcttaacaaaccagtattgagaaataagaagggatgtagttaaaatggttttctgtttctctttaaagttgaagaatgatatatttaacaagagttgtgttttatttccagttttccagtagcatatatgtagatgcattgaggtcatactgtgagaaaatgtctttagggtatccctccaaaataggagccttaaactttttaacttaaaggaaggcatatctaaaaaccatagtggttgcttttaggtatagtttcctatataacctatagtcagacttatctataatatgaaaatttaattgttttaaaaatgcatacatcggccgggtgcagtgctcacgcctgtaatcccagcacttagggaggccgaggcgggcggatcacgaggtcagaagtttgagaccagtctggccaacatggtgaaaccccgtctctactaaaaatacaaaaaaattagttgggcgtggtgcgtgcgcctgtaatcccagctacttgggaggctgaggcaggggaattgcttgaacccgggaggagaaggttgcagtgagccgaatcsccccmcyccccycc

SEQ ID NO: 238305 - DNA, 834 bp, Homo Sapiens
aggggccaggaatgggcccaccttacagggaaagacacattttgtgtgaagtaaaaatttccagggcagggggcctatgtgtgaaaacaacttataccaggctgggcccagtcttgagtcacctgtcagcacaccagcaggcaaagattggtcaagctgtctgctaatgacatgcggttccctgaactctctctggcattggctcaagctggagcagagatacttacctatccttcagcttttggatccattacaggcccagcccactgggaggtgttgctgcgggcccgtgctatcgaaacccagtgctatgtagtggcagcagcacagtgtggacgccaccatgagaagagagcaagttatggccacagcatggtggtagacccctggggaacagtggtggcccgctgctctgaggggccaggcctctgccttgcccgaatagacctcaactatctgcgacagttgcgccgacacctgcctgtgttccagcaccgcaggcctgacctctatggcaatctgggtcacccactgtcttaagacttgacttctgtgagtttagacctgcccctcccacccccaccctgccactatgagctagtgctcatgtgacttggaggcaggatccaggcacagctcccctcacttggagaaccttgactctcttgatggaacacagatgggctgcttgggaaagaaactttcacctgagcttcacctgacgtcagactgcagtttcagaaaggtggaattttatatagtcattgtttatttcatggaaactgaagttctgctgagggctgagcagcacggcattaaaaagatatatcaaaa

SEQ ID NO: 238306 - DNA, 911 bp, Homo Sapiens
  misc_feature (122)..(122): n is a, c, g, or t
  misc_feature (290)..(290): n is a, c, g, or t
aaaatatgctgaacaatgccatataacttatatggtaagaaatactgggccatgacttttttgcatctgggtagctgtaagggaataaaggatgccaagaagtttaaggaatatgggagaanatagtgtggaaattaagaaggaactaggtctgatattcaaatggacaaactgccagttttgtttcctttcactggccacagttgtttgatgcattaaaagaaaataaaaaaaagaaaaaagagaaaagaaaaaaaaagaaaaaagttgtaggcgaatcatttgttcanagctgttggcctctgcaaaggaaataccagttctgggcaatcagtgttaccgttcaccagttgccattgagggtttcagagagcctttttctaggcctacatgctttgtgaacaagtccctgtaattgttgtttgtatgtataattcaaagcaccaaaataagaaaagatgtagatttatttcatcatattatacagaccgaactgttgtataaatttatttactgctagtcttaagaactgctttctttcgtttgtttgtttcaatattttccttctctctcaatttttggttgaataaactagattacattcagttggcctaaggtggttgtgctcggagggtttcttgtttcttttccattttgtttttggatgatatttattaaatagcttctaagagtccggcggcatctgtcttgtccctattcctgcagcctgtgctgagggtagcagtgtatgagctaccagcgtgcatgtcagcgaccctggcccgacaggccacgtcctgcaatcggcccggctgcctcttcgccctgtcgtgttctgtgttagtgatcactgcctttaatacagtctgtggacataatatcatcagcataactaataaaggtaaaaatat

SEQ ID NO: 238307 - DNA, 1000 bp, Homo Sapiens
actvmcckgggcttrvcckgaaawtaamagataawcgwmaywaacmawtctattggmaaytgtwaaaagaaataacccycattccggagtwtthcctattcaaakgcaatacawtttttgtttctaatatattaggktgcacagaaacactaagattgtacttaaatatggactgaggaccattttaaacattacagtaaagtagtgatcacaatttcatctggttatattaaaagtgttctggaatggtattgggaattgatttttttttttttgagatggggctctcattatgttgcccagggtggtctctatcttctgggatcaagtgatccttctgcctcagtttcccatgtggctggtactactggtgcatgccactgtgtctgtcacattttttaaaatcataaactgattctaaattataaataaatcaagaggaaagacagaggacttactatggtgctatcttgacaacatcaaagtaactaatccccaaaagtttattcaaaaatcacaagttgtttcatcttagacccaatttctgtaccaaataaagcctattatactccataatgaaaagtacagataatgaaaagtacagagcccagtgatgcttaaatgatgccatgtaatctaatagctttgatgagtcagtttccaagatatataattatattcaaagagttctgtctggttctgttgatactacaatcaaattcttccttcgctgcagacaacaccttgtacttaagcagaagctgagtcatgccccccactatacgcctctaacaacggatatgtgaaagtcttagagctaaatgtctgagtggtcctgttttataacagatcaatagttcctgaaattagtatttgccttccaggctaaaatattttttctacagtgttccaaatattcttgcatttcttaaagtcattgtcataaatagcaatgatgctttgataatcctgataacaaactacttccaaactgcagcaa

SEQ ID NO: 238308 - DNA, 683 bp, Homo Sapiens
tcagaaaaaagatgctaatatatttatctcattgtttacataagcttttacagtttcagacctcagcagctgtaaggccagtccagggaaccctcccctgctgctggaaacccttctgagttggccctggagtggctcacgggcagagaagggtagccctggggctgggggagggattggaagcctccctggagtcacctgagccctcgtccccattcccagggcccctccaagcccagctggcaccaaagagcttgggcccgtgctgaccagcccccaaggccctctggccggaccatgctggtcctgaccagctagcctacgcggggatggccgtcagttctggccacaggacccgagtctgggcttgggtccccctgctgctctgcccgtgacccttggggatgggttgatgcgagggtcccactcaagccaaaaagccgggacctttgcgcagctctgtcgactctggtgggtccccactcctggggccccctaaccccaccccaggcagcggaaggggctgactgggtctggtccttaccaacatagacggtgcaaacactcttaacagtgttgtttttgtatcaatatgtttgtgcagtgatgaatgtatttatttctcagacttggggcgagtgagcgggtggcaggccgggctccgccactgcatgctcccgccg

SEQ ID NO: 238309 - DNA, 977 bp, Homo Sapiens
  misc_feature (955)..(955): n is a, c, g, or t
aaggaaggcaggytytragagksarmcctkatsmggtgaagccargaggmagdaytcccaggcargtctggaaggagcgaggtggtgacggaagtgtcagcacctcaaggcatgagtaaggcgctgcccttctctccaggcacagaggagtcactggaagctgggcaaagagctgggatggatgagaccaaggcgaatactttacttattaagctgcaaaggmccctagggagcatcttgtcttmccaggcaaacaaaggccagggagggaaagtagtgagtctccagggtcacacagcaaggaccagggcccgcgcmaagactcccacccctgcagaacccagctcaaatgattccttgagcccagtgtgtggctccacaaaagaaagttcctggcacttttcatattyatttataattttttttctgattataaaagtaattataggccagtcaaggtggctcacacctgtagtcccggtactttgggaggccgaggcaggaggattatgtgagctcaggagttcgggaccagcatggacaacatggcgaaatcctgtctctacaaaaaattagctgggcatggtggtatgtgcctgtagtcccggcttctccggaggctgaggtgggaggatcacttgagcctgtgaggtcgagactacaccgagattgcactaagccgagattgcacccactgcgctccagccttggtcaacagggtgagattttgtctcaaaaaataagtaaaagtaattataggtcatcatggaatatttttaaactatagaaatataaaaaatatataatcacctgtaatcccaccatccaaagataatcacctttagtattgtgatgtattccctccatctgtattccacaaaaaaattatatattaattagatttgaattgtgtatagtttcacatctcccttttcctctgtaaaattgtgctttnatgagaaggagggattgttttt

SEQ ID NO: 238310 - DNA, 915 bp, Homo Sapiens
gtgttccctctgagggctgagagggctgagagcaagcttgagagctgctaaaggcttacgtgattgcaagggttcagttccaaccatggtcagaggtggcacatctgctcagccatctcatttttamgtaacgctgatctccagctccagcgatggaacccactacagaggaggtggggcccctgtgtcaaagaggccgaggggcagcaagggcagccagggcacctgtgacttcttagtacaagattgtctgtccttcaggacttccaaggctcccaaagactccctaaaccatgcagctcattgtcacaccaattcctgctttaattaatggatctgagcaaatcttcctctagcttcaggagggtggggagggagtgattgctgtcatggggccagacttccaggctgatttgccaaatgccaaaatgaaacctagcaaagaacttacggcaacaaacgaggacattaaaagagcgagcacctcagtgtctctggggacatggttaaggagcttccactcagcccaccatagtgagtgggccgccataagccatcactggaactccaaccccagaggtccaggagtgatctctgagtgactcaacaaagacaggacacatggggtacaaagacaaggcttgactgcttcaaagcttccctggacctgaagccagacagggcagaggcgtccgctgacaaatcactcccatgatgagaccctggaggactccaaatcctcgctgtgaacaggactggacggttgcgcacaaacaaacgctgccaccctccacttcccaacccagaacttggaaagacattagcacaacttacgcattggggaattgtgtgtattttctagcacttgtgtattggaaaacctgtatggcagtgatttattcatatattcctgtc

SEQ ID NO: 238311 - DNA, 911 bp, Homo Sapiens
  misc_feature (866)..(866): n is a, c, g, or t
  misc_feature (892)..(892): n is a, c, g, or t
ctacaccggcagaaaggaggacatcaccgctaaggcaagccagtgaagatgctggaccaagcccacagaccagagctacaaaatatccagcagaggagcctgcttcagcctggaccccatccccaccgcctgtcaccacctcctcctcaaaggatgaggaggaagaagaagaagaakgagacaaaataatkgcagaactccaggtatgtggatgaggtgactgacattggctccttgcctcccgcctgggtctctccagccatggcactcacagatttgttagcgagaaggccagggaagcgcatggaccgggaccatagaagctgtgtcttctggccttagcctttgctttcccaagatggcgctgaacaaggctctcaggatgcctataagatgtgcaaggaatgaccatttcacaaaacaactcacgctttcctacctctggctgtaaaattgactttcctttctttccatcttaagagattctgcttcatttcaaaagcaagtaagataaggattagaaataccagccattgtcctgtcttgataaggacagactgaaggacacgttacgtgggttcccgttccttggctttaccacttagagccactgaccttggatcatggactcaaggccaatgactggcctcctgtggtccataaccaggtccctgttcaatatcaatgtcatcttttcagatattctgaaaagctgaattattttgttttccattttccttggtctatttgagaaatgatactgtatcagttttagatatttattttttaactatgacacagtccactcataggatgaaggatggcgtgccaaggctgtgcccgaaractgatcccacattcccatnacggatgtgattctaccccaggtctntgtcctgagaacttgctca

SEQ ID NO: 238312 - DNA, 965 bp, Homo Sapiens
  misc_feature (21)..(21): n is a, c, g, or t
  misc_feature (37)..(37): n is a, c, g, or t
  misc_feature (119)..(119): n is a, c, g, or t
  misc_feature (132)..(132): n is a, c, g, or t
  misc_feature (171)..(171): n is a, c, g, or t
  misc_feature (330)..(330): n is a, c, g, or t
aagccttcatgtctgcttaancgatttaatggtttanaggtcccaagggctgctgtttagtcagcctgtcaagtctatgaaagggcgctggagattatctgggccctactcacacatcntgcccttcagagnaccctgtggggcccgagtctgcgctagcagggctgactnccacctgtctaccagtagctctgagggtgagagccaggctccctgtctccttggcaaagagcttggactgagccctctaggagctgcagccactgtctggggcagcaagcttagtactcagaggggctccagcccccagctgagccagacagcaggccntccgtctagaatccgctttattatggcacctggtgggtctggtgggatctgagggaggaagaggctgcagtcttgctgggcagcccctcggtcagtccagcagcccctcaggccatgctgctgctcagctgcatggcaaagtcctgcacatgctccttcagagtctggcgggcatctgcctgtgcccgcttctcccgtgcccgctcctgctgcagcttggtcagtctcaaccgcagccgctgctcccgccgcttgcaggcctgcagctggcgctgggccttgtcaagggcatcaagggctgcctcggctcgccgcttccagagtaaggcgctgcccacctggtagctgtgttcattctggatgtaggctccggcgggtgggggcaggcgcagcatatacgctgagggggagactggccgtggttcgagaggggagggctgccgctctggtgaaggctgggcgctgcagcctgcttcatctgcctgggcacccaaggggcccagtaggtctgaaaaggggctgctaaggccaggctccagcctcccagatggggaggccggcaaagtggcaggtgctgaggcctcttccacaggaaagcaggtgactcagcaggtggaggggagaaaaggagtgtg

SEQ ID NO: 238313 - DNA, 870 bp, Homo Sapiens
ctgtcagaaaaaataagcagttactccctaataggcaccttccaatctgttgcttttgaccatgtctgtccaacggacacacctcaaacaaacaaaactaccaaatagatgacagatcagaataaaggtaagaggtctggtccccattgaaggctgctacagtcttcaaagaggtgaaggagttcataagagaacaacagtaggaaagttgagagccaagggtaggagagttgcccaaaagacttcccctactactttagggtactgaaaactcaaaggatcagctacagctttatctaagtatttactaaatgctacatgagggtgtccctgtccagctttctggcacatgagtcctgtgtggagagttacctcctcttccagggactgtgctgttgggaactttgggcaagtcacttacctctttgtgcctcaatttctgtataatatttctaagctacctcactgaggtggtatgaagattcactaatgtatgtagcgtgtttgtcaatcctccagtgaaaagcactatctagatcacattttggatcacattagccaaatgcagtaaatggccaaattagatgtgtgctgaagacaatcagtcactgggtctatattaaacagcaaccagagcaacaaatggcaaacaatttctattttcaagtttctttgcatatttttttggtgcaaaaccatttataaacttttttttctaacactagtgtctacagcagcattcaaaaaaattctgttaccttttctgtattaggatttaaagtctatttcttattgtatacctgattgaagctgttcttggagatgaatgttttaaatgtctatatccaaaaaataaaccattttgatgta

SEQ ID NO: 238314 - DNA, 886 bp, Homo Sapiens
gagaggctttttgcaggcccctattcctcaaaaaacccaacctgccccgggggccgggtcataagctgtgctcaaggaagctggaatctgaccctggtggcgtcggggcccagtctccatggcaagcgagcatttattacccggggcttccacccagctgggcagactttagacttgaggctggaggaaagggaactgaacccggttctgggagcagcaagcccacgggtagcagccgaggccccagaatgagtacaaggaatgcttctccctgtatgacaagcagcagagggggaagataaaagccaccgacctcatggtggccatgaggtgcctgggggccagcccgacgccaggggaggtgcagcggcacctgcagacccacgggatagacggaaatggagagctggatttctccacttttctgaccattatgcacatgcaaataaaacaagaagacccaaagaaagaaattcttctagccatgttgatggtggacaaggagaagaaaggttacgtcatggcgtccgacctgcggtcaaaactcacgagtctgggggagaagctcacccacaaggaagtggatgatctcttcagggaagcagatatcgaacccaatggcaaagtgaagtatgatgaatttatccacaagatcacccttcctggacgggactattgaaggaggagaatgggagagcctcccctgggcctgaaaacttggagcaattaattttttttaaaaagtgttcttttcacttgggagagatggcaaacacagtggcaagacaacattacccaactatagaagagaggctaactagcaacaataatagatgatttcagccatgggtatgagtagatctttaataaaagatttgtatgattt

SEQ ID NO: 238315 - DNA, 869 bp, Homo Sapiens
aaaaaggagccaaaactgggagatggagttacttgcccattggtgatgaggtgctacattacagaaatgaagatgctgttgaatgagaaaaggggaattcccaattgaaactgaaaggaaaaacattttcagttaacaaaaggacatgatcaatgtgaagagattcccagaaaacactatatgtgaaaaaagttgttccgaatgtaattgaaccttccttcggcctgggtaggatcatgtatacggtatttgaacatacattccatgtacgagaaggagatgaacagagaacattcttcagtttccctgctgtagttgctccattcaaatgttccgtcctcccactgagccaaaaccaggagttcatgccatttgtcaaggaattatcggaagccctgaccaggcatggagtatctcacaaagtagacgattcctctgggtcaatcggaaggcgctatgccaggactgatgagattggcgtggcttttggtgtcaccattgactttgacacagtgaacaagaccccccacactgcaactctgagggaccgtgactcaatgcggcagataagagcagagatctctgagctgcccagcatagtccaagacctagccaatggcaacatcacatgggctgatgtggaggccaggtatcctctgtttgaagggcaagagactggtaaaaaagagacaatcgaggaatgaggacaattttgacaacttttgaccacttgcgctaataaaaaaaaaaaaaaactactcttatgtccactttacaaaagaaaacagcattgtgattactcccagggaccgtattttatcttcagtggctgccgtattttacccccacaattaaagttgaaggaatcc

SEQ ID NO: 238316 - DNA, 867 bp, Homo Sapiens
  misc_feature (16)..(17): n is a, c, g, or t
gatggaagggggagannctgtttgacaaagtggtggggaataaacgcctgaagaaagctacctgcaagctctatttttaccagatgctcttggctgtgcagtaccttcatgaaaacggtattatacaccgtgacttaaagccagagaatgttttactgtcatctcaagaagaggactgtcttataaagattactgattttgggcactccaagattttgggagagacctctctcatgagaaccttatgtggaacccccacctacttggcgcctgaagttcttgtttctgttgggactgctgggtataaccgtgctgtggactgctggagtttaggagttattctttttatctgccttagtgggtatccacctttctctgagcataggactcaagtgtcactgaaggatcagatcaccagtggaaaatacaacttcattcctgaagtctgggcagaagtctcagagaaagctctggaccttgtcaagaagttgttggtagtggatccaaaggcacgttttacgacagaagaagccttaagacacccgtggcttcaggatgaagacatgaagagaaagtttcaagatcttctgtctgaggaaaatgaatccacagctctaccccaggttctagcccagccttctactagtcgaaagcggccccgtgaaggggaagccgagggtgccgagaccacaaagcgcccagctgtgtgtgctgctgtgttgtgaactccgtggtttgaacacgaaagaaatgtaccttctttcactctgtcatctttcttttctttgagtctgtttttttatagtttgtattttaattatgggaataattgctttttcacagtcactatgtacaattaaaacctga

SEQ ID NO: 238317 - DNA, 880 bp, Homo Sapiens
aaaaacttgggcaatgggcccggggtgtaattaaaggtctccccccttggccggagctaaaggacgggccctctcaaagacccctccaaatggtaagaatgggcctttttccaaagtttaaacttcgggccagggattaagcttctttggtgcgaacttggattgttatggccccaggaagttgggttccctctttctgtcacggacgtcaggcattcataaggacctgtatttctctgcctgttaggttggagacttaaagaggacaaagtgacgcgtcatgatggaggcagctcagacgggcccctggcacacatcttcagacatgcggccaaggagctgttcaacgaggatgtggaggaggtcacttaccgagccctgagaaacaaagacttccaagaggtcacccttgagaagaacggagaggtggtgttacgctttgctgcagcctatggctttcgaaacatccagaacatgatcctgaagcttaagaagggcaagttcccattccactttgtggaggtcctcgcctgtgctggaggatgcttaaatggcagaggccaagcccagactccagacggacatgcggataaggccctgctgcggcagatggaaggcatttacgctgacatccctgtgcggcgtccggagtccagtgcacacgtgcaggagctgtaccaggagtggctggaggggatcaactcccccaaggcccgagaggtgctgcataccacgtaccagagccaggagcgtggcacacacagcctggacatcaagtggtgaagtcaggccagggccttccagctgctcttggggccagagccaagagcctctcagtagagggaggggctgcccttagggaggtattaaagacactcaa

SEQ ID NO: 238318 - DNA, 902 bp, Homo Sapiens
ggtagggccaaaaagaaagtaaacctttttcgggaggggatttcagataagaggcccaacccattttttgctggttatgactttgttgaactggcagtcggggtcaacttggaaaagaaagctgtgcccataattataaaaaaagacaaaaggattctttgtgacactgagaccttctgcagtaccacagtggaggaaatgcaggtgtacacaactggcctcattttaattcctgggaggagatagtttgggatgcagtgcttgttgttgctaagcaggcgatcacagcatgcactgtgtttctttctttgagaatatttgaatcctgcctgaatactcgtaacagatgagagacgcaggttttgatagcatagatttacgctgtcattagtcatgagctcttgggacgaaagtaattggttttatcctctttagagttagaccctgtggttgggtatgaaagatgagtgtctgtaaaaatccttcttagaaatgtatttcctcaagactctgtctcaaaaaaaaaagaaagaaatttatttcctagttctgtaaaaatcgctatattgagtgttctctatcacttaataatatacttattattaagtggacttaaagatatgcagtgtataaaatcagctaattacgttaaaccatggtatctccctttattgtgttagactgaatagaacaaactttaaaataattttttaaagaatatatttgaattcattttgtttgataatatgtttttattcagaaaagcattttattagcgctaggtgtgaacccgagccttttgctaaataccagcagcaatcatgtcctagagttaaatcccagaaaaattgccatattatatattaaaggttccaataaattacaaattaaagtattttttc

SEQ ID NO: 238319 - DNA, 881 bp, Homo Sapiens
aamattyawtgctgatcaagttagaaacttatggcagcggctatattaacaaaaatacaaacgkgacactaataacaacatttatctacagtcattttmccagttgtgcagcctaaactgccattatcttgtttagtcattcctaagatgcgttatttctgacatcgaaatatcctgaaattgggaaactattgacccaaccccaactgtgttagaactgcatgaacacctaagatgaaggaccagcatcacagcagcacatcaggccaacaaaggcagaagtccagcagcaggagagggcaatcgcacgaggacagcatcgtgaggtcagctcaccgacactctaggtgtgcaggcttatcctgatgacaagagccatggacctcaccatgtgtctgaaaaccgcaatgttgctacttaaatgctaagcctttaatggtgcattaatagatggttaagtagcatattagcagcttaaatctacataagtcagctgtgtactgactgtacctcacagtaacaaattcaccaaatctgtatcttttcttctttgtaacaatgttaaatattggtatatctcagttctcaggtgtgattccagcagctatggtgagaccattgctgctcctgaatctccactttcatttgccttcactggtgtcactgtcgctgtcactgctgctgtcagtatcactgtcactggtcaatgcagttagattacttmgggcttccctgttaagaaaagaaaatggaggattacactgcaattcaactgggtgctggggttctcggtgtctctgacactcacctatagcctgtcagttttgaaatcagaaaaagggaccctgcagttgcattaaactatattagaaacaaaaagc

SEQ ID NO: 238320 - DNA, 978 bp, Homo Sapiens
  misc_feature (147)..(147): n is a, c, g, or t
  misc_feature (160)..(160): n is a, c, g, or t
  misc_feature (336)..(336): n is a, c, g, or t
  misc_feature (340)..(340): n is a, c, g, or t
  misc_feature (346)..(347): n is a, c, g, or t
  misc_feature (352)..(352): n is a, c, g, or t
  misc_feature (354)..(355): n is a, c, g, or t
  misc_feature (371)..(371): n is a, c, g, or t
  misc_feature (375)..(375): n is a, c, g, or t
  misc_feature (382)..(382): n is a, c, g, or t
  misc_feature (389)..(389): n is a, c, g, or t
  misc_feature (394)..(396): n is a, c, g, or t
  misc_feature (400)..(400): n is a, c, g, or t
  misc_feature (403)..(403): n is a, c, g, or t
  misc_feature (408)..(408): n is a, c, g, or t
  misc_feature (410)..(410): n is a, c, g, or t
  misc_feature (420)..(420): n is a, c, g, or t
  misc_feature (929)..(929): n is a, c, g, or t
  misc_feature (931)..(932): n is a, c, g, or t
  misc_feature (934)..(935): n is a, c, g, or t
  misc_feature (938)..(941): n is a, c, g, or t
  misc_feature (943)..(943): n is a, c, g, or t
  misc_feature (945)..(949): n is a, c, g, or t
  misc_feature (952)..(952): n is a, c, g, or t
  misc_feature (955)..(957): n is a, c, g, or t
caaaatgttrgttwctgtgttcatgttgtawatgtatgtgtttgtcctgwcgycygtkyakygtgtagwcaagwttacmrtymagwtgtwtaagtacaaagwrgwccagtttacacaktwtkwatwcaaarwattcgtcaaagtktntccccctccatwntawtaacaacytyaatttcwcaawcmatwaatktvtcttatattaaatttwatttachttaacaaaaattytcaawktttcmattacaktctkcakyaaataaaaawadaaaaaaaatawataaawwatatatayayawcacacacabyacaaattattgtcttgttacwacctanaaangttacnngtctncnngtgtktgtaaagcacncgtngtgtcangtgtaangtcannngtcnaangtaantntaaaagtcanatataaaacaaracaaacaacctgccacaatgtgatatgtgtaatatcatttcataaaaatccctcttccgccaaagcctgggcagaaatgtgctgcaaagagttatatgacttcttgttcatgttttgctaatgctcgtatctccttgattacataatgttagtagcactgagacccccatggtaatgtaacttaattataagctatgtcactaccctcctgtaaaatactattggacagacacagagggacccttggctcctgtgtctggtccacacaccacagaagcttgtattatcagtgaatataaatgtactacatttgcatgccttttgggtttgccttaattcttacctcatttgcatcctatcgatctggaaagagctgttttggatgaatgcagtataaaatgtaaaaaccctgctaaatgacttattgattaagtatatctatctatatatacatatacacaaagatattatttatcgaaagtaaaaaagatggaagngnnannggnnnncngnnnnnaangtnnnaaaggcttgacaaggkggtgg

SEQ ID NO: 238321 - DNA, 854 bp, Homo Sapiens
ccaagacccatatactgagaaacccaagggttgccgggacggtgtgtctggaaaacccctggccccaaagaagagccatctgggcaggtgccccggacaatggcaagcaatccgcttttccgctcctggcgaagaaggaggtgttggcccatggccaacagggggccccccaagttactagtccatgctgcccattaaagtgcgggcgctgggtctcaaagtggcactgaccgtcaagctggcccaggacgccttgcacatcatggactccctagaactgcccatcggagacccacagtacctgacagagctggcgcactaccgccgctggggggactccgtactcctcgtggacttaacacacgaggagatgccacagagcatcgtggaggccacctctaggcttaagaccttcaacttgatcccggctgttggcctaaatgtgcacagcatgctcaagcaccagacgctggtcctgacgctgcccaccgtcgccttcctggaggacaagctgctctggcaggactcacgttacagacccctctaccccttcagcctgccctacagcgacttcccccgacccctaccccacgctacccagggcccagcggccaccccgtaccactgttgatgtgaagcacctcttctgagccaggccgagcccctggccgacttgggagcctcaggcccacgcccacccttcgaggaaggtgtcacctggaccccttcattccacggaggaagctgaggccacagggagcggccatcgccattgggaaggggcgactccacggagagcccagacgggcttctgcatccattccctcttttgtttttaaaataaaatgattttt

SEQ ID NO: 238322 - DNA, 1000 bp, Homo Sapiens
  misc_feature (23)..(23): n is a, c, g, or t
aaacccccctkgscccyccyccngamadcccttycccccyagaawtactgcctgctttatatgkattcccakgwatgwttcctaawtaatatagtttgtttaacttatatttgaaactatgwaracagaataawacacatycttttgtrgctmacttctttcaagcaacattgtgattttaaaactcataactagttcacatccaagcatttgggtaacaatggtgagttaagagggttcacatttgatgatttgtcctgaatatgaaccatgtttgtcttgcttttgtcctgaaattccaatacccagttttatgatggaaattttgtaaaattcaacttgaaccgctcagaagagtctaactgatgatactcatttactggggacatagtatgtgcccaagaacttsacatgcaccttctgtcttccatttagtcatcgttacctttagaaaaagctgattccgttaacaagatctttggagggaatcagcttcacaaacgtagcagtgggtgggggtcatgttggttaaccagttcacacatcagctcactaaaggaaaaaatatttctgcaaaaaatcttcacttgtcagaggggggtgcatgaaatttgagagccatgtgttatgcatccagctcttgaactggtctcagcttcagctggctgcagtgccctaggaagttactatgggaaaagtggaaatagttgaggcccagggaactgatcaggccagaggaagtggaagctcaagatcaactgtgcttattttgctgatggctgggcctaaatgccccaaccacctacttgggacaggaaatgacaggaccctctcaaccttggactgggaaaggagggcttcctggcccctgacagaccctggggtcctgaggctaccttagttgggattaaatgcccgtattggtctctagctgtcactccctctgctccttcctcaatttctgcacacatctcagagcttcctctagcagctcttcgac

SEQ ID NO: 238323 - DNA, 933 bp, Homo Sapiens
ctccagaaktgccttgtggcattccctgcaccatttcctttctggtcctatactttcccaagtgcaggaggtcctgggggtatgcctgtgtgcctggcaacatccagcattgtgtttctgctccatctaggtgtcccatttctccagttgcccctcataaggcatcaaacctccagcaaaggaaggcaacaacccatggcctgaccacgggatctacaggttcagatctcaccagggatagcccagacttcaattcttgcttttttgggtatcagggccccaatcccttagtggccagggactcaaagtttggaataatcccagccctgccaagcattaagggtgctggtggggagtgtttgctggctgttcatgaacctctggtgtcctgggcctctctccactagacatggcagcatctctgagttacagattgcaatgtgttgccctgcatggttgaactgcttcggacatctgctaggcatcccatgtgccctgtcccctcttcaatgccagtgagtcacaatggcctatgcttattcacagcaataatacctagggagtccccatgaagcccttttgtcctggtccctcactctgcgtgggtctcctggggaggcagctgctgagtgggtcagttcatgagaacctgcatttatgaagccctgggctgtgtaggcatcaccctgggatgcagacaggttagaggcccagcccttaggggagccatggcagggagagtgccttccaccctgaggccacccagacctggaggagatgcaggccccagctctgctaaagggcctttgaggtgggtgggactgtctcccagttgggcagctcttgagaaggacacacgaccggtttgtgcgcccattgcctgctctgtgtctccgttggtccctctgtctcttccttttcacatttgtgcac

SEQ ID NO: 238324 - DNA, 959 bp, Homo Sapiens
atacamaagcatghactyactcycccttttagcctataaagtagatctcactgtttaacaggtaaaatggggctgattaaggctgagcaatcaccaagtgtcagaccgcgtgccaaactccacactgtmagatgcgtcacctaagcagcatgctcaggcatgaatgagccttaaaaggccacacagcacagtggttaagagggcggggcctggggttagactgacatcatctgaatccagcttaagtcagtctccactcagggaagatgcccctctcagtcatggtagacctgggcagtgggtgccagctgaccatgtaccccagtcagcagggtgagagtctgttgctatgtgcaaaagtgtgacctaaggtttaggctgcctacaggaaccagaaaactctgattctgtgtcatttacatgtgtaaaatctgaaacttggggccaggacatccaaaatgggaatcctcacttaccaacgttggaggacaccgcccggttcatgatatcaagtgcctcattaaatttgtccttgacagatggatgtgccagcacttggtctgagaacatcgacttccaacccaggtaccacttggtgatctcctcataatttgggctgttactgagccaagagcacagcacctgccaaaaagaaaaattacttgcatccatcgtggcaacaaatgaaggcaagatttctgaagtggccatttgttttgttttgatcctggtcctacaggctagtgacactactttacagggatttatagtagctaaacagtctagcacttatgaatatggattttggagtcagcctggtagctaaagtgcccttgcatgtaaactctctgagcctcagcttccatgtctacacaacagggataccatatcccctaccccatagggttgctgagaggagctgagataaagcaaataaagtgcttggaacagcttctgat

SEQ ID NO: 238325 - DNA, 855 bp, Homo Sapiens
  misc_feature (822)..(822): n is a, c, g, or t
agcgcagagtgaaacccatcctttttgcccccccaaatatttttcaatttggattgggttgaaacccatggatgcagaactccacgaatacaaagggccgactgtacttcttttagagtgttcaaaagtattcctagcaaagaggagggaggagcaaagcatatatcaggaagtaaaacaatttttcttgttgactgctttggtaaaaaacagtttgatggatagttttacatttcactggactagataaaaaatggtgctaatatttatgtagcttgatgctatagttgctttggtatcaaacttaatacctaacccatataagatccttattatataattttgtgatcagtaaaatgatattttaaagagtgatcttaaaaatatgacctggtcattgcacaacgtttgcatttgaaatgaatttttgtactatagggtggatatggagttattcagtgcaagtgtgtgcttaatatcaaaccctatgcaaggagctatgtctagatttttggtccaaatttgcctccttcaagcctactagtgtgagatggaaaaaaatcgattgctcttttaatattatttccattttgaaattctcgacacttgaatgaaggcagtagaggcctctttttggatttctcttctaataacaaaactttatttagggaaggtttccctgtgctatcgtaagtttgttttgagcactgcattcactttaaaattctggaggaacaaaggctgggcacataatcacaaagcccaggccacacaataattcggggttgattttctaagaactatgtattgtttttagcttanagttaatatgtattacctggaaaaatggaataa

SEQ ID NO: 238326 - DNA, 882 bp, Homo Sapiens
  misc_feature (46)..(46): n is a, c, g, or t
gggcaggctcccccagctaaagcagcaaagcaggatatagaggatncagcaagtgatgccaaaaggaaacgggggcgccctcgaaaaaagtcaggtgaaagtggggaaaggatttctacccctctcaagtcagcagctgccatggaatctgcccagtcctcaaggttaccatgggagacatggggctcaggaggggaaggcaactcagctggaggggcagagaggccagggccaatgggagaggctgaaaagggggcagtacttgcccagggtcagggagatggtactgtttccaaaggaggaaggggccccggttcccagcataccaaagaagcagaagataaaattcccttggtcccctcaaaagtgagtgtcatcaagggcagcagaagccaaaaggaggcttttcctttggcaaagggagaggtagacactgcaccacagggtaataaagacttaaaggagcatgtgcttcaaagttccttatcccaggagcataaagacccaaaagcaacacccccatgatacaggtctgtggggaagagtgtttatatccctacgttaactttgcctagtagaggcccttctttgcacttgcttctcatttggctattcttttcctaaggaagtccattctcctctgtacagacagctgagtcacccagtctacttagtacctggttgctgcctctgaccttttcagcttgataccctgggctttagtgtaaccaataaatctgtagtgaccttacctgtattccctgtgctatcctgtgggaaggtaggaatgggctaagtatgatgaatatataggttagggatcttttggttttaaatcacagaaaacctaattcaaacggtcttaaaataaaaaggatttat

SEQ ID NO: 238327 - DNA, 875 bp, Homo Sapiens
  misc_feature (846)..(846): n is a, c, g, or t
gattaagggactccccccaaggtgggtgcggctcatagggctttttaagcatctcttccatgaatgaaaatcggtccagtgaggctgtcatctggaaggttctgccaaagttgggcttgcgccctgggataacatcattcactcttgggggacgttaagaagctcatccctgatgagtttgtgaagcaaaagtacctggactatgccagagtccccaatagcaatccccctgaatatgagttcttctggggcctgcgctcttactatgagaccagcaagatgaaagtcctcaagtttgcctgcaaggtacaaaagaaggatcccaaggaatgggcagctcagtaccgagaggcgatggaagcggatttgaaggctgcagctgaggctgcagctgaagccaaggctagggccgagattagagctcgaatgggcattgggctcggctcggagaatgctgccgggccctgcaactgggacgaagctgatatcggaccctgggccaaagcccggatccaggcgggagcagaagctaaagccaaagcccaagagagtggcagtgccagcactggtgccagtaccagtaccaataacagtgccagtgccagtgccagcaccagtggtggcttcagtgctggtgccagcctgaccgccactctcacatttgggctcttcgctggccttggtggagctggtgccagcaccagtggcagctctggtgcctgtggtttctcctacaagtgagattttagatattgttaatcctgccagtctttctcttcaagccagggtgcatcctcagaaacctactcaacacagcactctaggcagccactatcaatcaattanagttacactctgcattaatctatttgcca

SEQ ID NO: 238328 - DNA, 751 bp, Homo Sapiens
agggcttttgtggccagcaggacggaagaaccggcacgggttcattttgggacccccactacaacatctgtctggacaggttcgggcacaagaatgtggtcaaatcagtggtttcaagtccccaggagcagaaactgctgctcacggccagcgacgacgccaccatcaaagcctggcgctccccacgcaccatgcgcgtcctccaggcacctcgcccacggcctcgcaccttcttctcctggcttgccagccagaggcgctgaggtgtgctgggtgcactggagccaccgggaccccttgaggacatcgccaggctctgtggctttttcccgagcgggagaggtggagatgcttatagcagttacgccttaggaaggggacaaccaggccccgccacacgctcacacacaaacctgctcacgcagctgtgatgcttggcacggggtggccagtgcagatggagcccaaggccccctcggcctcctgggcaacttggggtacacaggatactgggggtgccgctcctcactcaaccccaggctaggggtacacctgacccagctggcctcggcccggggcaccttcggctggtcctgtggggccctggacggtggcccagtggtggcaggggctgctcctggctgtggttgtgcgcccggggcttgggagcggccggtcacgctgctgtgggcccgagtgtgttgcatgtccacgcaccacccgttcagggccctaataaacagtggcaaca

SEQ ID NO: 238329 - DNA, 766 bp, Homo Sapiens
ccgtggaaggccctggaagagaaattattgcggccctccagcttctgtgaagacggtgcataaagggcgttgaaacgggcaagtcctcacaggcttgtcaacaccaagccccaaacgagaaaggctaggaggaccatgcatgctttcctgctcgtgcattccaagctgctggcaatctactctagaccacagtgccagctccctgcgcccggccgacctgcttgccctcatcctcctggttcaggacctcttccccagcgagagcacagcagaaggacggcattcagccttccccgcggagggcccggagcagccagaacatccccgtgcagcaggcctggagccctcactccacgggcccaactggggggagctctgcagagacggagacagacagcttctccctccctgaggagtacttcacaccagctccttcccctggcgatcagagctcaggtgaggaccggaggaaagcaggaggaaacaatagctagctgcgagcgacaggcagcccaggacatctgtcttaggctccagtggacccccgtgcctcctaaggcttgagtgcaggtacccgtgttcctagagcacaggacgctgtctgcggctccccatcttccctgccagctccagcctgaactcaaggactgttaagaccactccactgatccctaaagctgttgatgacaagttgattcatttaaaacttctgtacatgcattctcagactcatcttttttgtaattaaaattaaaaattaagttaa

SEQ ID NO: 238330 - DNA, 876 bp, Homo Sapiens
  misc_feature (871)..(871): n is a, c, g, or t
aaaatgcgtggtaaaggcccaaccttttacggggcttgaagggaatgggttctcgcccaaaagagcattggcccttttccccctttcccttctcccaccaaaagcttgcctaagctgttgggacaaaaatccaaacccccacttggctactcgggcctggcttcagcttgaacccaatacctaggcttacaggccatcctgagccaggggcctctggaaattctcttcctgatggtcctttaggtttgggcacaaaatataattgcctctcccctctcccattttctctcttgggagcaatggtcacagtccctggtacctgaaaaggtacctaggtctaggcccttcttccctttcccttcctctcccctaccccagaactttggctccctttcccttctctctctggtagctccaggaggcctgtgatccagctccctgcctagcatccatgacctgttggatgttacctccaatcagtttcctgtcctacctgcctctttggcttggacctatatggccatgctctggctctacccttgggaagcctgatcccggtgtgtggcccagcttgttcaggccctgggatgctgcatctccaggcaactatgcactttcccggggagagaaccagtatgagaagtgggggcagggcacacattcatctttgtaggaaggtctggcctggggtcgggtgaaggagggcccaggtcagttctggggtcccagtgacctgctttgccattctcctggtgccgctgctgctccctgtttctggagctggatgttccccagctggcagttgagctgcctgagccaatgtgtctgtctttggtagctgagtaaccactaataaaggggagcatttggnccctg

SEQ ID NO: 238331 - DNA, 975 bp, Homo Sapiens
ggtcytgtgatttraaacttggatgycgcmcmccgtgagasagaktctscccgggctktgcaggcaaaagaccgtytcggtttcactgcagggacttacccagccaggtgtgtgtgtctgagccctgccattcggaggcatcaccgagaggttctggtctcccctgcccaggccctgcctcctggccccactgcaggaagcttgagcagatctgaagctcgcctcagaggaagatcccatccaggggaggccctgtctgcagaaagcagagaacttggcttctcctcatttgttgttagggccagtccctaagggactgcctcctaggagtcggagggtccgtggaaatggtctcctcctgcacatctgtgctgctgtgactgggtgcaggtctgagcagaggctttcggagtgagctgagcaggcgagcccgagcacggcctctcagggagcgagcccataggctggggagccgtccctggagatgcccctgggctccttgcggggcatggctgagttcctgcctgtccttggcaggcccgcagtggtggggtggctcaggcagttacccttttcacaaccagtgctgctgggggtgaaggcaacgggtgggtgagcacggacagtgtgagccacgtggccgggagctgggccagcttgctgtatgtgcacatcgtttccatgtgtgcagcagaaattggcgtctctgcacaaagctgattttagtytttctcaccttttcttgctcagcttaaaataggcctctcttcagggacaaggtggccttataccaagccaaagtgctgagggcgcagggagacccgcgagacagggccccctgaagtcctggcggtttctagccagcctcttgaaattgacttgaaggtgtttaccttgcagattattttttccaacttcccacactctgcttcccgcactctgtccttcctcaaggctggcacgctcatcagttga

SEQ ID NO: 238332 - DNA, 1000 bp, Homo Sapiens
ccccrcyccaaatttgragggcaaatktysmmcyttaaakkggmacttccmaccctcgvagtaasgtkgmarakgcgggggttccmaccacccgtccagtcmacaraggaacccctggcccgggagatcaacacccaggaagcatagatgaagacagaaagaaggcaaatytttgggatgcgcccccagcacggggccaagaggaggaacatgcccctggagaggatgaaagatggagctgagtgtgcatgggtcacccaccaggagtgccagacagcactaggagccactgggggagatgtggtttctgccatccggaacctcaaggtagatcagctcttccacctgagtagccggtccagagctractgtggcgcatcctggagcattaccagtgggacctctcagctgccagccgctatgtcctggccaggccctgagctcagcttctgcgggcacaggcaccagcatgaaaagcctaggcccctgagggcctggccacatgggaccaagcggaaccagaacaaggtcccgacaggggtagacgttccacctggggagatcccacctgccgtaggcacatggaggaggagcccagagttgggcactggcaaatgtctcctccctcccatgctccttggcttctgaaggctgaagctcctttggctgggccaagaaggatctagtctgcccactacattctcaaacaagaggacttggaggaaaagagctgctatacatcatatgcagaggaagcttctatgcgctagagaggatcaaggggccacactggaccatgtgaacagccatcctgaactgccatcagctaccacactggactctgcagggcagccatcctggatgatggaagccaccatattgacttggggtataggcccaaactgccttcgtttggtccagggccatcgtgggtgatgacgattgctmtcttgcactcaaggacatttgaygctggtagtatggattatgagatggacta

SEQ ID NO: 238333 - DNA, 889 bp, Homo Sapiens
ggtccaatggccaaaatctccctccaccccttttagagcagggggctcagtcaagctttaaatttggggcaaaaagggttaccaagcatacacccttgtggcgaaaaatggaataaatgttaaggccctcaaataagggatttgggatgaaacagcttccagttagcccttgttatttgagcatgaaagaactggaaacgcttcttacgtcaagatgttggaccttgaagccctcctgaggccaaacatgcaaatctggctgtgacggttcatctgacacctgtgtaaagctgaccagcctgctctgtacagtgacaatgaggagcccctctctagccttaagtaggaatctgtgaagcaaaatgtttgctgccaaagacaagatcagactgtcagtcattaaaaacagcattagcaggatgaggatagcaatggggaagggttgtgggcaatgcagtaacagggaaatggcttcagaaatggtttgagttggaagacaacattcttcatctctcaggacttctaattccttgatgctaaaagaagaggcatggattctatgagcttccaagtccctttccactttaaccttctacaaatctttcagaggactgcctagtagcaaaggttattcctggacacaggaaagacgggcattacagggaccaaagctctgaaaggtgacttttattaccaacacactggctggaaaagggacaaaccacatcacgggtgagtgatacttctcagtcttctctactcattcaacaaaggaaatgtgggctggggcagaggtcttttttcatttaatactggaaaaatattgaagagcatccatgttcacttaggctggttttgctatacaaattgaaaaataaaggcccacttt

SEQ ID NO: 238334 - DNA, 914 bp, Homo Sapiens
cccagagccaaggggtcaggactgccagtatgaaatcacccttcgccaagcgggaaagaataccccgggtgccaaagctttgtggggctctgcattgcttgctgggaataaaaaaggtttaagatgtgaggggcattatccgggtaagcgggaactgggcagtggtccagaagcttcgctttatgtgggaagaaagcgtgcggtcacctccaatggagggtatgtgttccaagacaggcaggacaagaaggtcggttaaatttggacagtactgagtgggatgacattcatgtggtcaccggagccctgaagctttttctccgggagctgccccagcctctggtgccaccactgctgctgccccatttccgtgctgcccttgcactctccgaatcagagcagtgcctctctcagatacaagaattaataggctcaatgccaaagcccaaccatgacactctacggtacctcctggagcatttatgcagggtgatagcacactcagataagaatcgcatgacaccccacaacctgggaattgtgtttggaccaaccctgtttcggccagagcaggagacatctgacccagcagcccatgctctctacccagggcagctggtccagctgatgctcaccaacttcaccagcctcttcccctgatgcagggaaggaagaagagaaaacatatttccggtcatctctggtggtgagaggctggtgttctgttttgaggatatccctttaaatctcccaaatgactgtctctatcttcatgagtgtgacttgaggtgttgggatgggtgagggagcttctctaaagaggaaagtgagtggattaacccctgcttctcttcttgttccctgttatcattcctccccaacataataatacataaagtggcagtgtttttttc

SEQ ID NO: 238335 - DNA, 905 bp, Homo Sapiens
  misc_feature (902)..(904): n is a, c, g, or t
cctcccccagcccacccaaataaaggatwatttmactgtctgagctcaggctccsgcagcccctcccctcccacactgcagggccgtccccggcttctggacaagacacccagctccgagggggcaggggcttataggaggggccgaggcgtgcgctgccctctcagccctggtggcaggcgggggacaatggccactgtccctacctcactgtgccttcctgtgctccggccacaggagcgtcggcccaggggcggctcctgggggctccagggcaggcgagactgggaaaggcccagccctggagctccagccgaccccaccgtgcccctggcatcctggccctggccgccacctccctggcaccgtctgcctgcagggattctgtgtttttggcttttttaatgtcttaaaatcttttactcaggtaattttaatttcagagagaaaaactgaagtaaatgtcaaaaaacaccagccttaaatccaaagggacagaattcgtgttcttgggtctgtcccgagtgggctcgcgtgcagccaaacatcagctctgggtccaggcgtggcctcagctgggagcctgtgtcctgagcccccggagcgaaggggtgcctggggcatcttggccctctctgggcagacaatgtgtgcacctatgtggaaggccaaggacatgggctgtggccaggcctgtcccgctcaggccccctgcccggcggccgtctgtgtgcggggcctccctcctggctgtccaggacacagcccgtgcagccccagcctggacccaggccatctctggttgtgtctgtgccgactcggtgttgaatcaaatcaggtgtgcgtcaggagccggctgtgtccttcctgccacagctcggggattcattccttagaaactnnna

SEQ ID NO: 238336 - DNA, 1000 bp, Homo Sapiens
ttatcacaayaattcctstgsagaragagccctsatgatggstgyctcaaaacctawyttatcttcatsccattgtatgggctawaacctctgccagtaacyctcycgvcmaayytttmttttggcagtyttaattaacccacaattgctgagggcaattaatacctaaaagaaagtttgattcctcttctaagataycctaggtagtstcatytctaaagaasacttsstsatcactscttstattagtccaytttcacagtgctatgaagatactmcctgatactgggtmatttattaaaaaaaaaaaagaggtttaattsactgacagttctgcagggctggggaggcctcaggaaacttaaatcatggtggaaggcgaaggggaagcaagcaccttcttcacaaggtggcaagagagagtgcaggggaaatgctaggcacttatcaatcagccaaatctcatgagaattcactatcatgagaacaagggggaaatctgctcccatgatctaatcacctcccaccacgaccctccctcaacacctggggattactattggagatttgggtggggacacaagagccaaaccatatcactgctgttgtgggtaataggggaggtgaaattggggggacaattcggcctctttgtgtccagaggttgtgcagttatcgagtgaggtcgatcagaagtctaaagggatctttcaaatggatagtgagttgccttttcctataggtgacaatcagagatttaatgttttaagtatcatataataggtttttctcctgattgtgaattgtaagtgttggtaatacagaaaatgagaaagtataaaccacccccaatcccaatgcccatagaaacgttgttaacattttggagtactttctattagtgtttatttttcccaatcctagtatttttagtaaaactactgtttagtaaatgatttttggtaactaatttcaaaatttatacttcaaccgtttatta

SEQ ID NO: 238337 - DNA, 1000 bp, Homo Sapiens
cctctcccvaagcwtttgacammawgrtgagaakttctaaggctatktwttgttaatgagactccacctactcrgacttcctkggyccagctttacaataattttcccagctttctacactacttgcctggaagccacagaaaagtcataaaaaatgtggctraagtaaaagagtatgtgtctgaaagggtgaaggagcaccatcaatctctggaccccaactgtccccgggacctcaccgactgcctgctcgtggaaatggagaaggaaaagcacagtgcagagcgcttgtacacaatggacggtatcaccgtgactgtggccgacctgttctttgcggggacagagaccaccagcacaactctgagatatgggctcctgattctcatgaaataccctgagatcgaagagaagctccatgaagaaattgacagggtgattgggccaagccgaatccctgccatcaaggataggcaagagatgccctacatggatgctgtggtgcatgagattcagcggttcatcaccctcgtgccctccaacctgccccatgaagcaacccgagacaccattttcagaggatacctcatccccaagggcacagtcgtagtgccaactctggactctgttttgtatgacaaccaagaatttcctgatccagaaaagtttaagccagaacacttcctgaatgaaaatggaaagttcaagtacagtgactatttcaagccattttccacaggaaaacgagtgtgtgctggagaaggcctggctcgcatggagttgtttcttttgttgtgtgccattttgcagcattttaatttgaagcctctcgttgacccaaaggatatcgacctcagccctatacatattgggtttggctgtatcccaccacgttacaaactctgtgtcattccccgctcatgagtgtgtggaggacaccctgaaccccccgctttcaaacaagatttcgaattgtttgaggtcaggatttctcaaactg

SEQ ID NO: 238338 - DNA, 771 bp, Homo Sapiens
atcatgtactgatcgtgtcccaaagtggataagtgttttaaggcgagtaacgaagacaggtatatagtagtagtcatttagaagaatgtattaaaatggtgtatattgaaagaaaatgttctccagtagatggggtttatttttaatgggtcagcaattcccgccacgctttctgaggaatgaacctaagtttatgtgattgttaaaacaatgcgtcgatgttcagggaaatctttttgtttgtttattgaccatacatgttctaactttgtattgaccaaagtatattaaatgacagatgtgtaatattaagcatcaatatcacctaacacatcgtatataaaatataacatgatagatagttggtcgattacattgctatactgcttagttttaactggtttatttttattgtagcagaaatgaactgaaaaaaaatatgggtttgataatcacacacatgaaagtaccattttgtaactcaacaaaagataaaacattcttcatcaaaaggcttctcgcttggtgtcaggttgtcacatgtgaccactgtgcaatgcgaagccatacttcttcagtgcacaaagtcatgtttaaacttggaaaagaggatgctacagtagtttcaaagttcagtgttgtggacccaggaaattttccataagtcttgcttgataacaatgtgattgtacaaaataaatgttcttaaggaaacaacttatgtaacatttgctacctttatgtaaacataaataatgcccatttaaaaga

SEQ ID NO: 238339 - DNA, 826 bp, Homo Sapiens
  misc_feature (792)..(792): n is a, c, g, or t
cctgccttcaaacgggaataaaagccgaaacactgttggaattgaaatggacatttttttttagggcaaaaagggaaaacacagcccagccaattggctccaaccaaaaaagggaacattttatgtcagagttgggacaacaaaaacaaattcctggacggtaaaatggaataaaaagccacatttatatccattaaaggccacacctggtattcattatgggaacaattggaatagtgatatcctcaaggtgtaaaaaatatataaaatatatatatatatgtcaaaaggtaggaaatgcaaaaaagaaaaaaaaaaggtgacagccgcagttggtgctgtgatggccgtgaagtgtcctgggcctcccgaggcctctgacaaataaacaagccatgagtggtgaggacacagtctccttacagtttccattgccaacaacagccatccatatttcttttttcctttgtctttctttttcctttttttttaaaaaaacaaaacaaacaaaacaccttgaatcaagtttgtttgtatatggaggttccacgtctttctttaggcagggaccaggcaggacttcagaaaaaccctcatgagcacattgcaaagatgttagacatgaaattttaaatgtagtttgtacagaagtcacacttttttgtccacctcacagatgtgaactttactttgttttaaaactgatcagttttgccaaggggccagaattattccttgttagaattgctccagttcaagtctgctgctttcctacaatttttcaaattttanaatgtattaaatacaataagctctgtttaaaaaa

SEQ ID NO: 238340 - DNA, 919 bp, Homo Sapiens
cgtttggaccctcccagattttaaaaaaattccggtttgtccccaagctcaaatcctaaaattcggttttacatacacagttccccaagttagaggctatttaaaaaaaaaatgtataaggttattgtttttataaaaccattattttctaattaaaacagttgttaatgcaattgccagttttttctttgaagagtgtttatgtcaatgtttccattaccttgaatgttggaaagatatgatacatgctgcttgttcatcccaaaaatcagtaaccacaataaagtggatgccaaaccatcagacacataaatgttcccgctgtgtccctggatatggaataagcaggtataaaaaatattttaattatagttttgttataaatataacttatgagaaaaaaatttgataggaataatactgtatattactaatttttaactatccctaaggcaaaccttatgacccacagaattttctcatatacagtattcagtgcacagaaatcttatgattggctcaagtacagtaagttacttctcagtaaaactctcaagtctgagtccatatttgtagctctgcttttggctgtacgttcctaggatcggggctgcttatgcctttcgtttatccttggggtttgagagcgctgtatttgggagagagtttaaaaatacattaggagagagaaaccattaaaagtttcactgtcagagatattgtaggtgctaatactggatttcgtctcagatttaatttcttttatgggtctgttagtcattcaacaaatcccataagtatgtgttaatattttaattgtgtaaaactcatttgttactttacagcctgtaatagtgtgtctgcattttcaacctgttgcaataactttgctaaaattacacattaataaactttctta

SEQ ID NO: 238341 - DNA, 646 bp, Homo Sapiens
cccgggaaatgagccccagttaaggtcttcccaaagaaaaaggggcaggggcacgggaggctcacggcctgataaaaacaggcactttggaagagccaaaggtgggcggatacacctgatgtcaggggttcgaagaacagcctgggaaacatggtgaaacactggtgctactaaaaaatacaaaaattggctgggtgtggtgtcacatgccagtaaccccagctactaggaagtctgaggcaggagaatcactttaacccgggaggcaaaggttgcagtgagctgagattgcaccaattcactacagcctggatgacagagtgagacttcatctcgaaaaaaaaaaaaaatcaaaaaaaaacaacccggtagcattgtcccttccccactgacaaacttatcaaatccagaagctttagagtttcgtctctaattatttttctcctgaacaaaattacccaagtcaaaacaaaatgtatttttagaattacggcagcatacgacctgaattttgtgagtttcgtggctttatcttaaatcaccatttccctaaaaatggtttctttctccttagaaatgctggtggcaacttgatgaaacagccaaatgcaccagggcaggtcacttcccatacgcgattccacaa

SEQ ID NO: 238342 - DNA, 1000 bp, Homo Sapiens
tgcabcccaaacactgakatacctcagaratkytcagacttcagaaatgatttcttagarcctgatcctgaaatgcagttktacggcascagctacgggatgctgaagagcagatgcatggcatgaagaacmaagtgtcaggaattgtgttgtgagttggaagagctaccagcatcatcgccaggtcagtgaggaggagcagaggcggctgcagagggagctcaagtgtgctcagaatgaggtgcttcggtttcagacctcccacagtgtcacccaggagttactgtgccggctgcagaagctgcacctccagcaccagaacgtcacatgtgagaaggaaaagctgctggaacggcagcagcagctgcaggaggagctgcagtgccatgaggcagagctgcagcacctcagggatacggtggcctccttcaaagagagcaatgagaaggacacagagacgcacgctcagcttcaggagatgaagcagctgtaccaggccagcaaggacgagctggagcggcagaagcacatgtatgaccagctggagcaggacctcctgctctgccagctggagctgaaagagctcaaggcctcccaccccattccggaggacaaaggaaagtgtgctaataagtcatcccctacccccaatccccccatcttctccttgcctcttgtaggcctggtggtcatctcggctttgctctggtgctggtgggctgagacgtcgtcctaatgcagaacatgtttgggttgtggaagcctatggtattcttggctattgcagctgtggctctgtatgtgttacccaacatgcgacagcaggagtcagagttctgcctcatggagtgatggcagaccttggccagcgcgagggcagatccccagtggccaccaccctcagctttgggcaggacacactgtgccagaaccctccccatatgttccatgtgtccccatctcctcagcctcagtcacccaggctgaaaaggcttgtggg

SEQ ID NO: 238343 - DNA, 799 bp, Homo Sapiens
agcagctgtctcgggttccagagcgaacaacgtggagctcaagtgcaacagcagggaaaattcacttaaggaaaaaacccaaatttccactccacaaagaaacaagctgcaagccccaagggacttacctggggctggcatgtgtgaccgtctcggataaagtgactgacccagtgcacactggatcaaaatgctgctttcctctgtgtctcacagcttggctgagctctgtctctgcaggttagaagtctgctaaagatcaaatgtgaaagtacttggagaaactgaggcctcttatgtgtaatgtgtaagttaagtgagccatatattttcttgcctcttccggacattcatgcttgtgtcccaagcattcccttggtgaattgtcacgtgagtggggccagtaagagtgaagtctgctccttgaatccaagccccatctggggcttctctaacaaatctgtagtaagtatacggactccagggagagaggctgggcttctctctctcatttgttccttgtggaacaaatgggcaaaagaagtgtgaaaatgtgggtgtttatgtctgtgtatatgtattttttacttcatgcatggcttctcctccaacttcctcctgcacttaaaaagggccaggttccaaattagacttgtaaatatggtgttagtgtttgacactactcctggatagttccaaacatcttccttgtggcaggtttcctggctgagcccgagcttccctccctgtttattgtgttcatgatcagtatggtttcaaaatagactttccaacgaaa

SEQ ID NO: 238344 - DNA, 865 bp, Homo Sapiens
cgggacattcatgttgcaccgtaatgaattaggaagacagaggaagcggtctgtgtagaacattgcacggcccactgaaagagatgcccaaattttctatccaaagagaagcggccaagaagtttattgaagggccaccctgatttcgggagccacatcgaggtttttttggaaaagtacaaatgctgaaaagcctaagaatccaattcacgcctttgtgcaagtccggaatctcccttggcggcaagggagagaggcaaatctgtgaggtctggggccctgcacctgtgcagcgaaagcttagcgttcatccgtgtaacccgctcatcactggatgaagattctcctgtgctagatgtgcaaatgcaagctagtggcttcaaaatagagaatcccactttctatagcagattgtgtaacaattttaatgctatttccccaggggaaaatgaaggttaggatttaacagtcatttaaaaaaaaaatttgttttgacggatgattggattattcatttaaaatgattagaaggcaagtttctagctagaaatatgattttatttgacaaaatttgttgaaattatgtatgtttacatatcacctcatggcctattatattaaaatatggctataaatatataaaaagaaaagataaagatgatctactcagaaatttttatttttctaaggttctcataggaaaagtacatttaatacagcagtgtcatcagaagataacttgagcaccgtcatggcttaatgtttattcctgataataattgatcaaattcatttttttcactggagttacattaatgttaattcagcaccgatttcacaacagatcaatttgataatgcctaca

SEQ ID NO: 238345 - DNA, 1000 bp, Homo Sapiens
tatatctttctttggacgtcmaaaatcccagartaaaactcatttcttkgcccgctaagcccctgcggcggtatggacgtgatactacgtggtycacttttgaggcagggagaatgtgtgaaactggtgaagggctgtttatctttcagacccgagacggggaggccatctatcagaaagtccactctgctgcctkgccatagccgagcagcacgagcgcttgctacagagtgtgaaaaactcgatgctccagatgaagatgagtgagcgggccgcctcgctgagcaccatgtgcccctgcctcgcagcgcctactggcagcacatcacacggcagcacagcacgggacagctctaccgcttgcaagatgtttccagccctctgaagcttcatcgaacagagacttttccagcctacagatctgagcactgacagtvactgccaagaattgttaacacacttgtgatgycycacccacagaktcrgccaggaggtcacagaatgacrgcaagggraatgacgrccaagagaagaagcttaaagtcctggctaattgtgtggtcattggaaaactctgcaatacaataattttctttattttctttttcttttttaaattcttagtgtaattgaaacgtgctctatagatattgactctgtgttccctcttttacagctggacagaaagaagtcaatgtcacgaaatgattttctattgtagatactttgtcccttgcacttctctgaatctgtccttttgtggattcttgtgattttccttccaagtgtttcagttgtatgacagtcagtattgacaataaaatggcttttaattatttgttatttgtttacaccctattcctcagttattattactgtggttctgattaactactggaaattatatttgattatatcaccaattagttaaatcagtgcttcgactcactcttatctgttctgttcaaaactatttgttcaaagaacccgttagtgttgt

SEQ ID NO: 238346 - DNA, 1000 bp, Homo Sapiens
tggggcagggccacggctgtgggcaggaggccctgagcaccagccatggctaccatytcttctggsgctgctmactggcttcctcttcgcctcccacctgcctgaaaggctggcaccaggacgctttgattacatcggccacagccaccagttattccacatctgtgcagtgctgggcacccacttccagctggaggcagtgctggctgatatgggatcacgcagagcctggctggccacacaggaacctgccctgggcctggcaggcacagtggccacactggtcttggctgcagctgggaacctactcattattgctgctttcacagccaccctgcttcgggcccccagtacatgccctctgctgcagggtggcccactggagggggtacccaggccatacaacagtgaggccccatccctgaccctgtcctggagggggcagaggccaggccccagtgctgacgaggagcccagatttgggcctaatcaggtggggacgcatctcagcctggaaccaacaggggctgaggagagagggcacaggagagagggcagagaagaggaggggtgtctagggggactggcagagtgtgagagggaccgtgagggggctcttgatgggagtggaagaagtgctgagggtctgagaggggagatgcatgcgtgtccaggctgaagatgcccctatattctgtcaaaggttggcggggggaggtgttggggtcctttcatctggctccgtttctggtgcttctggaagtctctgctcagcacagggaagaactaacacgactaacctaggcctaccctgaatgcttcttgctaaccaggccgagaggccacacacttgcccccccatccccacaaaccaggtaatgccagtttgccagcagctatttgcctatagagatgagtctgtcctggtcataactgtgtgctcaaggtgtccaggcttttgggggtgggcctatctgggtgcattatggatggtttggtg

SEQ ID NO: 238347 - DNA, 890 bp, Homo Sapiens
  misc_feature (26)..(26): n is a, c, g, or t
  misc_feature (39)..(39): n is a, c, g, or t
  misc_feature (79)..(79): n is a, c, g, or t
  misc_feature (214)..(214): n is a, c, g, or t
  misc_feature (219)..(219): n is a, c, g, or t
aggaaaatggggaagcaggaggctgnccaattaggtagncccaagaagaggaagaaggtggggaaggaagagagggagnaagaagaaggttatggttaaggaagagaatggagatgaaaatgagaaaagctgagtcagctacgggcaagcgggcagctgaagatgatgaggatgccgatgtcgataccaagaagcagaagaccgacgaggatgnctagncagcaaaaaaggaaaagttaaactaaaaaaaaaaaggccgccgtgacctattcaccctccacttcccgtctcagaatctaaacgtggtcaccttcgagtagagaggcccgcccgcccaccgtgggcagtgccacccgcagatgacacgcgctctccaccacccaacccaaaccatgagaatttgcaacaggggaggaaaaaagaaccaaaacttccaaggccctgctttttttcttaaaagtactttaaaaaggaaatttgtttgtattttttatttacattttatatttttgtacatattgttagggtcagccatttttaatgatctcggatgaccaaaccagccttcggagcgttctctgtcctacttctgactttacttgtggtgtgaccatgttcattataatctcaaaggagaaaaaaaaccttgtaaaaaaagcaaaaatgacaacagaaaaacaatcttattccgagcattccagtaacttttttgtgtatgtacttagctgtactataagtagttggtttgtatgagatggttaaaaaggccaaagataaaaggtttctttttttttccttttttgtctatgaagttgctgtttattttttttggcctgtttgatgtatgtgtaaacaatgttgtccaacaataaacaggaattttttttgct

SEQ ID NO: 238348 - DNA, 870 bp, Homo Sapiens
ggcggagtatgggccaggtcgcattataaagtaagggaaacttccgcaggaacgagtgaaaatagaaaatatggctgggggggaataagggcagaggtttattacattgaggccttgagggagggcctgtgaggtttaacgtagcggggccaaagcttgacttcccccttcgggcctggtgagggcaggttggatgcctaattaaaggcgcagacctgtcctcagctgcactgggggctgttggcagtttggggaaaaaaacttctggacactgggcctcctctagcctgggcgaaaggaccaaggcacggcccaagccccgggggcagctgcctttggctttgatctcaagtcaggctgaaggcagcgaagcctcggggcccaagcccctccccagccccctctcccggacagacgccttgcccagggtgtgtttgctgagtgtcttgactaccgtgacaccacgcatggccagagctagcgtccctactgcctcccgactcctcagtggaggaggagctgcggtccctctggtgtctgccatccccctccctccctgggcccggccctggacccgtcaggtgcctgtccccagccccaaccccactcatgccccgtcgtcctcccagacaaatgaaaccacgctgcgcttccgatgcccccgcttgccgtgtaatggttcagctaatcccatggcgagatgggggctcactccggaggaggagccaggcagcagggccttcctgaccaacagccagctctgtccttccccccaggaaacacatgttcatttgtgtgatcatgtatagacctcagaacggaagataggactggtatataattgtaataaataccagttgccaccattta

SEQ ID NO: 238349 - DNA, 850 bp, Homo Sapiens
taaaagacgcccccaagaaacaaagaaccgaatagttaattttctaggggttcgttaaaccttgtataattgattcaggtacctggcaggactaaaacaaatggagtattctcggaataggtgctatttttgtaaagttaccggtgggtggcactcgctgtataaaagaagagagcaaagggtgtatgcgtcgtcaccaaatcgtagcgtttgttaacagaggttgtgcactgttaacagaatcttccttttattcctcactcgggtttctctgtggctccaggccaaagtgccggtgagacccatggctgtgttggtgtggcccatggctgttggtgggacccgtggctgatggtgtggcctgtggctgtcggtgggactcgtggctgtcaatgggacctgtggctgtcggtgggacctacggtggtcggtgggaccctggttattgatgtggccctggctgccggcacggcccgtggctgttgacgcacctgtggttgttagtggggcctgaggtcatcggcgtggcccaaggccggcaggtcaacctcgcgcttgctggccagtccaccctgcctgccgtctgtgcttcctcctgcccagaacgcccgctccagcgatctctccactgtgctttcagaagtgcccttcctgctgcgcagttctcccatcctgggacggcggcagtattgaagctcgtgacaagtgccttcacacagacccctcgcaactgtccacgcgtgccgtggcaccaggcgctgcccacctgccggccccggccgcccctcctcgtgaaagtgcatttttgtaaatgtgtacatattaaaggaaacacctcgtgtatatttga

SEQ ID NO: 238350 - DNA, 917 bp, Homo Sapiens
gggaggctgacaaaattctttgtggtctcggaacaggcatcccatggcagtttaagggccaagttttgctccccctgggggaaaccaccatccccggccttgccactgtttagaaagtggggggcttccgctttcttggtcaatcaatgcaggttaagccctcctggttccgaacacgaaaagctcaagtccaagggcgaccaaagaaaagttctcccaagctggccttaagaagaccctcttagacagagtggagctggaatcccccacagtctccacactgaccccgtccagcccagggaagctcctcacaagaagcctggccctgggaggcaagaaggactaaggcagcatctgtcccctctgtgattcagagcccttagttgagagcccctgccgcccctgccacccccctgccccgctcccaccattgcccctcctcagctgtgcaaggagaaagcatgcttaggaagttttcaggtccttgtgataaaacctccttaaatctgttcagaccaagcaatgcgagcttcctctcctgtcccatgttggaagttgctctgaaggggtggtagatgctggaagccagacacaaccctgcgtacgctgctcagttggtggagactggggctgggactggagtcagcccagctgggaggaggggctggggaggatctgcagctgaagcccgaggcagggttggtgtgatgccaaggcaaagtggtgaggagaaaacaggaaacgggctttctctgaattggtaaatgggaaagaagtgagcaacttaagattgtcacaattaatcacaagtgtacaggattagactgggtttatatttaactcttgcttcataggtgtaccatttaaagagtgttatttaatgctaagtttaactgctttaaaaagtttattttaaa

SEQ ID NO: 238351 - DNA, 1000 bp, Homo Sapiens
gagtttwacagkgaggraaatagakttkttymgcaragacaaccgaaactgcatcscaagatcatraatgagragctgatscatgagcttggwkgrgggtttgtctacatagcgggcaagtgtgttctggtscctgtcttggcagaaaacaacaataagagcgataattgtgaggawacaccagaggcagggtattttgctgtagcagtggtgaagaaatcagcttctgacctcacctggracaatctgaaaggcaagaagtccyccatacggcagttggcagaaccgctggctggaacatccccatgggcctgctctacaataagatcaaccactgcagatttgatgaatttttcagtgaaggttgtgcccctgggtctaagaaaaactccagtctctgtaagctgtgtatgggctcaggcctaaacctgtgtgaacccaacaacaaagagggatactacgcgctacacaggcgctttcaggtgtctggttgagaagggagatgtggcctttgtgaaacaccagactgtcccacagaacactgggggaaaaaaccctgatccatgggctaagaatctgaatgaaaaagactatgagttgctgtgccttgatggtaccaggaaacctgtggaggagtatgcgaactgccacctggccagagccccgaatcacgctgtggtcacacggaaagataaggaagcttgcgtccacaagatattacgtcaacagcagcacctatttggaagcaacgtaactgactgctcgggcaacttttgtttgttccggtcggaaaccaaggaccttctgttcagagatgacacagtatgtttggccaaacttcatgacagaaacacatatgaaaaatacttaggagaagaatatgtcaaggctgttggtaacctgagaaaatgctccacctcattactcctggaagcctgcactttccgtagaccttaaaatctcagaggtagggctgccaccaaggtgaagatgggaacgc

SEQ ID NO: 238352 - DNA, 896 bp, Homo Sapiens
ggtccgtcacattgggtcgtattttaggggcaagtggaaccacgcccggaagagagggtcaaggcatgcaaagcccgctttaaataaaacggtgttccaagaaggtgttggatcctcccgcattatgaactgttttcactaagggactaagaaattacttcagacttggcagacttgtcggaagaattggccaactaccagaagattgggaggtcttccaccgcctgccggtgcatccaggaccaaccactgtgggtcgcaggcctccagcgtcaaacaaagcaggaccaacctcagttccatggaacttcctttccgaaatgactttgcacaaccacagccaatgaaaacatttaatagcaccttcaagaaaagtagttacactttcaaacagggacatgagtgccctgagcaggccctggaagaccgagtaatggaggagattccctgtgaaatttatgtcagggggcgagaagattctgcacaagcatccatatccattgacttctaatcttctgctaatggtgatgtgaattcttagggtgtgtacgtacgcagcctccagggcaccatactgtttccagcagccaacccttttctcccatcacaactacgaagaccttgatttaccgttaacctattgtatggtgatgtttttattctctcaggcagtctatatatgttaaaccaatcaaggaacttactctattcagtggaaacaataatcatctctattgcttggtgtcatttataggaagcactgccagttaaagagcattagaagaggtggttggatggagccaggctcaggctgcctcttcgttttagcaacaagaagactgctcttgactgataacagctctgtcaatattttgatgccacaataaactgatttt

SEQ ID NO: 238353 - DNA, 890 bp, Homo Sapiens
gctggccgtgctaacgcctcgtccaggaggtggggctcccatggccgtgacaccggtggcatcttccgagccctccagtttaaaagattgacagtttgttggactcatcaccccatgccaacaagtcatgggagagtttgaaagagataattcccaccgcagaggagttctaccagtccctggggattccttaccacattgtgaatattgtctcaggttctttgaatcatgctgccagtaagaagcttgacctggaggcctggtttccgggctcaggagccttccgtgagttggtctcctgttctaattgcacggattaccaggctcgccggcttcgaatccgatatgggcaaaccaagaagatgatggacaaggtggagtttgtccatatgctcaatgctaccatgtgcgccactacccgtaccatctgcgccatcctggagaactaccagacagagaagggcatcactgtgcctgagaaattgaaggagttcatgccgccaggactgcaagaactgatcccctttgtgaagcctgcgcccattgagcaggagccatcaaagaagcagaagaagcaacatgagggcagcaaaaagaaagcagcagcaagagacgtcaccctagaaaacaggctgcagaacatggaggtcaccgatgcttgaacattcctgcctccctatttgccaggctttcatttctgtctgctgagatctcagagcctgcccaacagcagggaagccaagcacccattcatccccctgcccccatctgactgcgtagctgagaggggaacagtgccatgtaccacacagatgttcctgtctcctcgcatgggcatagggacccatcattatggactgatgaaacccatgtaataaagcatctctggg

SEQ ID NO: 238354 - DNA, 896 bp, Homo Sapiens
  misc_feature (879)..(879): n is a, c, g, or t
tctatcaagttaagagaatacaaccttttggaatctaggaaggatagaatcttcccttgaaacatcagcatcggtgtgtgcttatttttaaaggcaaacagagcaagctttctggttttgccctgggaagtatcgaggggagagttgctattccctatatcaaccccccgaaccccgccaaagataacttcacctttaaatgtcatcgatctaatggaaccaacacttcagctcctcaggacatttatgcggtaaatggaatcgcgttccatcctgttcatggcacccttgcaactgtgggatctgatggtagattcagcttctgggacaaagatgccagaacaaaactaaaaacttcggaacagttagatcagcccatctcagcttgctgtttcaatcacaatggaaacatatttgcatacgcttccagctacgactggtcaaagggacatgaattttataatccccagaaaaaaaattacattttcctgcgtaatgcagccgaagagctaaagcccaggaataagaagtagtggctggagactctggctcagccagagttgtttctctccactctgcctcatctctgtacgaatttgggtcccagccttgttgggttgtcagccatggacatggatttcaacccctggagaaaacgatgtcattgttcagcagctgagagcccaggcgtccgcggcgacttgccgtctctccattccactgcctgttgcagagtttttctgtaactaagggggttgaggttattgtagacgttagattgcgggcaccgccagggattttgcagcgcttcagtgtacgtgttagagaatattgtgaaaagggcgtcctgtgagccccccgtgctggtattttggtaantaaaggtgctttttgca

SEQ ID NO: 238355 - DNA, 892 bp, Homo Sapiens
tttaactgggaccaacccgccgaggccatggtgggctgccatttacaaacacaaacagagctggttgatgatccaggactactctccagacctttaggaacacttggcgcttcctggaaaaacggggttaattatgcaatgaacatgggccacactgcaaagcaggtaaagtccacaggagaggcactggtgcaaggactcatgggtgcagcagtgacgctcaagaccttgacaggtctaaaccagcgtcggtgagaggaaggggtataagctacaatgcctagaagagaatgagcggacagattgaaagagctttgaaaagtataaggtgccatccacataacctggtgttcacgagaacacactaaaggactcctgagtcactaccacagccacctggaaaccacaaggcatttgatgctaccgttctggtcagggattgggctgcttcttcagttcctaataccagaccaagcctcctgatgcctttctgcactgcaactgtgtgattgaaaaatgagatgttcatccaagcagtcaagccacagaaacccagcatgtccctgtcacaatctcatgggcaccttgatcatgtcttaaccttcccttaaccttggggctcccaagccagagtcaaggtctgacgccacctcaaggtgacagctcatctccagcacagcacaggcgtgtgcacacagaggtgttccttgcagccccctccctctcaggtgtcctgagatgctgctcctgggagccccctcagaaaactgcctcacctgagacaagtgcctgctggacagaggtgtattccaggcctggtgtcacatgacaccagcatgcattgcaggattattagtggtattttgagtctgtaaaaataataaatatgttt

SEQ ID NO: 238356 - DNA, 920 bp, Homo Sapiens
aagaagtttcttggcaaaaaaaaattccaaccggaatgcgagatgtctattagagcgaaaaggtggttccttgaagaacccctggttttcttaagcttgaaaaaaagcaaggtgaaaccccaaaagcagaaaaacctcaaaaaggtattttaaagaaaattttggcaaaggttgaaacaagcatgcttaaaaaccggctgggcagaattcagtctttacataaacaaaaatgtgatggtctacaacgaaccaaatgttaccagggaagtagccaaactccttagggaaaacagaaggaaagaaatagagataataaatgcaatggtggaggaggaagccaagaagtggaaggaagctgaaggaaaagagttccgtttgagatcagcaaagaaagcttctgctctttcagatgcgtctagaaagtggtttttaaagcaagagataaatgcggctgtagaacatgctgaaaatccatgtcataaagaagaacccaggttccaaaatgaacaggactcaagctgtttgcctagaacctcacaattaaatgactcttctgaaatggatccctcaacacagatttctttaaatagaagagcagtagaatgggacaccacgggacagaatcttattaagaaagtgagaaatcttcgccagagactcactgcccgggctcgtcacagatgtcaaacccctcatcttttggctgcatagaatgcatgtcaccttgagacggtcgagagagagacctattttgcaatcagtgacattgatttttagattatttatttaaaattcctataaagatcagccctttgtacagaaaaatgtgtctataaaaattatgtgttatttaattctgatactttttggcttggtaaatgggcttcttgaactttttacaataaaaatgttttagaaac

SEQ ID NO: 238357 - DNA, 845 bp, Homo Sapiens
cccggaattgccaaccgaaatgactggacaagtgcacgggaacggctgtcattttcgaagtgcggcttgcgatctaggcgcctcacagcgcaaattatccagtaatttctctgaaatcgatgctggtttgttttcccaaggcaaatcagcagcttatgcagacattggggccacaaagccggtggaacaacgggagacggcttcctgagtgtcaggtcctccaagatgagcttaaacttcgggtggtgggcaggctcggtaggcgggaaaggcccgtgtccagatgaatgcagtccatgtttatattgatgaaagacacgtataccatttggtccagctcaaccattcttaacaagtgctggctgtgagcactggtgtgtgtgtgcctgcgtgcaaccagcaatgtaagtgatgaccagctgcatgatgccttaatttgagtggacaaagtcggtcaagaaccactttcaggcttctgggtctccaagtctttgtctccctgtatccaaacgaggcattccaagtttgacagcatggaacattgcatgtccgaaataccaaccgtgaaactgggtaaaaagcttcaggaggtgatattgatgtgtatagtttaggaaataaaacccaatacttacttcaaagaacgtaatttgtggctttttagagagaaggatactttgacagttttcatttgtcgtctacatgtatatggtacgtttcattctgccttttaattaatttggtattttactatgaaaactactttgtattaataaaataatgtatttcccaatgttataagttgtgttataacagtttcaaaagccaaataaacaagatgcatt

SEQ ID NO: 238358 - DNA, 926 bp, Homo Sapiens
aaagaattcaacaccctttaagtggcaataacctgctcccttgccccaatgtataggggtatttctggtttcaagggcaaggctttatccttttcctttcttttcattttaaaaaaattgttcattacaaaatctttaccagggtttcacttaaaaagactgggctttcatcccaactctaggaccccacatattgaaaaaaatcaagggtacaggaaaaacttccttgttatccttgtttccttagcttggtatgagacagatcggatccagtttcccatgcaccaacccactgcccatggcatgtctttgggaggtgtctgtgaagcagtcatacctgctcctcatctgcctggaaagtcctcctattccagtgtccatgttggcctccagtccttaatgtcaccatgcttgtggccaatgcatccaaataaggatacccctcagggctcagctagacattgcaattttgcatagctttccagttccctttgcttgtcttcttgactgtcttccctctctatcggggtcacttgcaattgttaatcaaagattgaacactgcgtaggagagggagatgatccagagacatgtggcagcaggcatggcttccccttggcctctctgtacactgccccaggactgtcattttggcatctgcaaaggaatcactttagaaagccagcacctggttgatgtgtattcatactgacattagattgatgtgcactgcattagaaatgaggtagctgacacagaaaaaggatgttttgataggaataattttctagtatgtcttgaaacatgttcatctggaagtattttcctccaaagtaatgtagcatgatttttcaaggattgttaacatgcctgggattgggaaagataggactaaagttggccaaactaatcaataattccatgtt

SEQ ID NO: 238359 - DNA, 937 bp, Homo Sapiens
gtggggtacatgtgagcccytgccagggccaagtccttctcccgaacccagggtcctgggaactgcagatcccggggggattcagcccttctcccactgtgctggcagaggcactcctgtgacgctgaatacagtgaacagggacattcccgccactcggggacagatgggcacaagggaggggaaactccatcaggaagtgctcccctgggcagaggcgcccactgggtgctgtgggctcaggagggggcggggcaggagctggtgccaaccgggaaccagagccccacagccatacagcccattggtgacaaggtcctgagaacacagtggccaggtgtccccaggctcctggcccctccgacgacctcaactctgcccagcccggtccctggccatcagcgacgctgtccgccccccgtcagatcccatgtgtgccatgtttatcatcagtgttttgtatttttgtactgagtatcggagcactttacagaagctgactgtacattcctgttctgttgtgaagagaacattcccagaccctggcaccctcctgagccggcgtgtgccggtccagccctccgagatgccacaattccttggatgggggagaagttcaaggaatttctgctcggccacgcggtgggaaccccgcgtccccgccatgtggcagaggggtctcagtcgtgctaggcatcgggcggcagcgccgacagcccttccctcgccagtgcccctcggccactcctgggttggagcccgattttatttgtaaagttgacagtcgagcaaatgttcctattttcgtgggatctgcacacgtctttgtcagttgtggtcatgatcttagtcacctgctaattatttttacaatgattacaacatttcctcactgcgggatatttctgacccgctttagaacttaagacctgattct

SEQ ID NO: 238360 - DNA, 928 bp, Homo Sapiens
  misc_feature (256)..(256): n is a, c, g, or t
  misc_feature (326)..(326): n is a, c, g, or t
  misc_feature (909)..(909): n is a, c, g, or t
  misc_feature (918)..(918): n is a, c, g, or t
cgtgkaavakgcccacagcstgckssgcgtgtcgkgcgcacagsggscgcggcrtgsgsggkggkcccscygtccgtaargagcgkgtgcgagccagtgcccskcgkcagtgcccccgskcaagskstgcccgtgtgamccaagtgscgcccgtcccscggtgctcgagcaagtggctagaactgcccatkcktgtgaakcgccccgtggccctggtgcctctaccwagakccgcggctggcggcccgtrgctgtncctctctctwgaggtgcgtctccctggccagttatggcctcgctctgctacatccccagggcttcgaggntcgcactgggtgctcacgtggtggccgctgtggggcaggcgtgcgcacccacaggcactatggcagcaccacctcggctacctacttagctttgggggtgctctcttgcctgggctttgtggtcctcaagctgtgtgaccatcagctcgcacggtggcgtctcttccagtgcctcacaggccacttctggtccaaggtctgtgacgtgctccagttccactttgcgtttttgtttctgacgcatttcaacactcacccaagattccatccctctggcgggaagacgcgttgaacccagggaagaacctgctgaaaaccgatgacccccagcattgaaatggactctgagatggcagcgtggtgccagtgtcagacatcctgtgtgtgatgatatgcactgattacacaagactgccctttcctgagaagctgcgggcttcggtgtggaggggtggagtgctgtgatctcgacaacttactttcaaagacataaagcacagatctccgcacaggggatgtgtgtgttcctgatgtaatttgcataacttttctgtagtttgaaatgtttccaaataaatattgncaaggggantgaaatacac

SEQ ID NO: 238361 - DNA, 885 bp, Homo Sapiens
  misc_feature (201)..(201): n is a, c, g, or t
gaggaagaatcttcttatgatattcaaggaaagtattttaatttaacagtcagtgaagacaaagaaaggtaggtcattgggaaactaaggaaaccttgttactgggggccaaatcatggactgctttcctgccttttgacagatctctgtactgccacgtaaaaaagtcgaacatcagttgtggaaataagaaggaacccnagcatgtgtggctcagccccttctgtgttcccctcctgcaagcgattgacccttgaggtgagtctgttcagtgataagcagcttgcccctccctatagtggaagacagtggttggctagctttacctctgcctagttacataagtttaactcaggaatgtggcagagactgcaagttgtccatcagtatcctttcccctttctgtaatagaattctccatttaacaaaagtacatgactacccagaatactcactttcctagttagatttgtcttagtgactgttctagttaataggatataagcaaaaatgacaagtccttaaatggagatatcctgcccttcacctcctctttcttcctgctggctggaatgtatacatgatgactggaactggagcagtcatcctagaccccaggatgaccctgggaaaggaagccattgcatagaaaaatcaacaaggttaaaaggagtctaggtgtctggtactgtagaacatcctgtcagtcgtgatctgacacctttgtactttcaggtgagaaatagtctctcccttgcttaagtcactgttattgtaagttttctagcactaacatcgaacctaataatgatccaagaaacccttggtgctgcatacctaaaccctgcttccaaccaattttaacagtaataaagcgtacttttt

SEQ ID NO: 238362 - DNA, 926 bp, Homo Sapiens
gagagccggtttttagagcccccaggcctttggatttttggccccccctgttttgggacaaaggcttgtggtatttctggaatttataaaaaaaggggtgccaaaagtgggttaagaaccatttctttgtttctggaaaccaaagtaactggtggaacccagcttggaatttttttttttttttttttaagttcagttctcccctaatggctgcccttccaaacaaggaccttttatctggatgcctgtatcttccctttggtaaaggtgtaacttgatgtagggtcaaggtttttgtggcaacaggcagactccacccagagaggatatgatgagaatatggccatcacctgaaaagttttcttatcttctgtgcttttggtcgctggaaacaaatccgcctatgtatgaagctagttgatttccagttgcactatttccagttgcctctgaagttcacaggcaatacattgtctagtcctttgcgaatttctctgatttgtgggcacagttatgaagtttccccacatgtgaagacaggtacaaaatagcagagccaagcagacagtgggtctattcttcattagctcagtgacttgtccacactcgtcttagcacttacgtttcaaaagcttgtcacaaacccttggagtcattcccagataatagaactggaaatgataaatcccctaatgccaagggtctagtgtgttcttagtggttatactgggaagtgtgtggagatttaggtgctgctctgctgctctggatggctgaaggctcctgggccatcttcatgtgctgcttgaagagctcctattttgtactcctggctagaatgctgggaacaaatacaaagtgaaaaaagttctccgtagatttctgaagtgcatattcattgatgccaagaaaaaaaaaagtgcctt

SEQ ID NO: 238363 - DNA, 830 bp, Homo Sapiens
  misc_feature (810)..(810): n is a, c, g, or t
caaaktwttcccycttaaatkttkwaawtmtttggcaattwaagacattgtgtaaaargcaatctgtaaaaccwtcaccrggctttgatttttgtmccatggaaattgtatttaaccatacrgggttttggtatgtttatatygtttaccttagtgatgtatttgtttaagtggctaacatccaaacgactgtttgaaggcatcagagtaatcttcagtgtggaatgttaaataacgctyttatactgtattttgtactatgatgtaactccccttccttatggctaggctactgtaacacttgcctgtaatcagtgaagggctgtgcaccttgtactatttcacaatgggttctgctggacagataatgggccagtgttattgaggtgatcaagatctgttccacagggctaatgccaccatctcccctcaaaattttgtagaggttctaaaaagaaagtggtatgttgtgtgatgatcagcactaagtcctgcattcctgttaaagccacttgggtcataagaagggagtaaaaaatgaagtctgactagaattctattgcagaggccaagtacatttagtatggcattgagttgtgatatagttttactttgatgtgcattttgaatttcagctacacctagatagacgtaaaatgataattaaaatgctgtaaccaacttatctaataaaattggcaaccagccactattttgttgactatgagaaagttaaaagtttatgttaatttttagggtctgatagaatatttcatgtgtattacagtggtattcatatgctatgtctcntaaactttattttcamaagc

SEQ ID NO: 238364 - DNA, 910 bp, Homo Sapiens
  misc_feature (171)..(171): n is a, c, g, or t
ccacatttaaaaaacttccattttgcaactcaaaatgttgcgtgtacctgtgggttggttgggaatagtatatgaagtttattcacaaaacactcccactgtattcccttattttatagcacaaccaataatgattaaacataattatttcctttgactacttttcattcnagtggtaaaacagctgataaaggttatttgggatggaaagagtaatacaagacatacgcagatggagtctcctgtgcgtaggtttagcacacccatgttagcttgtccacattaggccttcttttgaaggtactgtatctaaagataagggcataagtgatcatttaattctcagccacttcactgatactacaaggtgttacacagtaattatagtggtttgatacagacatttgtttacaagaaactgaattggcattattaacttatttcacacaaaaaaagttagctttacccatgaactgtaattcagattgataaggtgacctacccatgaaaaagacacctgagacctgtttacttttttaaactatgaagtgaaatcctcagttcaataagtgtcccaaggagaatttcctctgttaaattttccctgttaacttagtataattggttttcttgaatagaagaataatgatttctgtaagatattttaatgtgaatatttttgctgtcttcatctttaaaaattaaatacagtactatatatagatattaaaattttaaagtgggactaggtgtttttatgtatacaattacagtttgtctcctctctttgcaaatttactggctattatcagaataaaggttggactcattttgcttatcccagtcattaaaatgttgtgatctgtttctaacatatttagcatttcatttttaaaatgaggattgtgcc

SEQ ID NO: 238365 - DNA, 849 bp, Homo Sapiens
  misc_feature (820)..(820): n is a, c, g, or t
cccaggcctggaaaagggatctttgggggtactctcctgtgggcccccatccaagtttgaagatgctgaagcgcagcccgcacaggagtcagctcttgccgggctctgactgacaagcagtatctccacgaaggggcacaaagagtgggcacctttgtcatgtgtaattgtgcccgtcttgccacactctttgaaggttacaagtgtagtatgaaacaaggtctgtaccccacttttcctcctgtgagcagtctggacttctcactgctacatgatgaggtgagtgtccctcctggtagctggcacaaggaggcctggacttcccctcccagcacctttctccccaacagggtgagtggttgttgctcttcaacagtatcctcccctttccggatctgctgagccggacagcagtgctggactgcacagccccggggctccacattgctgtacgcacagagatggtgaggcatagacaaccaggacactctacactctattctttattctggcctggggcacaagagcaaagagatgggccagtgactcagtctctgtctctagatatgcaagttcctggtacagctcagcatggatttcagctcctactacaaccgggtacacatcctggggaaaccacgaccacacctctttggtcagatgttcgtccgcctgcagcttctgagagctgtgcgtgaggtgctccatactggcctggctatgctgggtctccctccactgagccacatttaaggccacagaggctccaatacctgggaatgttcacaaagtcatcaactgaaaaaaagcgaattccccnggccacaaaaaatgtgttctgtttgtaac

SEQ ID NO: 238366 - DNA, 818 bp, Homo Sapiens
ggaaatgcaaaaggtttaataaccattgtgcttacgagtgcttaacctcgaaagcggaggcgaatttagggcaaataacccctaaacccgacctaatcctgtgccggtgaacaggaaagagtctaccagtccatgtaagcgcggcattttgaaagaaaaacacctgtcttgttgcactacccatgtgtaggcatgatataaaaaccagtggtatacaccagatatgttatgccctgtatctgaacagtagcctgcgctaccttaatgtcagctgaatagaaaatgcaggcgcaaactatctcagtgaaactcttacttcacacaacaggagtcttaaagcgttgtcagtagtcagcaacaacatagagggagaaggacttgttgcactttcacaatcaatgaaaacaaatctcactttctctcatatctacatttggggaaacaaatttgatgaggctacgtgtatagcatattcagacttaattcaaatgggttgtctaaaaccagacaatacagatgtggagccatttgtggtagatggacgtgtatatcttgcagaagtctccaatggccttaaaaagcattattattggacatcaacttatggagaatcttatgaccactcatctaatgcaggttttgctcttgttccagtaggtcaacagccatgaaaaagtagctgtaaaataattttcatacacttgtcttattgtttcacagagattaatattctatagcctattttcttttataaattaaaacaagttacttttttcaaatggtaaaagataaggactgtattaaactcttgtataact

SEQ ID NO: 238367 - DNA, 898 bp, Homo Sapiens
gcccctccaagaagaatgattcccccctgaaattgcatggttctccagtgaaaggaagaaacctgttagaagaatgccttcgttccggaaggtggggtatctcaaaatatgcttttcatccaagccactggccaaaagccatcttcctggcctactggatgcttacagtgactgtggatacgggggttccctttccccattcagtgacatgtcctctctgcttggtgtaaaccattcttgggaggacacttttgccaatgaactctttccccagctgattagtgtctaaggaatgatccaatactgttgcccttttccttgactattacactgcctggaggatagcagagaagcctgtctgtacttcattcaaaaagccaaaatagagagtatacagtcctagagaattcctctatttgttcagatctcatagatgacccccaggtattgtcttttgacatccagcagtccaaggtattgagacatattactggaagtaagaaatattactataattgagaactacagcttttaagattgtacttttatcttaaaagggtggtagttttccctaaaatacttattatgtaagggtcattagacaaatgtcttgaagtagacatggaatttatgaatggttctttatcatttctcttccccctttttggcatcctggcttgcctccagttttaggtcctttagtttgcttctgtaagcaacgggaacacctgctgagggggctctttccctcatgtatacttcaagtaagatcaagaatcttttgtgaaattatagaaatttactatgtaaatgcttgatggaattttttcctgctagtgtagcttctgaaaggtgctttctccatttatttaaaactacccagcaattaaaaggtcaa

SEQ ID NO: 238368 - DNA, 378 bp, Homo Sapiens
acctcggtctcccaaagcgctgggattacaggcgtgagccaccgcgccaagccaaggtctgcatttttctttagaactcagaacacccaatagtcctaggcccccatcctcgcatggcagcaagctaaataagcatcttcccactgcgagttggggcatgacccagcctatggtttgccatactccctctttttctccgttttttcattaattgtgaacctgacctgcatcaccctttcatgtcagtgctctccaaacctgcttgcttgcacccctctagtcgaaatattttgtgcttaccccaatatatgtgtgtgactattgaactctattcgtagactgcttgtactaatgtcatttgcatcataaaatattcat

SEQ ID NO: 238369 - DNA, 636 bp, Homo Sapiens
ttttttttttaacctgaaaagtataattcatggcaggactctatttcttctgccacaatatgatcaatagggtttcagacagtgactctcataacaccctcggagcgctcactctctttttaaagagtttattcttttcaaagtcgtgtggattaattccagtatgtcaagtcaaactttggctataaaatgacatggttgaccaagaaaaacacttatgtgctcacaattttccatccagtggcttctgaacatttaagactacctgcccctgaccaagtcctgttttgaaaatagcttaaacaatctattcaagaaatcatactgagccttttctttactgggggatgggcagaaaagaattagaacacacaacaaagcaaggaagagaaactttgaactttcttatcatatcaaaagcagcaaattccaactcatagttaaaaaataggaggctatctgatcattaaaaagtcaggaaacaacaggtgctggagaggatgtagagaaacaggaacacttttacactgttggtgggactataaactagttcaaccattgtagaaaacagtgtggcaattcctcagggatctagaactagaaataccatcttgactcagccatcccattactgcc

SEQ ID NO: 238370 - DNA, 607 bp, Homo Sapiens
ttttttttttaatgttggccaggctggtctcaaactcctggcagtaagggatcttcccacctcagcctcccaaagtgctgggattacaggtgtgagccaccacacccggcctcagggcaattttgcataatagaaattcaagaaagactttaggaaatcagtacccccttctatgatgctgagaagtcaagatattagcttgatataaaagctagatattagcttgatataaaagactcagttctaatcaattagacatttgaaatgtcttagacaattgaaatcaattaggcaattgaaaatatgcacattaagagtcatggataattagaaatacacattaagagtcccaagagaaggactctgggtttccagcatccctttctataatgtaaaaggggtagaatataggtttaaagggagagaccatgaacattggaattttgcacattcatagtcccagggaaaggtaacataggtaattaatatcccttgctgtaaaacaaggaggataaaatggatctgatctgaaagacattgttgtgatcagttgccatggttcacattaactatcctagtgcaaaggtcttgactagaggtccggacg

SEQ ID NO: 238371 - DNA, 589 bp, Homo Sapiens
ttttttttttaatggttatatgctttttatttgtgacatttgaatacccaagctcacatataactgatttcctaaatatcatttaattttatgttgcttttctaattgatttaattgttagttttccttatagtcaaatgcttaatacaatcataaatggaaccaaaaatatagtaaacatttctttttctgatgtatgtaaaaaagatacaggaaaattctgaaatcagatcactataagctagtaaaacaggtgaattatttgattagaaatggactcttccttcataagttacacaaatccttatgtagtcactgaaaattcttactcagaattaatacctgtccagagggaaacagcctgttataaaagctttctgttaatatattttttaaggcaggaaaacaatcattatttccaaacacactttgtttgtctaattctaggagagaatcaccaatttcttcaaggtccaaaatgatcagaacaagaatgacaacagtgtcaaccaaatgatgcctccaactccttttaatgattgtgccttggtacacatttcctcaaagataatggctatcttttccggac

SEQ ID NO: 238372 - DNA, 646 bp, Homo Sapiens
agaaaatgtaaccctgagttgactagagtggtggtattcattattgtaaagacagcttgaagaatcggggaccactaggaaagcttttcttgcatactcagcttgctttatcatttttgctgtccttttaacatttgcgaggagtaggggcctggtcctgaatgacttggaggctttcattatttatcctgtctgtattgaccggtttttgttttttcagaaggcagtgatgatgaaaacttaggaagaaggtattttgcaataagcttggctgagtgtccatgggaagaatactttccctaaagagagagaagcactcacagaggctgcctttctcctgagctcggggagaaggcagcacatcacaacctgtcacattgaaataggcgctcattctgctatttcaccttccgtcctgagcagagcctgaattacgtttttgggcaatttcatggtgtttcaccagagggcgctagagactcaaacgaaatgtccatctggaaagattcgggagacactttgccgaggggatgaagctgagatgatgcttgtatggaaagtttgatatttttatcagtcacatggcttttgaaaaatgatgtatatattttaaattaactattttcaataaaatatttcactcaaa

SEQ ID NO: 238373 - DNA, 722 bp, Homo Sapiens
tggggccgctgctcttccccgcggcctccttggcggccccgcgctgctgttggggctgttgctgctgcgtcgccggcggttgaggctgctgctccccgtgcccgttctcgtcgcccgcgccttcctcttcgtccccgagctcatcttccccttcctggaaaccctgatcgtcgccgttctcgtcttccgaggcggcctcctcctcctccatcgggcccgagtcggccgcccccgcggccccgttctcctctcctagctccatctggtcgccgtccagagcggagattccttcctcctcctcttcctcttcctcctcctcttcatcgccgccggccgcggcctcctgctcgaggcctgctcccgagcgcccagcggaatccccgcccaggtctaggctgccgttcccgggctccatggcggggcggcccccggcctcctcgtcgtccagcgcagcctggagtcgctccatgagctcggccttgagacccttgtcagaaaggcgtcgcttcttgagctcctctttcagctccgacaccttcagcttttttacattaacaggcgaggaactcatggtgagggccccgattcaccgctaggcgctgcctcaaactcggctccgctcactcggccactggtggcggctgctgcggctgctcctcggcccgggcggcggctgcggctgcggctggagatgggttcgtgctgcagagcggatccgcccc

SEQ ID NO: 238374 - DNA, 685 bp, Homo Sapiens
tcattttgccactgtcttttctggacaactcttgctccctttccccctgggctgggcaactctatgagcacccacactcctccacgatcatgttctgaatgtcctttttgatgatgttttgaccatcatcatagtacaacatggacatgggtctcagcttggtgggcacacagcacgatttgaggttggcaaaggggctatggccccgcatgcggtagtggttgatgactgttgagtggaaggacagtgaggacccggacgtgcctgctatatggctcgggcactcaccctcgcagtagttggcatgatagccagagggagcaatgatccagtcattccagccgatgtccttgaaactgacaaagaactgtttcttacagcagatgttgaccttgccatcacactccaagccccgccgacgccggcgatgagggtggtcttcagactgccgggcctgcagcatgaggaaaggtctgtgcgactgctccttttcctcatctgctcctgccccaccttcacctccgcccttctttttcccttccccctcctcttctttcttcttcttcttgcccaggagaaccaagctggcgccactctcctggcactgctcacaggcaatccgaacgtccagggagctcttgccctggtccagcaaccgctggatgctgctggagacagggaagac

SEQ ID NO: 238375 - DNA, 397 bp, Homo Sapiens
  misc_feature (22)..(22): n is a, c, g, or t
cttcctaaggatgtatggagcngtcggcaaatcattaatctctctttaaaccacggtggcaatatttacatttaagatcaagatgatgattatctgaagaactcccctggaagctcttctcacaactggaaaaacacagcagccagttagcagagccacgtcccaggccaaaataactgcctgacagtccatggggccaggagtctacagggtgttggcgtgggaaggcgtgccttcccgcagaggctggagggctgctgttggcagagtagatggagctgctcggggcacagcattctggcccaaccttgcaggaatgtggttctgacaaaccagctggaaaaaagcatttctgaaaagaactgttttaagttattaaaaaaaaaaaaaaaaaagg

SEQ ID NO: 238376 - DNA, 617 bp, Homo Sapiens
tgaggtgatgagtgtgtctgactgggaggagtttgacaactccagtgaggactaggctccctgtgcctggcatcagagggaagggaggctggggctgcagggcagtgaaacccacgcagcctaggccagagcactttactccaggcagggcccctgcccctgttggccacagcttatggggcctgccctctttcttcacaccagccccttggccagcctgccgcaggcatctcagggccatgcagatcccaggctgtggattacgtcactgcaggaactgcttctgaaaggctttggccttcctcagtgagccctggaggggttggccttctctcctccctgcctagatcagtccttctccaaaaggacctgggagctggcagcctgggcaggggggctgaggcacgtggtagccctctttctgtgaatggggtggggctgtgggggcagctggggttggaggatgagagctcctgaggggcagaggagcagagatgcatcagctcgcctgggactggctctgtgataaaaagacccctcccgctgggttttcagaccccatgttgttggtcaatgaaataaagcatcttacagaaggtgttaactgttaaaaaaaa

SEQ ID NO: 238377 - DNA, 577 bp, Homo Sapiens
  misc_feature (12)..(12): n is a, c, g, or t
caaagatttcancaatcgcaactatttggctttctgtccatcactgagacttttcataatcttcccttcataaataggatctcttgatcagaacagaaaagttgagtcttaaatttcctgtatttatttctgactgatactgagggaagtgcaaatttggttgctatgattaaactccttgattgttcttaatgggactcttttaataagtcaaacatttttgccatctaagtatattgatgagcgccactttatctcaaatgtttacacatactagggaaaagcatctgcagtttctgaactctttgtgaatcagtatcactttttcatgttacttcagagatcaatattcagtgcattggttttatttaccatcttttctcccagttgatcttgtaatcatcagaaagggaaaaaaaatctccttcacaaagccctttgcgacaaacttatgtaaataataatctaaggacagctagaaaaaaaatacaccatacaggggaatagatccaaaattgatatctgcctcacctgtatcacctattgtattagtaactggaaaggtggatgaatacag

SEQ ID NO: 238378 - DNA, 640 bp, Homo Sapiens
agttccattttaatactcagcaaagtacatatcccctctatttacatttggctcatttcctttgatattccaaaagttcttacttgggttactcttgacaattagaccctttcttgcccatttggggaacaattattcttctaaggctataatttggcattaagccaggggattcatggtttttacaccacgagtattgagaatgttgctatttctggcaacgtctttatgaaaagatctttcccacttttgaaaatagttacgcttctctcaagaaactgggttacctcagacacaataaattgtgtaattaatgtgatggttccttctttgtgttaattgctaggatgttcacacacatctgtgatctctctagaaagtatagcatagcatgtactttaagtagttaactccctcttggcttcacttttttttttctgttatatgattcatcctattatgtctacttctgaaagcagagataatactggccctcatttaaaggggttttaaggattaaatatcagtgtgtctactattctgcctggaccacatagagggctcaaaaatagtaatttcacatgacaggttctagactttcaaataatacagtttgatgtactcttgcttatgtaaccac

SEQ ID NO: 238379 - DNA, 705 bp, Homo Sapiens
agctcaatgcaacttcaaccctcccaggctcaagccatcctcccgcctcaacctttagagtagctggaactacaggcctgcaccaccaggcccagctaatttttaatttcttttttttttgtagagacagggtctcgctatgttaaccaggtttgtctcaaactcctgggctcaagtcatcctccagtctcagcctctcaaagtgctgagatgacaggtatgagaattttttgagaggaagtggcctttatttttttaaagaagactcataaggatttttgacaatcactgatttattgggtcactagtctgtgctaagtactctgccaggcatttaacatacattatttcacttgttttcatgattaaattcaggcaggttcaatcacagaaaccatgcagtggacaaaagagagaaaaagttcaccatgaggagattctaaaaacctgccttttgacttgtctatttttatctcttatttctcactttgcttctcctcccgcttggaccctttgtctgactgtttgaaattaagttgcaggtgaaccctccattacccatgtccagaacaaatagacataagcacagaacctcactaactccccaaatttttatttttccatttttatcaccacaaatttcttggtaacaatgtagaatttaattttgtaattaaaacaaaaactcgagactagttctctccc

SEQ ID NO: 238380 - DNA, 600 bp, Homo Sapiens
  misc_feature (38)..(38): n is a, c, g, or t
  misc_feature (65)..(65): n is a, c, g, or t
gcagcaggccacgggagctccgggcgggcccctctcancagactgtgtgtgccaggcctgtgggncagaggacgtggtgcccttccagtgccctgcctgtgacttccagcgctgccaagcctgctggcaacggcaccttcaggcctctaggatgtgcccagcctgccacaccgctccaggaagcagagcgtcatgcaggtcttctggccggagccccagtgagtgcccacggaggcccccagcacacccaacgtggcttgatcacctgcctgtccagctctggtgggccaagaacccacccaacagaataggccagcccatgccagccggcttggcccgctgcaggcctcaggcaggcggggcccatggttggtccctgcggtgggaccggatctgggcctgcctctgagaagccctgagctaccttggggtctggggtgggtttctgggaaagtgcttccccagaacttccctggctcctggcctgtgagtggtgccacaggggcaccccagctgagcccctcgtccgggaaggaggagacccccgtgggcacgtgtcctcttttaatcaggggacagggctctctaataaactgcggc

SEQ ID NO: 238381 - DNA, 611 bp, Homo Sapiens
tatcacatcgtatattttgccttgaagattcttgaaataaggaaatctataataacttcagatagcctacatgtccccatttagtggagacctcttgaatgctatttgaattctgcagtatcatttttatgaccattctcctttgaggaatactatgcccaggtacatgctctatcagtgtgccgggagagtggattcttttcttcactgcagagtcatcacactgttggaatagtctgctcttttacatgctcaggtagggaaaataggaccaaatatatttccacagtgcctaccactgtgtcatgtttacagtgagagtttaaatattgttgatgtcctgactctgtgagctcatagggagtatcttcatagtaatgacatttgatcagccataaaatttacattatgttcatatgcacccaaaaaagctagtcaggtaatgaatacccttgaagtgaatagcaattttgatttaggcagtgtgttaggccatccttgcattgctataaagaaatatttaggctgggcgtggtggctcacgcctgtaatcccagcactttgggaggctgaagcgtgtggatcacctgaggtcaggagttcaagaccag

SEQ ID NO: 238382 - DNA, 581 bp, Homo Sapiens
aggttcctccctttttagactatttagggtaacttctgggcattgctatgggtatttgtagactgtcatggtgctggtgaaagtgtcttttagcatgctaacacattataattagtgtacaacgaggagtgaggacaaccagacatcactttcatcaccatcttggttttggccggcttctttactgcatcctgttttatcatcaggtcattgtgacctatattttgtgccgacctgctatctcatcctgtgagtaacaatgccaaacctcctgggaatgcagcccagtaggtctcagccttattttacccagcccctattcaagatggtgttgctgtggtttcaacacctctgacataaccaacaaaaactgagtcaattccttggagtatgtagttgtgaaatttaatctaatctatccaagaatgagctccatggcctacttagttgcaacaaaaatagttaagaatgatgtaatataaaggcatgtacattatgcctctccttatatacatgatcatatatacttataatgcatcaactatttctggagggatacagcaaaaaaaaaaaaaaaaagg

SEQ ID NO: 238383 - DNA, 666 bp, Homo Sapiens
acatctgtaacttggtgacactttagtgacatatcgaaatagaactttaagggtaaaaaatttatggcttagaagacaggccttagcatactatgtatgcaaagtcttaaatacaagttatcaaagatcttacctacgagacctagagaaggatcgggacggcttgtgatttctctcccgagacagcgatctctctcttctcctatctctagaaagggacctaaacaagcaaaaaaacattaggaccaatgaggtatgataaaattatacataaatattttcttgatctggcatggtgactcatgccaataattccaatattttgggaggcagaggcaggaggctcacttgaagccaagagtttgagaacagattggacaacaaagtgagatcccatctccacaaaaaataaattagccaggtatggcagtacttgcctgtagtccaagctactcaggaggctgaagagggaggatcactccaaggccaggagttaaaggctacagtgagctataatcacaccactgcactccagcctgggtgacagatccttttttaaaaaattaaatactttctaaaaagcctttgaaaactcaaagaaagctgactcatccttacaacttgattcactattaaagccaaggtttattcccataactaagccac

SEQ ID NO: 238384 - DNA, 615 bp, Homo Sapiens
ccccacccataaccaacgaccatacttcgtgggtccatctttgtaacatctttacttccttggagcaaattcccaggaatgggttttcggggtccaagggtatgcacctctagcactacgacaaacgcggccaacacgcttcagggaaacggtgccccagtttgcattctgcttcccctgccctgccctgggggtctgactggtgaaacatgggatggcagagtggtcgggtgtttcagattccacggtgggccggggtcttttcctaccctcgggagccgtctgaatttctcctctgccgagttcctgcgggtgtccttcgcccaccggcccgggggagtgagtagcaggcaccaggtgagcaggcctccgctcgcagcggctacgtgcacgggcaggagcaccgccccacgccccaggtggccgcagggtgaggggaccggggggcgggaggcgcacaatggggggcacgcccgtatctctagcccggccggcagcgggcagcgaggctcagtcctcgccccttctcccagctgctattcggggctcccgaggcgctcagaggggtcgactgcgtccgtggggcacaacccaggggccaggctaagacgccac

SEQ ID NO: 238385 - DNA, 799 bp, Homo Sapiens
aactaagtggctttttattagagaaagccagaattacaaaagacttaagagttggcatgggggcccttcttcttgccaaaggtgggcacaacgttgacaaagcgccggttgtactgcatccgccgcttagcccgacctgtcttcttcttcttcttctcctgtttggcatcgccgagcctcgggccctcgtccctggacttgtctttgagcacgcggggcgggctgtccttgtccctggtggcgggcttctgctcgtccctgtgatgccgcaggagctcgtccctgtgatgccgcagcagcccatccgcatgcctgtcccggtgcctctccttctcgtctctccatttctccctgtgtttctctctcttcttcttctcttttaggatgttgatggcactagatccataaggctttagttccttttctattttcttggaaggttctctctcggaatcatttttatctttcttttcggtagaaaacaattcaatggttttatctagctcatcttctatgtcagctttcatgttgtaagaaactccgtaagcatccgcctccaggaagtccttttcgtactggccggagtccttcctgctaccgccctccttgtaatcttcgcccttctctttcttctcggccttctctttcttggctcgctctcggtcgtggctcttcttggatgaagatgaggagtgtctgtgcctctccttctctttcagcttctcagggaggcaggcgctctccctcggcttgtcgtctccaggtggctccgtgaaagagacctccaggaaggccggac

SEQ ID NO: 238386 - DNA, 654 bp, Homo Sapiens
caaatacttttaatacacaacttttaatacacaaggacacactttggaaaactttttccgaagaaaatgatccaaagagcagaatgcgagtcaataaacggagaaaggcaagcagcggttttccatcttctgcgccagtgtgctgtaaacttttaagtccggaaaactatgttttaaccgatgagataatgcctttcaaagtgattagcacgaccgggcgcgcggtggctgacgccagtaatcccagcacttttgagtggctgaggtgagcggatcaccctgaggtcagggtcgagaccagcctggccaaaatggcgaaaccccgtctctactaaaatacaaaaatcagcgaggcgtggtggcgcccgcctgtaatcccagttactcgggaggctgaggcaggagaatcgctttaaaccgggaggcggaggttgcagagccaagatcgggccattgcactccagcctcggtgacaaaatataataataataaaattaaaaagggcttagcatagtatctggccagtaagaagaaattatgattattattttgaccttagacctctcttaactgtctgaaattcgggtttcttaaaggacacaggcggtctctgaggctcccgccagcggaaacaatctcccattaaaatcggac

SEQ ID NO: 238387 - DNA, 710 bp, Homo Sapiens
taatgaatttcatttgatgaagtacctatgaaataatgacatagatttggtaaaaggtgaaattataaggagagaataatctggcaaaacagaagaaagtaattcttgcttcttgagaacagacatgtaaaattagcttgagaaaaaaaaaagtgccaaaaaatctacatcattctgttttccaattgtgaatctttgattcatagaatactgcgaatattctcgctgttctgattttgtaatagtcaagacaggctaaacattcgctatattaagaccatgcatgtgtccccaaacctagttctttccctaggtctggttttataaatgctggtgataaaccaattttattatatgatcattttatgtgattatataatggctgtgattctaggttatctttggtcaaccttaagaaaaatgacagtacagctaatgtgataacttttgcaaaaagtcagtgctaatttgcagaccattgtctacagaagggataaccaaaggtagagaaattttatggtaccagttgctattaaatgaattgtaaaattactgtttttttatttttattttttaggtgactctgacatcattagaagcatgccagaacagactggtgaaaagtaaaccttttcacctacaaaatttcacctgcaaaccttaaacctgcaaaattttcctttaataaaatttgcttgttttcggacgcg

SEQ ID NO: 238388 - DNA, 542 bp, Homo Sapiens
tggtagagacaagggtattgctatattgcccaggctggtctcaaattcttgggctaacgcaatcctcctgccttggtctcctaaagtattgcaattacaggtatgagccactgcacctgcccagataatcaaattttttcatcaagtgttttgtgtttcatgccagctaaaagtaaagcaaattaaacttcagaatggataattctattacacctaaactaaaatctgaaatcttgcttcaaatattcaacagtgtaccaaactgataatattgtatatttttagatataaaaattcaaagtttgctatcatccaaaattttcagggtgatgaaaacctaggtcttctcagatattagtattcaataccgactgcttgtttagactccacaacatttgttgaaaaagtcaaggctcattaataatacaatgaggccaacaagagagcttgtgttctcccattttcattctaccaaaaggtagaatcttaaatgtctttcatatatacatataaacttttcttccctttatctctaacttatc

SEQ ID NO: 238389 - DNA, 614 bp, Homo Sapiens
aaaaatctcatattcagcttacaccattcatttcaggtgaacatacaacagtgcatttcagtttagggaaatgtttacagtcatctggttctctttattcctgggaacaaggttacctcacttggaacacataaccagtgccaagttgtccatccctaagcaatattgcttccttctactttctagaagttcttcagattgtggaagagaaacttttcagagttctttgccctcattccctcctccagaaattcatgcctttgtataatctcttccccctgagagccagtaggctaacctaatgagttatttttaaccagtagaatacagcaaaaatgatagattacaagagattgtggcttctatcttgctagcggactctctctgtcttctctgcttgcacactttgttgaagcaagctaccatcccagaggcaaggaacacaggccatcagtttagcagccttgaggaactaaattcttccaactaccacataagtttggaagtagattcttctccagtccagccttcagatgagaccccagccatgccaacatcttgattgcagccctgtgagagaccttgaaatagaaccatttctgatctcccggacg

SEQ ID NO: 238390 - DNA, 712 bp, Homo Sapiens
tttgtaaagtttccagtattaattttcttatgtttagtaaagtttgagatttagttacaagcattgccacattcttcacatttgcagggtttctctcaaatatgaattgtcttatgtggagtaagggttgatgataggttagctttgccacattcttcacatttgtagggtttctctccagtacgatttttcttatgtgcagtaaggtttgaggatgagttaaaagctttgccacattcttcacatttgtagagtttctctccagtatgaattatattatgtatagcaaggtgtgagaactgtttaaaagctttaccacattctttacatttgtacagtttctctccagtatgaattaccttatgtttagtaagcgttgaggacaggttaaaggccttgtcacattcttcacatttgtaggatttctctcctgtatgaatttttttatggtctgtaaggtttgaagatcggttaaaaactttgccacattcttcacatttgtagcatttctctccagtgtgaattatcttatatgtagaaagggctgaagactggctaaaagctttagcacatttttcacatttgtaaggtttctctcctgtatgaattttcttatgtgtagtaagttttcagcatcgactgtaagttttgccacattcctcacatttgtaaggtttctctccagtatgaattcttttatgtatagtaagag

SEQ ID NO: 238391 - DNA, 759 bp, Homo Sapiens
aactgttaaaagctttccacattcttcacatttgtagggtttctctccaatatgaattttcttatgtttaataaggtttgatgatcaattaaaagctctgccacattcttcacatttgtagggtttctctccagtatgaattcttttatgtgtagaaagggttgaagattggttaaaagctttgtcacattcatcacatttgtgtaacttctctccagtatgaatcatcttatgtttagtaaaggttgagaaatggttagaagttttgccacattcttcacacttgtaaggtttctctccagtatgaattttcttgtgttcaatgagttttgaggatcaggtagaagctttgccacattcatcacatttgtactgtttctcttcagtatgaattatcttatgtgtagtaagtgttgaagattggttaaaagctttgccacattcttcacatttgtagggtttctctccagtatgaattctcttatgtccaataagggttgaagatcagttaaaggctttgccacattcttcacatttgtagagtttctctccagtatgaattttcttacatgtactaagttttgaggataggtggaaaactttgccagattctctacatttgtggggattctctccagtatggattatcttatgtgtattaagggctgaggactggttaaaggctttgccacattctccacatttgtagggtttctctccagtatgaattaccttatgtctagtaaggtttgagagttg

SEQ ID NO: 238392 - DNA, 777 bp, Homo Sapiens
ggattacaggtgtgagcccccgtgcccagtgagtagacagcaaaatttaaagttcaccaactgatgttcccaaaagtgctgaacactaaatgacacagggctatgaggtacatacatttcttttagtaggagggaaaagtaaaagcttttcaaagtttgagtgctttattagaatttttaaatgaggcgaactatgattttaatttcacatcttggctaaggagatgccactggagtacagagataatctcctgtcttaagccacggatcagtcagtgtagccctccctacccctcaatctcaagaccctcttacttccgaactaaacaacacaattggcaaatgaagccagcacgaaactgtatcaaaaaacaagagagtctgcagtgagccagtgtattatgtaaccactgtaataagtgattacgtggcctcccatatggacctttcatatcctggtgggagatgggagaccaatttaatagctctgagcatgctccatggtgcaatcacaagtgccatgccaatacaaagacaagcaagcaggtgaatttccctagtgtacttttcaggaacacggttactcagttcagggacaggactacattgatgcacctgcaaagtaaagttggatgcttcagagcacatggatgatacccaggtcagcacggtgtaaggcatatatggacacaaagagaggccattgttggcaataaatagcattacggaaaagattccaaaccagcagaacagaaatggacctgatgctccagtttt

SEQ ID NO: 238393 - DNA, 663 bp, Homo Sapiens
aatcaggaaaaaatttgagttggcttaaatcatctcagtccttatggcagttttattttcctgtagttggaactactaaaatttaggaaaatgctaagttcaagtttcgtaatgctttgaagtatttttatgctctgaatgtttaaatgttctcatcagtttcttgccatgttgttaactatacaacctggctaaagatgaatatttttctactggtattttaatttttgacctaaatgtttaagcattcggaatgagaaaactatacagatttgagaaatgatgctaaatttataggagttttcagtaacttaaaaagctaacatgagagcatgccaaaatttgctaagtcttacaaagatcaagggctgtccgcaacagggaagaacagttttgaaaatttatgaactatcttatttttaggtaggttttgaaagctttttgtctaagtgaattcttatgccttggtcagagtaataactgaaggaggtgcttatcttggctttcgagtctgagtttaaaactacacattttgacatagtgtttattagcagccatctaaaaaggctctaatgtatatttaactaaaattactagctttgggaattaaactgtttaacaaataaaaaaaaaaaaaaagggcggcgctcgggactaaactag

SEQ ID NO: 238394 - DNA, 713 bp, Homo Sapiens
gtctcaacaccacaatttatctgtttaatgttttcatttacatttggctttatcccaaaaagggtttaacagtgtcaccaagttaccaggtctctgtttcatcatatttacacaagatgaaggaaactcaatctgttcgtatttgccccaggtaataggttctatgtagtgacaggcatttcactatttgacttagtgtttgccaaaatgaagtaaggggaattgggtccagagctgaggacagatccatttggaatgaaagcataataaccttgaagttattccagtgacaaaaaatgatcagtgaaagattttctaagagcaagcaggaatgaggaggctggccctctggccagcatgagatggggtcttaggaacagtttgtcattcagtaacctcctaacaaacactcgggcaagccacttcccctctctgagaatcagtttcctcttctgtacataaggggagagggtcagtcaaccatcttagatatgggaacttaaggggacttcatggccctgcgggaaaaaagctcaaatgtgtttttttgcattgggcctgcatgggacgtaagtgtttcgggagtgaggggaggccttggaagggaactgctattgctaatgatgtttaagagatgacttcgtgtgggaaccaccactcaacccttgcttgtctgtacaatctatttccagcctcagcccctccggacgcgt

SEQ ID NO: 238395 - DNA, 451 bp, Homo Sapiens
cttccagtttctctgccaagacatgctctggccactaagtctccaaatatgctgttttcttctcctatccttcacctgattcagttcacaggccaaatatcatctccactaggaggctttgtccagccgccaggccagacagcctcgccgatatgcacacagcccatgtcccaccccaggcgtcaagcctctcaacagtgtgagcagcagctttggacagggcaaaccagtcatctccaaataccctgccctgccctgaacaaagagctgcctgttgttgacactcaagacaaggagttgcaaatgtccccagaaccaatgtggggatgtggaccctccaggctcttgcccatgcttctggaatcctgtgcctgagggcactgctcgtggcttgccaccctctgcttcctcaactgtgggtgccttgcatgggcttctccttctgcagccg

SEQ ID NO: 238396 - DNA, 558 bp, Homo Sapiens
tattttgtttactatctagtcaatgtaaacttcacaagagcaggaatgcttctgtcccttttgttataaagtatccccgggacctcataacagtgcctggcatgtactaggggttcaataagtgtttgctaataaagagatgctgagtgcatgaggccccaagtgggctgcatcacatcccccagggaaacgctgctcacaccattaccccatttcacagatgaggcaatcgaggctcagagaggagtccatagctagctaataagaggtggagacagaattgaaacccaggtctctgactccagggctgtgtgctttcctctctccaagcacacagcactgggagagtcttgtctccaaggcaggctgcatgagatcagacagggagagagcctttttttttgtatctgtctgtataccacaatatggcttaggaaggtcttggtggttaacaaggctcccaaataggacccagaacacaggtgctcaataaacatctggatggatagatggatggatggatatgaatgaatggatggctgatggatagaaaataga

SEQ ID NO: 238397 - DNA, 424 bp, Homo Sapiens
ttttttctttcaagtaaactttttaattgaagtataacacacatacagaaaagtacacaagtggtaagtatagagtttgatgaatgtttacaaagtgaacacacccatataagtatcaccaagatcaagaaataaatcatgacgtttggagttttaaaaagtacacttcggtcttaatggcttcatttcagcccctttcagggcagttttctacatgtgctaactcatttccacaaaatagataaaatataaccaccagtgcttgtaatcaaagagtaagtcaaagcataaattcagccctctaaataacgaattaaatgcagaaaccttttggttttcatgactcttctctcatgataagagagcttttctttaaaaacaggaaaggctgtccagcagtcctcagaacctgtgtccggacgcg

SEQ ID NO: 238398 - DNA, 419 bp, Homo Sapiens
tttcccataaggtctttctattttaaagtagtggaacatccacatgtgtactttgtgctctctatttaggctcctttgtgctctctgctggattctgggttaattttccttcaatatatgatgtataatttttttctttttctccagagtctagtaagatgctgagaaagttttattaatattcagtccactgagttttgacataatttcccaactcacaaaaggcactgaattaaagtctttccaaagatttttatatcttctataatacaaaaactaagaatgatgtaaagctcatttttttaccttaaccttcatagatttaaattcaattttccagaaccatggaaggtagtaatcaaactgttaaacagaagacaatacaaatttattgggactttgaaaaatgtttgacattt

SEQ ID NO: 238399 - DNA, 539 bp, Homo Sapiens
ataatttggaatattaagtttattcaagcatatttggtcagaaggagggtgatctcacattccagatttctaggcagccctaatttcaaataatctgtcccattatctgatttccgtatgtactgatatttatttggaacctatgattcctaagtgtagcaatccagctaattctaatattacctttcagaagattaaaattcatttttctactctgaaattacatgaagctgttgctctgccgatgattttcttccctattagccacctataattgaagattgcctggttgtaaaagggagccagagatctgacgtaatagagattaaaggagtatctagctctagcgtttaccctacttatatatgtcccacttttcctggaaaagaaataaacatatctcctggagatatgcctcaagaacatgatagtacacttaatacaatacaggaataggagtaaaatcaaaacacaagctcatgactgttacaactatagtctttaattgtacatatgcatgcacacttgtgtacacagac

SEQ ID NO: 238400 - DNA, 706 bp, Homo Sapiens
aaatgcgaagcctctgttctgctgggtctgtttgtcttttatgaggcggatgttattgacagctaaagacgcgtaaggagacagtgctgtcatgatggaatccaccacagtgtgcggagctatgttccgaagaatgatcgtatcacagtagtaatccacagactgaacccgactctgtggttccaggaggcacttcctgttcagagtctagaagggaaagtgatccaattagagacaaacaactaatgtattttcaccaaagaaatacattaaaatccccacaagtttttattttaaccacacaaaacaatcgtttttttcttttttaagcatttgtgcctatagtaaaacctcattaattgtgacttggttaacgcagaatgcaaactttgggccacagtgggactgacactaccctgcactaaagaaaggcagatgcagaatgcaaaccaggtgagcagacttaattctagaaaacaaaagaactttctgtgctctcacaatcatgagcagcattatctaacctaagggaaaagatttaaagaaaacagacaagttgtttaagtacactaaaatctatacttttcctcaggctcacagttaacaaccctatttgtcagatttttgttttgttttttttgagaggcagggtcttgtttgttgcccaggctggagtgcagtggtatgaccaagctcactgcagcct

SEQ ID NO: 238401 - DNA, 707 bp, Homo Sapiens
caatagggggaaaaaattacagtaattacacttctttaatcactctcacccatttccttcaaattacggatataggcaagaaactacaacagtattggcaagacctgtgactttgtaaccaaaatttcaaaacattactattgcaaatatcttgaaatgtttgtatttatcactactttggaatttaaagcattgaatatatttgtttttactaaatttaattaatacctttccctctaagtatcttttgcatttttaaaagattgaaaaggttttcaaatgtccaagggactttggcagaatcaggtatagcattaagaaacttaactgcctccaataacctagtaaaataaacctcacaatttccatttcaaaattattgtcacatacattcttaattgatgcattcaaatatttattgagcagctaaggagatacaaaggcgatttaaaacattgtcaggtgaggcaaatgcacaagtaatagaaagcaaagggcaaggttcactgaatcacagcagtcagaagaaagtgctttagggaaccaagagattgtttccagcctgaagaggcatgggtggcaaatcagaaaaggggattgagattaaaatagaagacttcagtctggattgttgatgacactcagtatggactatatttgtctctccttttcctttctccccatctttgggcttaatttaccggacg

SEQ ID NO: 238402 - DNA, 523 bp, Homo Sapiens
tgtacaaagctttaatatgatacaaatgggaaaattaaataaataattacacttttatgtacaggtggcctatacaaaagcactccatgtttctgccgatactctgtccttggttgcctgagcaaaattgtataaagggagctgcttggaggggaaaggaacacaataaaacgcctctggaggtatttcaaagagtagtttctcatctctctgatttcaggaagaggagaagagagggagagaaaagtggaattattaaagtcatctaactcattggtcttgttcaacaagaaagaattctggtttgtggctgaatctgatttaacagctgccaatagctcattacttctaagatgtatatctaattcaaaactagatgctcccccctccctcttttttccctaaaagctgggaacttgtaagtaaatggcctagtgaaatagacactggctattttagaaaaagggtcagaaggtagaccaggaactatgtatcaaggagaagtaagtgaggctcaagccca

SEQ ID NO: 238403 - DNA, 711 bp, Homo Sapiens
tcccaacattttggggaggccaaggcgggagggccaggagttcaagatcagcctgagcaacacagggagaccccacttctataaaaaaattggtaagttagcgaggcatggtgacacgcacctgtagccctagctactcagaaagttgaggcagaaatgtcacttaagcccaggagtttgaggttacagtgagctataatcacaccactgcactccagcctgggcaacagaggtcctgtctcttcaaagaattttttttctttttttttttagtatttttgctcaaaaatctgaagtgacagtcaaatctgaaagccaatgataaatcactacaatccaaacattctgaagaattatacttttgccttacatctccaaacttgagaaatccactgctgagttatgaagatgagggacagataacagcaaagactaaatgaaaaaataaatgcatgaaatgatccctatggtagaaatttctactgagcccttagaaatacttattttatgcattgaattcccctttcccctcccaccgcccatgaaacaaaaacaattgatgaacagaattcagttaaagggaatcaaaagggtagaccttgtggaggcctgccgtcaaagcctagctgtgtcagttgcacaggaagacaccccttttcttcctattacaagcaatcaacataatggaacattatgattaatatcaggtag

SEQ ID NO: 238404 - DNA, 617 bp, Homo Sapiens
aggctgcttctcagagccaccaaaggacaaaataagacaggtgtgagcccagtggaggaggcacggggcagagaccagccactgttgctggcacgctggtgcacgtagcactgtggcagatggacctggagaggaagcaggagggacagcacaatggagccaagaaaggacttagcatggccgggcgcggtggttcatgcctgtaatcccagcattttgggaggccaaggtgggcagatcacctgaggtcaggagtttgagaccagcctggccaacatggagaaatcccgtctctactaaaaatacaaaattagccaggcatggtgctgcatgcctgcaatcctgtagggaaaagaaagagagatcagactgttactgtgtctgtgtagaaagggaagacataagaaattccattttgacctgtaccttgaacaattggttggctgagatgctgttaatttgtgactttgccccaaatttgagctcacaaaaacatgtgttgtatggaatcaaggtttaaaggatctagggctgtgcaggacatgccttgttaataaaacgtttacaagcagtatgcttggtaaaagtcttcgccgttctctagtctcaataaaccc

SEQ ID NO: 238405 - DNA, 693 bp, Homo Sapiens
ttcttgtatgctcacacagcacaaagtgacctcgctctagttccttccttttcttataaggactcgatctcatcggcgagccccaccctcacgatctcacctaagcctagtcacctcccaaaggccccacctcctaataccaccctcctgggggtcagggtttcaacatataaactttggggggggacacaaacatgcagtccttaacaccatcgtcatggaaatggaggccacagacctaccaacacccataacctcaagggcactggtggggacagaggggtcttacccagcactgccatgtggcagaagttctccaacattatgtctctgtagaggcctccaggcagcacttaggaattgccaactcctctggtgaggtcactaccacatcctcaaggcccacagtctcctgaaacaacagaactttgctgcttcatggaggagcgtcagtatgtccacaccataggggtgtagtcacttccctctgccagggagaatggtggaggaagaatggattcctagtgtattttttctcttcagaactgacagcccatcaaggtacaatgaaatagaaaaaaaggctggccaggtgccaagtcccagctcaagcctggcagctcctcccactgagcctcatggtcaccccagaagacaggccttcctttcacacacatcagaaatagggcggac

SEQ ID NO: 238406 - DNA, 613 bp, Homo Sapiens
ttttttttttgagacagagtctcgctctggagtgcagtggcgtgattccagctcactgcaacctccgcctcctgggttcaagcaattctcatgcctcagcctcccaagtacctgggattacaggcacatgtcaccgtgcttagctaatttcttgtatttttattagagacaggggtttcaccatattggcctggctggtcttgaactcctggcctcaagtgatccacccatcttggcttaccaaagtgctgggattacaggtgtgagccacatgtccagccagaaaatattttttaagtggagaaccattaagattagatatagcttagaaaatccactatagtagcacaatgaggaaaaaatggactgaaatggaggagggcaagattaattaggaagcctctgaaaatatacaaggtaggggaaaaatgggaacctgaacaaaaggcggcactggaagtagggatggagaagggacatggatttgggagttatttataagggagcaaagaaatgactgagtaaaagggaaggaaagtcaaagtcttccaggtttctcgtgtgaatgacaagtaccctgggggtgtcatcaaccaagattagaaatcggacg

SEQ ID NO: 238407 - DNA, 743 bp, Homo Sapiens
aaaagaggttttaattggctcacggtcctgtagatggtacaggaagcacagcagcttttgcttctagggaggcctcaggaaacttacaatcatgttagaaggcgaaggagaagcaggcacatcttatatggccagagcaggagggagacagaggggaggcaccacacactttgaagcaaccagatgtgatgaggactcaatatcaggagaacagcactgagcgggtggtgctaaaccgtttgtgaggactctgccccataatcccatcgcctcccaccagggggcttacatttcaacatgagactcggtgaggacacagatccaaaccacatcaacagtgctttcatgcttttgattatcttttgtaactatgttattgaactataatttacataccatacaattcaccaacgtaaagtgtgtaattcaatggtcttaagcatattcagagttgtgtgaccatcgctacagtcaattttaggacatttttatcactgcaaaagaaagacctcaatcttcccattcctcccatcccgaagcaaccactaatctacttcctctatatggagatttgcttattctggacattttaaataagtggaataaccagtgaagatgggggctaggtagtaaataccgcagcttccctgtcacccggtggttacattctacatgttccttagtggacgtgagcccccgctgtacactaactgaacccaagtcccttgtttagagtcggagga

SEQ ID NO: 238408 - DNA, 713 bp, Homo Sapiens
gccaaggcctcaccctccctagcagggaccacaagaggtggcaacagctccctttattgagcatgtactgtatgccaagccctgtgccaagtgctgtggatgtatcatctcctttcattttcacagctaccctaagatgaaagttagaaccaccccctttttgaccaggcgcggtggctcaggcctgtaatcccagctaattttttaatttttttttgtagagatgcatttttgccatattgtccaggctggtctccaactcctgggcttaagcgatccacccacctcgacctcccaaaatgttggaattacaggtgtgagccactgcacccaacccacgcccatttttaacaaatgaagaaactgaggcttgcagaggttagatcatttgcccaaaatcacatgctggatccagaactagagcccccagtcttgttattctcaacactttttcctccacactacagggacttgatcttaacaccacagacatggcaagctcagagccaaaaatcaatatatgccctatttacttaatccagagtttctcaacctggcactaataacattttgagctggattattctttgtttgggggtgggagggcgctgccccacgcatggtaggaagttgagcagcatccctggcctctacccatagatgtcactagcaccccctcccgcagttctgacaaccaaaaatgtctccagact

SEQ ID NO: 238409 - DNA, 733 bp, Homo Sapiens
aacatttccaactaaatggtaaaaacctaagctagtagggcctatcaaaagtctgttataattttctgatactttttttttttttcaaacaattaggatgtttggtacaacgaaatggaatacaatgagataaattatcacagatgatactttggaagtcagcaagtattaatatatatttcaaaattattaattcatttttaaaatgccctctcatttcatatttatactccttgtataccaaatcttttatctttaatctttattttatttttatctttattgtctcttagcaacaacaaaaataagaacttcagttttgcccaagttacatcagttcaaaaaccctacaaatcaattctaactatacatatgaatgtttttttaagtttatttataatatgaatatagcttccctgaagaaagtgccaagggtctctgagtgagccactagtacttgtcgcctcctgcattcgaaagcaaccggacacatgcgacactcctgatcagtgctccagagctccgggagcagcggtaccctaggccctcctgcatcgcatgcccagttcacgtctgcaggacaggcagggctcccatgatggctttgcataccttgggagatgccactcacctaccatgcggatggctccatctggagtcttgctgtgtacaacctcaaccaccacatgcaacatagcatttggatgatgaagatgttgagaatgttaaggcc

SEQ ID NO: 238410 - DNA, 695 bp, Homo Sapiens
atttcataaccaaataatcaccaattttctctccattatttcgatgttgggtaaagcctgaaatgtggtgtcgagtttttccatttgcgttacatcaaattcttgtctactatggatattctgatatgacaaagactagttaaactcctattgaaagatctgccatttactacacccaaataagttctcttaggtataaattctttgatgttgaatgagcgttgggttatgactgaatctcctcacacacatacatgcttattacatttataatctttttgcatggcgtgaatttgatactaaacaaggtagtttctttgactgatggctttttcacattcattgcagcaatggaattttattcccatgtgaattctccaaatgtgactaaggtatgaaaatactaatagcatgaaaaatttgccacattcaatacatttgtaagatttctcactggtatagatttgcaggagtcgattaagagtttaacactaataccttttcttcattcgtcacattcagagggtttctctctggtgtgaattatctgatgctgagcaatggctgagctatgactgaaggctttaccacatgcagtacatacatgatttctccctggtgtgaactctcagatgctgaatgaagcctgaatttgataaatatcttcccatcttcattacattcatgagttctct

SEQ ID NO: 238411 - DNA, 640 bp, Homo Sapiens
ccagatcccactgtcactgaaccgagagggaatcccactttgcagactggatgcagcatagatcaggagcttaggagttttccttggtttctgctgataccaatttaaattattgctaatgccctgactcgcccggcaagtgatggtgactctgcctcctacagatgcagacagggaggatggagactgggtcatctggatgtcacatctggcaccatgtgtacttgcttttgtagctgtttttttgtaggacatgtgatcatcttagatgttccttcttccaaaacttcagttttattagatgttactcctgccacgcattcagtctttacagatgtttctttttcctcccatgtggtctttgtaggtctttcttgtggccatgcaaatttctcagatgtttctttcacaggccttgtaattttcctaggtgtttctcctgctgactcttcaatctttccagatattgttttccccaaacattgaacttcgtcagatgttccctccaccaaggcccgcagcttcgtgttggaaataactttttggtgccacaaagaagagttagcactccaacaacaagttaacactccagcaaggcaaatttacttctatagaagggtgagtcttgcagatggcggac

SEQ ID NO: 238412 - DNA, 556 bp, Homo Sapiens
taaaggataattccatgttagacattactatataaaaatacgcaaattaaaagcatctttaccatgcttctaagctaccacataattccaaacaatccacacaaccaagaaaactactcaaaacattcctcaaaaagtctcaacaaccagtatcatatgaggactaaaacagttcttgtcgattttcaaaaagatagggagaaactcttaagtcattagcatattaacataacttctaacaaaatttcctgtaggaaataaattcaattgaatcatgctaccaatcactattatttcatgctatataacttctaaaggtaaagtaattgcagttactggaatggagtaaccaaataaaaacataattgtttttgtaaaatagttttcagacagaacagagatattaaatttgccagttttaagtaaataggtacacaggcattgtgtactgctcagactggcagcactacttgaagttgctgtcattaattattaaattattaaattaaaatcaactaattagtacaaagtatcaatgtatagttaaaaagtctac

SEQ ID NO: 238413 - DNA, 703 bp, Homo Sapiens
ttcagcaggtgcatgggaaaccatggaagacacaaattctgcacatccaaccagtgaaatcctatgctccccatgtggatcacatagtcctggatctggaatgctgcccctgtccttcagttggctagaggaggtagatcctgggacacatgggatccacgtgcgagtggcccttaaatgtatcagttcagtccaggttgtcatcccttttgtcccctggtgatcagtttttttcatattttatagccctgaaagcaggctctagatcaattcaaattatttcatttgtctttcattgataacagaaaatgaaatacctgtttgggagaagcagcatggcccattgaaatgaggctcatctgtgcaattatgaattccaaattctgacctcagttctggaattgaagtttcagtatgttttggcctcgggtttcgttatttgcaaaatgagagtttctttgaactgtctcacgtgactattaagcaactatacacaggacatcggttattttagagtgaaagacacagtgctttttccaaattgctctggctaccatatagaaaattgactgaaggagggccaagatggaaacagagagaccagtgaggaggcttctgtggttgtccaggtctgaggtgatggtaacttggactcggatggtggtaatgggaggtagattgatatataaataaaattgacaga

SEQ ID NO: 238414 - DNA, 643 bp, Homo Sapiens
aagtgcctccatgttaaagtagagggggccccttaccagatgtaaaaatacaaaataaagcttaaatatatgagctgcggtcaatacaataaagttattttctaaaaaaataataaaaatgtaaaaggaagacttaccatcaccaaaacatggaagcacttacttctttagtttcaaagcaagtacatccacgtttaagtggtggggagcccagtcttggaaaaagttagaatcctttaacctgtaacaagcttagtaaccttaaaacacaataacaaaaaaattttgtaacaaaaggtgtgctggcttggagacacctccactgaaacatggaagcacttacttttgtttcacacagcaggtacccccatgttaaagcaaaggggatcccttcaaatgaggttagcgtgttctattttggagaagtaaattggattcactcctactaaaacatggaagcacttacttttaaagtcacagaaagcacttccatgttaaagttgaagggagcccacccaacatacaacttctttggacttcagagtatttagagctgaggagaaagaaaacaaaatggcataactttagaagaaaaaaattttttttaccttcctgaactagttcccaaagattcgtgttctcc

SEQ ID NO: 238415 - DNA, 464 bp, Homo Sapiens
aagcatatatgaaaaacttacaaaaagtttgtaatgatcttttcttaagctaagagaatggaaaaaatgagaaaaattaaattataaaatgaaactttggtttagaggtaagaaacatttgatgacagtcaagagatcagggttgtacagtgtattatgtgaatgttgtgactcattggtttcatcttggatatcataacttgacattttgtaaaagtgatttttcatgggagttttttcaggtgccctataaagtcctgtcccatgagaagtgaataatagtcttccatattctggagatatcttaatgaatagcatcttcctacagtcttccattgtttagtccttggagagacactcattagtgactgttaaggtacctgagttattaggtgcctgtagactatgcccagtgatatgtgcattaggtacatgctccctagctgcgttgacactgactgaag

SEQ ID NO: 238416 - DNA, 655 bp, Homo Sapiens
gaaggcgtactggcccttagttcagttatttttagttgtataagttgatattttttttctggaatgtagccatttgctgttatctgggaaacaagattctaacaggaaaccagcctaagacacttcaggttgagcgctgcctcggagtctgtgcccgtcgcgtcccctgcttgagttttgcacttggaagaaccctgcaccggctggcgtgtgcgacggcccagtcccatccagagcatggagcccgaccccagccagcgccttccactccatcatttcatttcacacccccgaagggaggggaggccaggaggggagctgctcctgccagaagctggtgggtgaccgttgggaatcggccacacctggtgtccatgggcagcctggtgcaattccattcatttgtacagaaacatttttgaaaaattcttttcaataagatgcaaaatcttccaacttttcaacccaacgtgatgaatatttgattttgttctagatttcctgtagctgtgaattgttaaaatgtatgattcaggataaaacgtaaacacgtgctgttagtaatttcttgtggatttcattgttttgccttcaaataaagcctttttttaaagaaaaaaaaaaaaaaagggcggcgctcgcgatcagaacagtc

SEQ ID NO: 238417 - DNA, 779 bp, Homo Sapiens
atatcatcagttagtcttgtagactgattaagaaactgggtatgttaactataaagatcccaaggtaaaataaaacccatttcatcaccatagtttttaatgaagaaacttgtttaaaattgtaaaggaaaaaatgggaatgggacggcaaaatcttagcagcaaagtggttaaacaaattgaaaatattaatgcacaaacattaaaatattaaagcatatatgttgcatataaaatacagtacagaaccaggagttgcactatactgattagtgcttaacagaagaaatgattaaatttgttcctcccagaagtatatacacagttcatttccacagcattttcctatatagccagcaagttattttcttcagttattcacaccttgatcaaacctgaattataaacttagcacttacaaatatgaaaattcattcacaaggaaaaacagtatttccatttcaccaataaaaattttgaaagttaacagtctattctaggaaaccaagtttagctgaaaacttcagggatgaagatcatctgttgtagcagcattcaaatatataaacagtaaaaataagacttaaaactgctgcctacagtgtcatgttttggatttagttcatccaattgatttttagtacaaaactagaaataccctcttcttcataacatctatagttatcaatatattttcttcttttcaatgtgaaataatacttcaagatgatctatatacacaatgttgtcagttcaagctgtcatataaatataatgcc

SEQ ID NO: 238418 - DNA, 693 bp, Homo Sapiens
ccattgtatggggcaattttaagtcagctaaggcaatacccttatgcatgaacatttcccagactttcatgaagctgttgaggtcctaggcaattaatgcagcagttgcgataaataaaaacatctcacctaagtctccttttcttcataacatagatactgacatgataggaagctctcagcttagggaaagagaataaattttagattatagaacatggattcaaaagtgactggaacaaattggctgacaccttactggtaacctgctattcttctggtgttatccttcaggattgttccactaaaatttatttttcaaaaaatttacttcacattattctatgtaagtgatgacttgtcagtgttccaggtgtatcttagctaaaactagagaatgccctaacttagatggtttttgaagcctatacaattggtattgtttgacccttaagcttttacatctcttagcatggaggacgaagaaagctgtacattgttgcttgagagtctgtacatttagtccagatttgtatttgcactgtcagtatggcaaatgagtgaaaaatgtttaatacactattggattttttatttcctttttttgattcagcttatacccgggctgaaaacctcaatttatgttcatgacagtggggatttttttaaatgtctacattctttctaataaac

SEQ ID NO: 238419 - DNA, 545 bp, Homo Sapiens
ttttttttttaatagttattgagtgttctacagcttacagtaaataccatagttacaaattcttggcttcaatctttcagagtgatcactgtctgatcttcaaaacaaaacaaaaacccaaaagaatccaaaacaacaaaacaaaaccagatttacacttcatacacacaggcaaggccatggggctttccaatctttacactccggactgtgttttgaaaacacctataaattctttgatcaaactacttggaagacactggtcaaaggtttattattattattattattattattattattttaaattttatttctttttaaaatgtgagttccaataaaatttaaaaattagattccaacctgtagattaaaatgaattaaaaaatacaaaatcatatacaacgctctcttcacagggatgttacatgccatgagaacaggtttctctgtcatgtgatatgaaacagggaagcagatgcctttaagtcaggatggggacaggcccttgggcctttcaagattattacagaccggacgcgggg

SEQ ID NO: 238420 - DNA, 555 bp, Homo Sapiens
tgaggaataaagcaataattcggcatagacctgctcttgttaaagtaattttaatttcgagcgtagccttcagcattgccctgatatgtgggatggcaatctcctatatgatatatcgactggcacaggctgaggaaagacaacagctcgagtcactttataagaacctcaggataccgttattaggagatgaagaagagggctcagaggacgagggtgagtccacgcacctacttccagagaacgaaaatgagctggaaaagttcatccactcagttattatatcaaaaagaagcaaaaatattaagaagaaactgaaggaagagcaaaactcagtaacagaaaacaaaacaaagaatgcgtcacataatggaaaaatggaagacttgtgaacgcagacgacagaggtgccggctgaggcagaggagaaactatgggggtgctgggagactgagcctgtgggcgtggcttgctcccagagaaccttatggaagaggacatcaaagaaagaaatgccagacctgtatcccagaaaataaagccacatgatatagc

SEQ ID NO: 238421 - DNA, 626 bp, Homo Sapiens
tatataaggaaagtcctcatacagtatcagtagaccatggcttataaataaaatatactgtatttgttatcaaatatagaaacaacagttccagatttatgttttttgaaaaaattaatttattttaagttaaggatctctacgtaaatttattttggtatcaaacaactgcaattagtgatggggggataaaagcatccctaattgtggaaggatggtaatttatttacaaaaactatacaaaattagattaattataacaacaacttatcaaaggttcctgaaattaattttgcttttgaaaaagtatcaaaagtcttcagatccagaatgatagcattttattatttctgattcatggaattatagcacatcagatctttaagcaactacatcagataaaatcctagataataaaatattcttcatttcctgacagcttggaatgtaaatgaaaacttgttccatttttattaaagaaaaaacctagaataatgcatccaatggtatcaaatacctgttagaatggcgtgtctgctataattaaacatgggcaattagttctacatagttaaaaattgccttaaattaattccttcctttaataaaaaagtttttccggacgc

SEQ ID NO: 238422 - DNA, 574 bp, Homo Sapiens
atgtttatttcaaagagcgttggtaatttaaacgtcctatttaatccccaaaacagtcctgagggggagataaggcagttatcttcatagtacaggaaaggaaaaaagcgagggtccaaggccgactataccctcagctccattagcccccgaggcctccctgccaggcggggcggacaatcccagtgcagatgctctgtatcgatcgcatgctatcggttctttcaaggaacgtgtattgatcatcaattaagtggtgagtactcctctagatgtcgattcttagcaaactgcggaaactcctacagacaaaaactcaggtgtgggcgcagaagggccggggatgcgctcggtcaagacttgaaggcccggggcttgggccctgtgtcctcaccgagccccggggaggctccggctccgtccacacccggagcgcgactcagccgcggccggggctcttctggagaacggcgcggtcaggctctgccgcagctttcaggtcccctcggccccgtccgggtgcagcgcaaccaggctgcccgcggagccccaccgcccccatgccgccgcccgc

SEQ ID NO: 238423 - DNA, 638 bp, Homo Sapiens
ttttttttttacaacatgatgccatttatttacatgattctgaaagaatatgagtccccaggatcaaatatatacatttttaatatttgaaatatttacataatggaaccacatcagggttcgagggtaagaacagtgttttcaaatgtcctctccaggtgtgtttaaaaaaaaaaaaaatccagtaatccaaagctcacattatgctttttctaacaggccaatctttacctttcttttaaataagtactcagacatgggaacagttgcatctaatttgtgtgaaaagctgtttaaaacttcttacgttttcaggtaattttactccctggtgaaattctgatctacaacgaagaaagccccaggaatttctctaagcacatcatcagtacatttttaaacactaatgagccaaggtaaaacaagatataaaccttctacaagacaaaaatgaaaacaaatagttagtggttggtaactgccttgaatgatttacctttatccttaaataacatgtaaacttacaaattgccgagcagaatacctatcatgtttgtaaaactctcactgtctgtcaatttgcctaattttatttcatttttttgttttgttttaaagggggttttcacttacacttt

SEQ ID NO: 238424 - DNA, 718 bp, Homo Sapiens
ttttttttttaagtagatgttacgaaggatggtttttttttttttttcaacttgcaaaatctcttgaaggttggagcagagccgccggttacctttgagcatcgaaataccgcaagttatcccgtttccttttcccctcaggaaagatgggtgcagggttgagatgttacaagagaattaaaagagagccaccagcttggcatagtagaagaaacaaacccaaaatgaaaacacccggattttaagcgcggatcctgcgaggccggtttgcactggccgaacgcctgcgttaaccctttgggcgccgcagctgggatccccggtgtttgcggacccgaccggcaggaacagagatggagtgtcccgcgcccgcatggggagtgagctctcttccccaaagagggagcgagccgagaagcactttttcctccggtgcgtgcgtcacggcccgggacaggcgtcgagtccggtttggagtgggggcagagacgcggcgaggagccgctcaaatgtccgctgactgggggttcgccttaatctgtcctcgccaggagcgctcgccctcgccctcccgctggctcgctcctgggccctggaggggcatgggcccgggggcggttcgggaggggccccaggtgaagggcgcccgcacttctcctgcggcaatcatcgctctcctgcctccacacgtcgcggcagcggcccgcggacgcgtggg

SEQ ID NO: 238425 - DNA, 676 bp, Homo Sapiens
ttttttttttacaatgcctagcagaatgtcttatatgtcaataaatatttgccttgttagaagtaatttgtgctttgttataagtaattaaaaacaagcttttatgcactctttttaaattcacttaagctacaccgtagtatcctcaaaaaaggctttgaaattaagattactgtccacatattggattagttattgatgaataagcaaatcagcccctttcaaaagagatcagttagtcctattctacgtggtttctagtgaaatagtccagcaaaatcatataatactgtgtcaaactttttctgctcttctttttttaaaaaccaaacaacagaccttcattctagggaacagcagttctacatcttttaccccctcggtgaggtaaaagtgtcaatagagaagttactactatattcccctcccaaatttttagaaggaacagtaaaaataaggttttgatgaaattccaataaaatatttaactcattattgtctcatgtcagaaacaaaaataaggccattttcatgttataaacatgaatataataaccttccctttgtccaaaatagccagattgctacgttctcctctttccacctttctaacgaggttatccagtatttatttatcctaacaaacagtgaccttccaatatgttctctcggacgc

SEQ ID NO: 238426 - DNA, 652 bp, Homo Sapiens
attactgactttaataggcaccacttgtaaaagaagcagctacagtttcttaaacactcactttaaatacataatttaaagttcaaaatgtttggtactatttaagagttttctcatcaagatggatagtacattctggagagtcaaactatacatttctctatagaaaagaaacatgctttatttaagataggaacatctcatgccttctaaagctttcatttttatttaacacaatgctgagattctattcttaggtgaataattttcaactatttttagtaagtcacctggggctaaatgaaaagtctgccattcacagtgtgtgcttcctgagagaaaatcatgagaatacagggggctgaaatggccccaagctttcttccaaaacaggttctttgcaccttgagttcccatccacttcaaaggagggacaaagtgggaggctccaacccactgggttcttacaagtgcttagaaattgtatttttaagattaggtcctttttattaccctttgccatgggatttcttatgaaagctaaatggacaagtttctctttttctctttttatatgtaggttgttttgactccaccctgtgcaacagttcccaaaatgcctgagccgccagaaccaaacatcaaacagaaa

SEQ ID NO: 238427 - DNA, 551 bp, Homo Sapiens
gcattatttataatagtgaatgattggagacaaatttgcatcaataggtgaatcattaaattgtgatacaaccataccatgaaatgttatgcagtcattttttaaatgaggtaaatttccatgtattaatgcaagaggaggtccagaatacaatgcaaagtgaaaaaagttgcaaaacagtacatataatatcccatttcatttaaaaaaaacctatatacaaatgtgtgggtattcatatatgtatatatgtgtatattaatatataaacacaaacagaacaacatctgggaagacacacaccaaattaagttattcttggagaatgggagtggtgagagggactaaggaaaaatctttcactttttactttacacatttatgttttgcttgaattttgttggctaacattaataatttttgaatttttatcacaataaaacattttaacaaaataggcacttttgtaatcagatcaatagagttataatgtatgtgttttaaataaaaatagctccatgggggctgggcgtagtggctcacacctgtaa

SEQ ID NO: 238428 - DNA, 747 bp, Homo Sapiens
ttattctatagcctactgggaattggccagaagttagaaggacattggaaatgacttttaaatctccatttgagaaaaagcatgccatgagtctaaataaccaatttcatttagcaaacaaaatacaagtaaacaaaacacaacttctctgatgaatgaagtggttaccatattttttcccattgtgtaaagatagttctcatatgaaatatatcacctaagcagtagtaatcagaatattctgcaaacttattgggggtaatttaaaccccaaatcggaagaatagaataaaagacataaaagtctttcttcaaaagaaaaacaaaacaaaacaaaaaacaataccccttcggtgtcaaatgatacagaaatggcactggtttcctatatgttgactgagatactttttactgcatagcaaattaaaaagatatgctcatcccacttttatttttatgcactacttttagttctgcagaaataaaagctatactgaatttaaaactttttacacacataatcctgtgcaaactatgtaatactttgtttgtaggatattaacccaactttctaatatattttgtatatgtctctttttgtttatttgagacaaagtctcactctgtcacccaggctggagtgcagtggtgcaatcacagctcactgcagcttcgacctcctgggcacaggtgatctcacttcagcttcccgagtagctgggaccacaggcgtgcaccaccaggcgg

SEQ ID NO: 238429 - DNA, 755 bp, Homo Sapiens
caagttgttgtttctgagttccagctgacaaattccaccatacagaccaggcgtaggtgcagatcaggaaaggaatcttagaactcagtggatgtaagccctgcccagcagaccagccccttctaccactgacttccatttcagacccttctccacaggaaggaactgatggcctcctaaacaagcagccatcagcttggccttgctacccttgagagaaggacccagtaaccattatcaaacacaatgaaaagcagaggagggttctgaccaagaactgctcgctttgtatctccaaacgatgcagtgcaaatccagtggcaaatgcaggagaggcaaccacaagcacatggccagccagagtcctaaaatcagaacaacaaagtaaaagggtagaaggggaaatatgctggctaaaaaaagagcctttttctttgggacaggtccctgtatggtaaagcaaagagctagacttttggcatataatgacatctacttctgaaaaggaagacttaaccaaaaaagcttaagggcccagaagaacaaagttactgttttacttctcaagcaggtgagaaccaaagaggacaaaaccatcatccttcaggcctgctactctactaatctcagatgagcaattcagagggacttaaaaaccttcgggtaggagcagagcgcaaggaaacagccaactttcccccaagagcacatcccaaactgcctgccccaagggctcatctaacggtggaatcaca

SEQ ID NO: 238430 - DNA, 675 bp, Homo Sapiens
gacaaaagtgtctcgctatgagctgaggtggtaagtagaacagggaatgaatgtcagccttgggagaaacttagctttaagctacagtgattaatatcctatcctaccatttgattatctacaggtgtcaggatgacacagaaagtatagtggaaggtctcaggggagtggagtcatggaagtggtattggcctgtcttgacacagtgatggtcgtctcttcaaggggcacacccacaccaataaaaggaaagcatactggtatggattggtagatccatctttatttccccgctttacatttctaaagggagggggatggccctatagagtaggaagagaacattaaaataatcactgcttgtcacctccttgcttcttgtgtgccttctccaagggaagactggctaactctgaatgtgacattctctgggtcaccttaccagaggtcttaaagaattaatgtgcttcaaaagccaatctcatctttcattggctgactcacagggaatcgctaaagcatgggagtgattaggaaggcccaggtagaacatgttgagcgagaagagagccatgatacaaccctcggggaataccaactcttaagtggcagatgaatgaagagaagcctatgaaaaagagtcactgagaaagaagaatcaggagcaggggatgt

SEQ ID NO: 238431 - DNA, 636 bp, Homo Sapiens
aaaactaaagtttaatagtcattgaatgggtaacaaccacttgtagtctacatttaaaaattttaatcatagctaagaaaaactaaaaacaaataattctattaagaaacaacaaaaatgataaacatttaatacctaaatgtagatacttaaaatcctaaacaaaaatattaaagttaaaagggccttgaaatttgtttctaacaaatcatcttatataatcaattcctaaatagctcatatcctttgctttggtgttttatctgctatcatctaaacattagtacagtagaaaatcactcaggttcttttcaaatgcttggcattataatgtgatctcatatctttcctcaaattaaattttgctccacatattccacatgtatacagatgaacatccatgtgctgctccaactgttcattatttgggaatatctgaaagcagacctggcatatagtctcaccagcagataaatgagaaatcatatgccgtacatggtcatgttttctgaagtttccttgatcacaaatggaacagacatacctggccatgcctttgtgcatatcattgtgcagtcgcaactgacgctctcttaaaaactgctttccacatgtttgacaaacaaaccggacgcg

SEQ ID NO: 238432 - DNA, 440 bp, Homo Sapiens
ttttttttttcactgctgtatccctagtacctacaatagtgcctagtacacagtaaatgctcaataaacaactacaaggattttcaagaaatccttttagctaagtgacaaagatttacacaggcccatagatccaagaccagaaacaaagaagcctgggcctgagtaaatcaggaattaaggaaaatgtacacattaataaaaatctacctctcctcatttatattctgtgcaattagctgtctacccattgataatattgtaaacatagacaaattctgagatgggtgcagtagcttatgcctataatcccagcactttgggaggccaaggtgggaggatcacttgagaccaggcgttcaagaacaacctgggcaacacagcaaaaccttgtctctatatttttaaaaataaaaagaagaaattctgttcatcaaaat

SEQ ID NO: 238433 - DNA, 593 bp, Homo Sapiens
ttttttttttctagacaaatgaaaacatgttttatttacaagaaaaaagtctgtacattgtgtatacataaaaatatacaaaaccaaaatagaaaatatccaagtgttaaaatgtgtacaaacacttttaaaatgcgactcctggaaaacttcaagctttaattagtttgaagagtacacatttcattttaaaaattatcatacaaaagaattcccaaagctgttaaaaaagttcactggtttccactggaagaattgtctaagtatttcatctagaataaaacaggatttgttataaatgttagattttaacaccaccaatgcaatttctttgtttccaatctacctagcaagaagactattttccatagaaccagtaaatgtttcttctaatctttgaaagccatgagctacagctaagcttcccttcaaagttcagtgttaaatcaggcttctgactaggataaaatattaaggtagtgttctaccttcatagtgccttttaaataattctgtcagtccattttaatgtagccaagatgtgcagagtatgagtgtgtgggaagcggtggcggaggactgcggacgcgggg

SEQ ID NO: 238434 - DNA, 657 bp, Homo Sapiens
ttttcaagatgcttagaatcatttaatgaatgttccaaacacacccttcactgggctacaggtaaatttcactgggatggaagcagatgaaccacccaatcaaacagtacatgattactcggtttccagaaatctggataccagaaaaactcagtaggaaacatcaggatcacctagccagaggttccttgtgattctttgcttcctcctctcctcttcctcctccctgctaaggaacttctccaggggtacaaatgttcaggatgggagaaggggaagtcaggtcccttatctctagggcaaagaggagtgctgtgacaccacaccccagagacaacaagatgatgtggaggcacaggcctgctcaataaatagttcccagaagtctccacagtgggattaatgggcccagggacgctgaactgcaggagccaccttcccgaggccaggctgtggcctgctcgctacgtgttgcacaccagcacatctgcaaagggtcccaggaggatcttgttgaagatgcagcggacccacaccaggtaggtggtgaagggcttgatgttctcagtgaaggtgtggttctgcagagccaggatgtaaggcacgtaggtgttctccccctgctcctgcagccacacctcgtacttcaccggacgc

SEQ ID NO: 238435 - DNA, 546 bp, Homo Sapiens
  misc_feature (9)..(9): n is a, c, g, or t
agccctganagctttatagtcctggacatcaaaaattttatttgagatgatgaatgttttgttttcatcttttcttatattaccacaattgagatattttagtaattgaaggaacatacacagatatttggcagaagtcgagtaaggaggggaaaaaaagagtccgtgagtttcagtcattttcactgctcttttcaaaaagattgtgttgagctggtagaagactaaagatgtcactgaagacatcacagatactatatttatcttttggctttgtgtacattagagaatgttgattatttttatacaaaaatacagcgggtaatttttttaatctttagatgcctcttgtttgaatgtatgctttgtggaattctttgtgtagtaatgttttaaaaaaagatgtttactgatagttacatgtaggattagaatatgtaatataatataaggctcatgatccagacctacgatagcttgtagtctatgttacgtatttctttatatcacatttttaatcattggattaaagtatcaagaaaagct

SEQ ID NO: 238436 - DNA, 437 bp, Homo Sapiens
gcgacgagtttcagattctggagatgccctccaagacgcaggtgtgcgccctgaagccgaaggcagatgccaagctgggcatgcccatgtgcctgcggctgtggcaggccgactgcagctcccgcccactccttctggccggctatgaggatggatcggtggtcctgtgggacgtctctgagcagaaggtgtgcagccgcatcgcctgccatgaggagcccgtcaagggcctctgaggaccagcaagtcatggcccaaggaccatggagtccccgctgtcttcatgaggttggtatttccttttgtggagtgcctcatcacaggacggtgactctgggggccagccagagccctggccgtccgaggcctgcaggagacgttggcttgggcctgctgtgttgccagctgagggtattttataataaatttccattgcc

SEQ ID NO: 238437 - DNA, 608 bp, Homo Sapiens
tttcaaaggatttatttgatttccccacatgatcacaaccatggttttacattgatagagtctgttgccactgacaaacagaatgcagatgaaaacaaacgcactcctttcctctcaaaggtacacagtgggggtgccaggcttcttgtgagggaggtgtcccttgaagtctctgaacagtctggggattcaggacctgattctaattgcttaaaacaactcggaggcaaaagatattttccaagaggagatgcatgctgtgtgcagtctcgatgtgactgcacacagaagggcgatgcagatgcatctgaatggagggcaggcctcctccctcttgtcctgtgctcagcacccccacctcaccctgctcagtgttgcaatgctgccttgactattgttgttacataaaatacaaatgtactcgtttctcaggcaggaagggtgatgatattttacaaggagaactgtaagactgtgcgtgcttacctgcgggcacagagcttcccgtggcgctgagtcaacacccagcatcagctgtgaacatctgctgtcttttcagctcattaagaaaaacaagaggctcctgctgcatgcagtcggacgcgggg

SEQ ID NO: 238438 - DNA, 477 bp, Homo Sapiens
ttttttttttaacacagcactgagttttattagggatttcattaaggttaaatttctaggaatgagggagtcctagttagaggacccaaaagcccacgaagcctcctcagatctcatagtgaaccacccgctctggttctttggagggatcaccgcctcgttccaggtacagattattgtaaggatactgctttggtccctacagaaaaaaacacaggtcagcaagaacatacattcagtcaatacctggctacaccccactctgagttaacaatcacgcatggtaaatgggtacacagtagcctctggtcagacccagctgggctaggaaggcaggaacagcactcctcttcctcactcagcccaaggcagagagaaagcctaaattgtaagagaagtggtgcctacactgtgagagagaaggagaaagggggagggaagggggttagggaaaggaggggaagggaggaagacagg

SEQ ID NO: 238439 - DNA, 519 bp, Homo Sapiens
agccacagcttaaggtcagttctgcctatatagaaaccacacagttaacctgaggaaatgctctctggtactcactgaaagccacactcatccacatcctgatacaaggcccaccatatgcagacctgactgccaaaacatgccctagtgtctgccgtacagagtgaagtcctgaaggatatttagtctgtccaaaactaaaatgaagatttcaactccccaaccccctctaacaagccagctaaaggtggactatagtgcagacccagcaaccttgtgaccaggctaaaacccctcatcactacaaattcagagggcatctcatcaccctaagggcccaacgaaagatctttaccttctaacatcagtttatgaaaacttgaaaaggtgtttgctccatcaaattcagacaccagtacaaaactatattatgcccattgtctggttctattttaatgtagcactggaagtgtgtggcagaagaattagtcaaagaaataaaaatagccattgaaattg

SEQ ID NO: 238440 - DNA, 639 bp, Homo Sapiens
ttaaaaaaccatccaaaattagatgtaatttagcatttaagttctttacttaatctgcagtaagtttttggcaaaacaatgcagtggctccgaggtgttcttgccagaataaaccttgaagccccaaacttccaagagtgaagggggctacggtgacatggcaatgctgcaaagacagcgccgcagcactggagagctgagccagcctggggccgagggggacaggaatgcaccgtgtggacaccaggctgccaagaaccatgccctgccgctggagacaggagacaggcacccacgcagctgaccaaagctcgaccaggccaacggccaccgaagatgtgccacctcatgaagcgagggcactgcttcctatctcaggccttttccttcactgaaaaacttcaaaccaaaccaagaggagtcatttctcaggaagaatttagtgttattaattagaactctcttaagtgagagggagcctgttggctgcttttcttatcacctttggcaaccaccctcacctgtaaaatcaagatctaacggacgtgcgacatggcaacccacaggaagtctccttaagccaagacttgcaacagaagcccggcaagcgggacagaccggcggacagaccgttccacg

SEQ ID NO: 238441 - DNA, 538 bp, Homo Sapiens
cagtacatactcaggtctcatagcttgtaaaacaaaggaaaaatgaaaagtcaccatcatcccagcataatgtaaggctcccctgctgcccagattggaatgtgctcgggagggccctggcagtctgggctccagcaggcctgggtgggcctgggtgcctatgcgtctcacccactcccagggcgtgtggatgcaactcctcagggtcacactttgaataacaaggagctaatgagtagccttcccaaaaatgggggccaaatccctcaccttcctgagccctcccacggggagagggagggtcttttatggagcgtggtgcttcatgcttcatcgttcagaagggagcgtggtatccagaaacagggaaagcattgctgagtaacgtggcggagtgagcaggctccagacaacgcatccaccaagagttcttccatgcgctggtgattccccatccagcagtaaatgttgttcatgtttacagatgatagctatggaatacaggcctttcgtgagtggcaaatttaattaatcttta

SEQ ID NO: 238442 - DNA, 585 bp, Homo Sapiens
gaagggacaaatgggaagttttcacttagagtttgatttacaagacaataggaggaatcagatttgggaacacaacaggcttgaacactttctggagactgagagacagttcagagtcagccctcaccgttagccagacccctggccaggacccgcagcaggctggtccagcgggtctgtggggcactcctgtggggcactcttggtggaaacgatgagccaggtgatggtctccccaggagtgggcaatgggtgaggcctgagccctgaactggctggctcttggacagtccttgaaaatgtggctgctccagaagccactcaagctggaccatggtcacagttaacctcaggcccaacattaaacaaaaatgtactgagtgctcagtcactagagatgattttactgttacacagggaaggcaaaaaatagcttccactgcccaatgcactcttcagtttcacgtatatggcttcacagtttacaaagcgctgcctgtgtcgcagcagcccagccttacagcagctcaagggaccccagggagggcgcctttctccatttgcataaatgaggcagagtggccc

SEQ ID NO: 238443 - DNA, 519 bp, Homo Sapiens
ttagttatgcatctcataatcagactccatgctttttaaagacagagataatatcttctctattctattctacttcctccatttcaccatttatacaaagtcattcaaaaaggctgattcatgccttcctgcctcttggctatggccctccccatctactctttaaactttaatctataacttttcatcagttttgttccctatctagaaaacattttcttctgtttgctaatctttgtccctcacaatttttgaaatccatctcatcactgaaatactttcttcttcaagtacttttttatttttcttcaacttctcttgatttgacctcagtgctttgaattcactggtgctacaatatgtaactgtggttaattgccttgtaaattttgcgtgtctgtatacttttataccaacttattgtaggctctttgaggtcaggtatgtatttctttcccatatagatagtattttgtacataccagttgttaaataaataatttttaaaatatcaaaaaa

SEQ ID NO: 238444 - DNA, 507 bp, Homo Sapiens
atatatatatatatatataagttgttatcgatttgtctggtgttttaaggggaaagggaaaaggaaaggaggtaaattttttagcttccatgaacatttactttaagatgctgactgcatctcttggtgtaggttccagatgagataacaaactagtcttggatcatctgggcatctgatttctagaagccaatgattcactcacaagtagctctaggtatttattcttagttgtgaacactggattctgtgtggtcctggatggcaccaactgtagtttcctgttcaggcattccctgagggaccatattgtcttcaattacctgctcccttggaggggaccttgacactggagctttaaccaaattcagagggtcgccactgtcatcatctacttgcagaattgccacctctgtggtggatgcattcgatatttctagctgtaatggccccaactccagggaactacatttagaagggtcacctggctcagagagtggagaacac

SEQ ID NO: 238445 - DNA, 676 bp, Homo Sapiens
cccatgagacacagacgatgaatcagggaggtagctattaggcagggggtctgcgctcgagctgctctcagatacctcctcctgagaacggctgccgcggtccgagctttgccccacgccagagtcatcggcctctgcctgccccggggcggccgcggcgtcgctgctgtcggcggacacggcttctgaggtgcccacaccccaggccgctctcagagggctcctcgggccggccaggcccaggggccgcgtcgctgctgctctccacctcgttctcctccatctgatcggcgggctgcctgacagcggggcgtagggtctgggaacttcactctgagaagagaggtgaccgtggctggaacaagtgggccatctccccagccccggcaaccacggccacccatttgcacccctgcgcccattttgcagatgcgaagattgagtctccgacggggcggagcttcctggtgtattgcgaggggagctcgggaaaaacttgacggagaagctgtgcttcccaggctaaggcccttcccgggagggtggtcaatggctggtaatcttgaccctttccctcgcccccacgattctcgtggagcgttccgctctgtgagccccatccgggcccagtggttcagcccttcggcccccgcgtccccccgggttgcagggccgg

SEQ ID NO: 238446 - DNA, 702 bp, Homo Sapiens
gggtgggggaggagaaaggaaggaaataccaggtaagagaaaagggctggagaacaggtgacctttttgtttttattttttctcaaacagcaagtactgtgggtctgataccaggttcacctgaagggtacatcttaacagcatccagaaggctttcttttgacaaatcacacgcaccaccgcatcaggtgggaggggtctggccatgcggctcaagtgtccaggtggagatgaatgtgtggctcccgcaggcctgaactcacccaggaatggcttggcaaggagggccggtggggacagagagggctcatcccaggccccacaagcagccgcttgcagtgggagaaggaaaagcagacaagaagctcaggtagggaatgcctggaactgtcgggtgggcagcccctggggaagggactcaagcataaaggcttgggataaagagggaaaagaccaggtgagggcaggaggggagctgctgaaagatgcaggtgaacagtaaagcacctttcagtaaaactgccctttcccaggcagctctggggtgggcgctgttggtaggaggccgttctcccgcttccttagaattgtgagagcagtaagaagttacttcagcagttcctaagatgctccttccccatgttctacactagacacagagcttagagcccaagcctgagcgctgtcctgcacccgtgagcc

SEQ ID NO: 238447 - DNA, 709 bp, Homo Sapiens
tatccaatttacatgctctagataccaccttttttattttttacagtaaggtctggtattcaaatacccacttgtacactgacagctttaagaaaaacaggacacagagggagttgtcatttttagcagcaatgaaataccactaacccctttttacataccgaattcaagtcactatcagaggtgagtgcaccacaaagtcaccaggtacaaaattgctagttcatttttaaattaataacttgaaattacccctgccccccaccccattacatctttttataaacagcaaacattttgctattttatacataggctagcaggcttgtttcaatatgaaagtgctaattcatttacagatttttataatcagttatgtagtgctacaataaatgtccaataatctacataggaacaatgatgaaaatgatgaagactgaataaggctatcagatgaccttatcttatttacatataaagaatagatacccaatggtgaggaagagacagaaattggacaaatactcataggtgtaaaaattacatctacctttgagttttatactgtaaatgagacattttaaatagtcctgtagcccatgcctattttttcctcagaaaaagaaaagctgccttcatgacatcccctcgtttcagatttccacagtgtcactttgaagcttcagagtcaggatcttactttcttcaa

SEQ ID NO: 238448 - DNA, 681 bp, Homo Sapiens
cctaatttaaaacatgatacatttatctctttagccaatttgatgttactgttttacaaacaacactcattttgtaattgttttatatcaagaacctcaactaaatgtttgttttatcagaaaacatttcccttttattttaaagagtgctttttaaatgaaggcaccaacaagaactactttcagatggtacagaatttcttatttcttgaagactctgtggttgaccacttcttcattagttacctgcagcaagacaccttcctgccaaaggaaaaaaaaagtatctgaagaagtttatcatgtttgtccaaaagaacctaaacaacttcagtggtggtcttaggatcaaagaagactcattggtgtatagagtaagccctgagtatcacattcctgtaaaggcaataaagccgggcaatcaaactgatcatatctaaggaatgaatttcaacagccaacctacaactttctcttcagggtaagacactgaactagaattaccacatttaacccacctatttagtactggatacataccaggcttcataatgcagacaagacacttcactcaagtatgaactactatctgaaaatagattcaaccatttttgccctaccttctttcagtctcatcctgataagcatgtacagttacaaccataaatacaaccggacgcg

SEQ ID NO: 238449 - DNA, 411 bp, Homo Sapiens
gctaattttgtgtttttagtagagatggggtttcaccgtgttggacaggctggtctggaactcctgacctcctgcctgccttgacctgccaaagtgctgggattacaggcgtcagccacaatgccctgaatgttgcttttcttaaacctgagcagcactgagatgttgaaactgttccatatttcttttccgtgaaacagtgtataagtcttaaaactttttgggatctgagtcctttacagggcattgtggcacacctgtagtcccagctactgaggaggctgaggcgggaggatcccttgaattcaggagtttggggctgcagtgagctatgatggtgcctgtgaacagccactgcattccagcctgggcagtgtgttgaggccccatctcaaaaacataaaaaaaaaa

SEQ ID NO: 238450 - DNA, 509 bp, Homo Sapiens
tttttttttttttaaaatatagaagttctgagttagacctgtttagctcagaatagtgggctaaactaccataaaattctctgtatatcttaaatggtaatgggtcaaaaactccagaaaatcatcagttgataacacacctacagataagtgcatgggtaggaggggatagccaagtgcccatgataatttgacctcagtaaattaaactgggcaatacacatatttgctattctgatactgcattagacttataaaattccatctaataagcattcataaaactggacctctctgtatatatctagcttagacagggatagggaaaagaataactgaagaaactagcttacaatagctaggtttcgtcaggcttattctatccagccagaaaccaccaccagagagaagctgagccattcagctgtctgtctcctctccctctgtttgaatagtcatgcctaggccttgctgcagaccaaagcctgtttgttaggagcaggaagaga

SEQ ID NO: 238451 - DNA, 594 bp, Homo Sapiens
tcttccgcatccgcaccatcatgaagcacgacggcaccaagaccgaaaagctggagcggctcatggtgcgcatcggcgtcttctccgtgctctacacagtgcccgccaccatcgtcatcgcttgctacttctacgagcaggccttccgcgagcactgggagcgctcgtgggtgagccagcactgcaagagcctggccatcccgtgcccggcgcactacacgccgcgcatgtcgcccgacttcacggtctacatgatcaaatacctcatgacgctcatcgtgggcatcacgtcgggcttctggatctggtcgggcaagacgctgcactcgtggaggaagttctacactcgcctcaccaacagccgacacggtgagaccaccgtgtgagggacgcccccaggccggaaccgcgcggcgctttcctccgcccggggtggggcccctacagactccgtattttatttttttaaataaaaaacgatcgaaaccatttcacttttaggttgctttttaaaagagaactctctgcccaacacccccacaaggtttgtaattaaaactgtaaatagtctttgtaaattaatcggacgcgggg

SEQ ID NO: 238452 - DNA, 641 bp, Homo Sapiens
caccattttccacacatacacacacacataaagtttgtttcctgtggcatttaaattaatctggttggtccatagaaaataagtatgtatatttggtttttcctatgtacatatatatatatatttatttataaaacccgccccccacccccaaggtgggaagagctggggaaagtagaagaggtggaaaaaagggcccagaaaaagtggaaggagtggagaggcttggctggaagaagggagagggtccctggcctcaagttaaggggggcacgggagcgccgttgacagtcatcttgcgccccctgctggtggaggatggtgtctgcaggcagttcaagctacccccgttggcagctgtggtggccccactggctgtcgaagggggagtgggggaggtagggtgggtggctggaggcccatgggaactgggagagccatgggatggggtggctgggctgggcagggaggaggaggtggctggcagggtggcagggctgggagccttgtcgctgactgactcacactcggacgccccgctggtgttggtgccctcggagggggtgggcaccgtggctagggtgagccgcttgcaggctggctggacacggtacttgagggggagaggcccgttctgcgcc

SEQ ID NO: 238453 - DNA, 511 bp, Homo Sapiens
tctcttaggacagaaaagtagacacacacacacacacacacatgttgtgttcagctttctgttttatattatttgccattgagattagaatagaacaggctctattcatgcaaactatatgaaatgaaaaacttttaagactcttcattaattggagcttctgggcaacatcgtgtgtgtgtgtgtgtgtgtgtgtgtgtgtgtgtgtatacagacattttttttttaacttgttgattcagatgtcttggtccctgaatagtcctagattacttattttgagaattcattgttaaaaattacagggaattaaaataattgcctttttttttttttagagggtaagagatgggtagaagagtatgcctctgaaaattttattagtttattcttgtggagaataccaagaaaatgtgtatttgcccattgctaaatatgatatatgccattttgtatttatttgtcccaagtgtctttttgtaagaggagaataaacaataaggaattactg

SEQ ID NO: 238454 - DNA, 518 bp, Homo Sapiens
caaaagccgaatctttctttattattacacagcagtaacaggaaaacctaatgctctgtcagacacaactgaaacctgggaggccaggaggagggcagcagacactacagagaaaccccgaagaaacccaaacaggaggcgcacccgcttacccagccccatctctcggcccagtctttgtggcaggaggcctgggctcagaggcgacactgaggaatgtatcacaggcagtgaccacccttggggcagaagtggggagttggggatagtgcagctgccagtcggtggggagcccgagacaggggctctgggagcttctgcctggtcttgaccatgtgggtcagcactcgggaggctgtggcccaactggcacagctgcagggcaccagcctggtggttgcaagtgggtggtgcaggccctgggctcctcccagcctagctctgcccctctgccggcacctacagctccttgagccccaggccctaagtgagcagctctcctggtaccaaggggaacc

SEQ ID NO: 238455 - DNA, 610 bp, Homo Sapiens
ttttttttgagacagggtctcttgctctgtcacccaggctggagtggcagtgttgcaatctcggctcactgcaacctctgcctcccaggttcaagtaactgggactacaggtgcgtgacaccacacctggctaattttgtatttttagtagagatgggatttcaccatgttggccaggctggtttcgaagtcctgacctcaagtaatccgcctgcctcggcctccacaagtgctcggattacaggcatgagtaaccgcacccggacacctgtttaattttcatccataaatgtgttataaatatagatgtggatctctggccgggcgtggtggctcacgcctgtaatctcagcactttgggaggctgagatgggtggatcacctgaggtgaggagttcaagaccagcctggactgaaagtgagaggcttctttttttttgaataatctttcggctttggcttttagctttcgtcttcgttgtttgaacttgggcatgattttagtctaagagccgggggagtcgatggagtccgggctgtggcctctcccacgccataaagaaaaattcaaaattaaatccttgtcagggagaggccacatcgtagacac

SEQ ID NO: 238456 - DNA, 480 bp, Homo Sapiens
gataaaaatcaccatttatctttcagctattaatcttttgaatgaataaactgtgacaaacaaattaacatttttgaacatgaaaggcaacttctgcacaatcctgtatccaagcaaactttaaattatccacttaattattacttaatcttaaaaaaaattagaacccagaacttttcaatgaagcatttgaaagttgaagtggaatttaggaaagccataaaaatataaatactgttatcacagcaccagcaagccataatctttatacctatcagttctatttctattaacagtaaaaacattaagcaagatataagactacctgcccaagaattcagtcttttttcatttttgtttttctcagttctgaggatgttaatcgtcaaattttctttggactgcattcctcactactttttgcacaatggtctcacgttctcacatttgttctcgcgaataaattgataaaaggtgaaa

SEQ ID NO: 238457 - DNA, 649 bp, Homo Sapiens
atcaacttttgataaaggcacagaaagctcatcagtagcaatgatgtgagctgggttgcatctccaggtttgtttaagcaaactgcacaatggcagcaatcctcctggttttaatactcataacatcaaggcaaggacaaagaaaaaaaaatgcttgaactgattttgttgtttttttttgacctacaaaaaaaaaaaaaaatgaaaacagcgtttcactaagctgaagagtgtccttcacatcatttatattgtattgcacacaaacttttttaactccgtcaaaaacaacaagaacagatgaataaggaagcccagtgctttttgagatagaagccttcttcagaatcacctccctctcttaagaagtaatctggtgaaaaataatggttaggcaaaggcaggtgttggaggatatgttttcccaatcttttagaatctcttgcttaagagacacagaggtgactggagactgagttaccagtatactattcattttccaagcagacgtcaaaagatactctttaatagtggaaactgagggttacacagtaaggttcagacttcagcaggaatccttgttgtcaagtaaaagtttaacctagcagaagcaaatgagacccagatgtcctcaccttttttttttttt

SEQ ID NO: 238458 - DNA, 750 bp, Homo Sapiens
ttttttttttgtagtagagacggggtttcgcccatgttagccaggatggtctcgatctcctgaccttgtgatccacccgccttggtctcccaaagtgctgggattacaggcctgagccactgtgcccagccttatcctcaattttctaagcataaggatttaagagttagtgggaaagcatgactacggtttaaaagaacctggtcagctgaagcagtcccacttggccattccagtacacttcctactctcgcttcatggagaagaccgtctactgacaagagaatccatcccctttgcacacagtggtcacctgacagctcagaggtcaacttcttggttttgaggaaaaattcaaaaggctgcacgtttaaaggagttgttccatttcagtgccccattagcctgtctttcctcagaaatttaccaatctcttgatgtgataagcaccaaactatgaagcttttcccttcctctccccgctgctccgttctgtgaaccgactttttgtctacaatcacactgatttcttcactgtttgctctgaaacttcactttttctgagtgatgtgttctgtcaaataggctaaaataaaatacagtatctgcttacaggtaatatacggaacaataacaagggactgaaggtacaaaacacacacggacattatggtcatataaaatatatagaagtacctaacgttaacaatttttgtaagaagttgcacattttgctatttttttaaagca

SEQ ID NO: 238459 - DNA, 677 bp, Homo Sapiens
ttttttttttgtagaaaggaggtctcactatgaggcccaggctggtctcaaactcctggactcaagtgatcctcccaaatcgctggaactgcaggtgtgagccactatgcctggcctctggacgcaattttgaaaagcaacctgcagcctctgagaatagacaagagctgtcagaatacagcagtcaacactgatctggggaggttcccagttcatcttcctccattctctcatgggtttaacctgagggtgtagatggcaaaaactgagagaaatcacattttcctagtcagagaaacggaaagagagcccctgggggagccagagtgtgtgtgtggggtcctggggggctctgggagagctggagaggggcaccctagcttcgtgaatggggtcctggaggggtctgggagagctggagagggggcaccctagctccctgtgtggggtcctgggggggtctgggagagctggagaggggcaccctagctccctgtgtggggtcctgggggggtctgggagagctggagagggggcaccctagctccctgtgtggggtcctgggggggtctgggagagctggagaggggcaccctagcttcctgtgtggggtcctgggggggtctgggagagctggagaggggcaccctagcttcgtgaatggggtcctggggggg

SEQ ID NO: 238460 - DNA, 475 bp, Homo Sapiens
aactgctgttgtaatgctgtttgggtacaagccctccaagatagaagtggattctgtgatgtcttcaataaatccaaatacttctggtatattactcgaggggtttttaaatattgtcaggaaaaagaaggaagctcaacgatatcggaacgaagtaagacacatcttcacagcctttgacacctactatcgtggatttttaactttggaagatttcaaaaaagcatttaggcaggtggctcccaaattaccggaaaggactgttcttgaggtattcagggaagtagatcgagattcagatggtcacgtcagctttagagactttgaatatgccctgaactatggacagaaggaagcctaactattgtgaactacttttggtaactctggggagatcaatagattgtaatgtcagcagactctactctactaatgatgtcatgctactgacttgtgattaaacatttaaaaattt

SEQ ID NO: 238461 - DNA, 556 bp, Homo Sapiens
tctctcttttatttaaaaacagtgcttcattaccatgtgcaaaggctgaggcagtgctcctccttcgcttagagtttataaaagccagcaacatgatcaataatttatacacatggagagtaatacaaaaaaataaggaataaaagctaaagatctaactactccgaccttcacaattccagctacttgataataataggagtaacccaatgaatactgtatggtctgaaagctactatacaatatgattcttaacgagaagggaagggaattagagactgtcacaaagccctgggatgcttctctggagttagcagggaaacaggaccctgggcaagcagctcgggtgtcctaggaagtgattctgggggaggacgggaggggagagagaaggctaggtggtcgattacacaagcatcccatgtaatgcccccatgccccaaaggtacctgttttgccatggcaatgggaggggctggaggaacagcatgttgcatgtagggaggtccggtccctgccatggggagtggggagaagaggagaggttctgtggcat

SEQ ID NO: 238462 - DNA, 689 bp, Homo Sapiens
aaagtaaaagcctcacccgtttattttgtgttcaaagtataaccaaatgattttattgcatttactgctcctgggcatgcagatgcatctacacagaaacagcagttgtggttataaaatcttttaacgagtttggggcagaggctttttaattatttttgagacagagtctcattctgtcacctagcttgtgcagtggcatgatctcggcttactgcaacttctgcctcccagactcaagcaatcctcccacctcagcctccagagtagctgggaccgcaaacgtcaacaccacacccagctaattttttgcatttttggtacagacggggttttgccatgtggcccaggctggtgtcactgagctaggcaatccacccaccttggtttcccaaagtgctaggattacaggtgtgagccactgcacccagcccagagttttcctgatgtgaaaattacgtgagtgacaaggagcaccaggagccttgcctgacttactgtctgttggtaggatgtgacatatgaataatacaaaatacccgtctggtttgacttgcagattaaatcactgctagactacagccttgatgccctctcttgctgaccctagccaacataaccagtcttccaggaacaataccatgttttaaattgcttgaggtttcactacctgctgtcactctccggac

SEQ ID NO: 238463 - DNA, 654 bp, Homo Sapiens
tcctgggtagctgggattacaggcgcatgccaccacgcccagctaatttttgtatttttagtagagacggggtttcaccatgttggccaggctggtcttgaactgacctcaggtgatccacctgcctcggcctcccaaagtgctaggattacaggcgtgagccaccgcgcccagcctgcatttttttcttcatagaagaaaacaaaagtaaaacttcccaaattatgtttaacttataacacattttgtaaagaccccttaggttaaccattttggaagtctacattgttctgaagaaaaagatatgctttcaaaacactatctagcaattcctaatcatttttctattataaaaattaaaattcaaaagttattgccacagtgcttgtggcagtaaacagaatgtaaaatgtatcaaaagactaaattagtgtcatgaaacataaacatactaaataatcaaataaatactggacccttagcacagaaaattattaaaaggttgatttgagtgttaaaatttgtaacattaaaccccttcgtatttcaaacattactttttctaaaccaaaccagaagttaatcaacttttcctctcctttaggaacaaaaaggatatttaagatattttccaaaacagtaaaaacaacttag

SEQ ID NO: 238464 - DNA, 631 bp, Homo Sapiens
tttgggtcaatgtattatttatatactcatctgaactttcaaaagaagttaaatgggagatattctcaacaggcaaaaataagatattccaatctattgttcaagtttatggctccgatataaataatgggctataaacccgtatctggaaaacagttgcgcagtgcgtgcttaatggccagccaatgaaaaccaacgtctcattctactccgtctttcagcacgtcaaggacatcccactccgcctttttttttttttctttttaaagaggccaaccgctggggacacctggttttggcacctttatgaggcctcccagcagcacaggagctctaaggggcacgctctgcagttgagctatttgcagagctccatgatcgctcaaagccgagcacgcgcacgggtttgctactggcaccagcacaaggctttagacaggcacttcccacggctgagttctaggcatcccctttttgaaacgtgttctctccaccctgcaagggtggggtgagaaatctcactttcgaagggcttgcaaggaggaagagagtcggcgccttgcggattccccggccgcgcttcaaggttcacacgccgcgtggcagctcggatgcagcccggttccgaggc

SEQ ID NO: 238465 - DNA, 510 bp, Homo Sapiens
aaagaaggaagaggtttatttggccaggagcattggcagacttgcatcttaatagctgagatccctgaaaaagaaattcttggcctttttaaaggcttacaactctaaggggtccacgtgaaagggtcatgatatctcaagcaagcggggaacgtgactgggggctacacgcatcagctaacagagcagaaagttttgcaatgctttttcatacaatgtctggaatttacagataacacaagtagtttaggtcaggggttgatattattattattgttacttttttttaactaccagggccgggtggtgtcgccaaggtcttctggctatttatcttacttctgttttgttttgttttctaactttttgctttctctctttcctcctgtcttgtaaactaggcaaggtggggggaggagggcagcaggagtagtagtggtctccttcttactgtgggactggcccctttggtttagggtatcaccaaaggcaggagtagtagtggtctcc

SEQ ID NO: 238466 - DNA, 460 bp, Homo Sapiens
agacagttttaggtctggcaggatctgagaacaggagtggggatcttggaatgggatctgcatccctgagcttcatccacaaagggtgggaatgtggcttgggctgtggggtggaggtagatgaacagctggacttgcaggtctatcttctgttgtttctcaataaagtagacaagtccatctgatgggtgtttagtagggtatgacttgtgagtccacaaggccagcagtatatatgctgaatggactgcttagcagtaacacactggaaaaatccaaaaagaatggatttcaagttggcaaaaaatgcattagaagtcagcagtgtgatgtggtcaggagaacaaccagagtgactgtgggatgaggtcttggatagctttgtttctatatacagtcagccctctgtatccaaggtttctgcatccatggattcaaccaaccaaggctcgaaaatatt

SEQ ID NO: 238467 - DNA, 384 bp, Homo Sapiens
ggcggggacagcgtccggaggagggagccgccagacctagcccgggtggggcgaacgaagagcgggcgtggtgggcgcctgctagctccggctcgcggtgttaggccttggggacatcgctcggggacaggagagccccgggcccccgccgccccgagccgtggccgggaaggggaacacagtccatgcgtgcggcgcccgacagcctctccccgcacgcccgagccccagtgcaggcggcggcccggcccctttgtgcctggagtgtcacgcgcgggcgctcctgccgccgcgcctgggagaggcctccggcaccccgggcccctttccaagcacaacagcagccctgccgcggccccgcgctgacccactttccctcctgcc

SEQ ID NO: 238468 - DNA, 330 bp, Homo Sapiens
tgcccaataaatgagctttgcaggcaccaaagcttggttatgacatgatcaagctcctcactttatccctccttgcctgagtgccctggttttttacattttcaccaaaggacaaggagggcagggaaagggagtgattttcagatcaggtaggctttaaaacttcaaggagtgacactggagccaggagtgccaatccactaatttacttcccatgtggtcttgagtaaatcatttctctagtctgagcttaatttccttatctgtcaggtaagacggtggacctggaggtttaacattccaagattttacaacaaaggactacaaaac

SEQ ID NO: 238469 - DNA, 427 bp, Homo Sapiens
cgacctggactctgaactcaggtttattctaaacccagtgagaggtgagggggagtgatgaaaggggatcagctgtatttgtgtgtgtgtgtgtgtgagcacctgacaaatctatgaaaccgagtgaaaggagaaatgttagattctttattattttattatatttatatggaaagctcgactctccctttggtaagtccgaagcatgttgtctgttcgaccgtgactgtcttcctcagtctgtgcctgtgatcccagtcaccctgtagttactgacagaaattgactggactgtcattgtgtgaagtctaggaggaaatgtccattttaattgtatgatttggtcataagtaaggactatatttatgtcaccattattagatatatgtacttttgtaatgactgtgaaatacacttttccctcact

SEQ ID NO: 238470 - DNA, 514 bp, Homo Sapiens
gtctttcaaaatcagttggaaattttgcagaagagtaaagaagaagcttacgtgatggcagatgctttcagaattgcatttgagcaacaattaatgagaaaaaatgaccaggccctacaattgacacaaatggataaaatgcataaaaaagcaacaaaatggatgaattggaagcaccttaaagaggatggatttccatcaccaaggagtaagaagaccttcgggcagagactgttgggtatgctcccttcagaaaacagttctaagaggatggaagaccaggacagtcctcaagaggtcccttaagatgctcatagatttgcttaatgataaagaagaagctttggctcatcaaagaaaagttagctacatgcttgctcgggcattggaagacaaagaccctgcttcaaacgagaataaagaaaaaaatcctataaaagagaatttccctttcaacaaccccatggcctccatgactttttcaaaaaaaaaaaaaaaaaaaaaaaaaaaccaa

SEQ ID NO: 238471 - DNA, 618 bp, Homo Sapiens
aattctcatattctatgtaagaatagagttccaatgtcaaatgggatattagaaatgtaagtgcctcagtgtttactgttcataaatttgagaacagggtttgataagggataagtggaattctggcagatttacttgtaggttattgtgagtttatcataattttgacaacaaaaaaaaactccacagtatgttgaaatgcatttcttcattttattcaataatttttcaagatttttagaaatatttttaaaaatctaaattaagaagtttatttttggcatatatatatactagttttcaaaacttgtactccttttctgtaatcccagctatttgggaggctaaggcgggaggattggttgagcccaggagttcgaggctatagtgagccatgagagctatgatcactcaactgcattccattgtgggcaacagaatgagaccctatctctacaaaaaaccttcaactccaaagtagattaaatatgacaaatttatgttgcaaattaaccagtaaatctaaaggaactccacaaaggaaatttcaccattgatttatttaggccagattgggttgattgatatccttgtttctggtgattggtaaatgaaaaa

SEQ ID NO: 238472 - DNA, 593 bp, Homo Sapiens
  misc_feature (92)..(92): n is a, c, g, or t
ttctgtacccatagttaatgtacacagcttgctagcttactacatttatgtcatgcttattccttgaccctccccacccaaatggtgccccnccttccatcactctcctcttacccttctttatttctcttcacagcatttgtcagtactttacattattccatactagaaggtgagtgtcagttctattagaacaggaacttggtcttattccctcctatatttcggtgcccagaatagcacttggcacacagtcttttgagtgagtggatgaccttgtgcacaatcagttattatcattgaacttcggtaaagcattaattgtggcatctttgtcagatgtttagataagatggttggcgtacgcatagtctgcatgttgtatttttagtctttgaagatatgaagtcaggtaagcaacatcctaacatagtctatttcttgacatctcttacaaacgtagagtatagcctatcctcaggtgtgtgctgaagtttatattagggcttttgggtaccttagaatgtgggtattgcaatctttattcaggatgttatcagtcactggtacagttagtcttgttattaaaaaaa

SEQ ID NO: 238473 - DNA, 518 bp, Homo Sapiens
cataggctccgctgctgacctctgcaagctggccatgatccatgtcttcactgcagtggctgcttcccacaccttgacggccagcccttgtggaattgataaaggaagttggcatgtgaggagctgaggtctctctctgttgctgactgagtccttctgaaagctggacacagacacttttactcaggaacgcagttactcgctggtcatccttctgtcatcagccattggctgtcacgaggaaatgcttctcatagcaaaatgcaaagcagactcgtgtggaatattgggcacatggtctgtgttttgtgaacgtgatttgttcttccaggagtaatgtgaaaggctgtggatggcgtctggaagggacgggtgcaggctcagtgtggccaggcatctctcgctgaagcagcaggcatgaaactcgatcactgggaggcacacggtgcccctagagtgagctgagatcgcaccacttcactccagcctgggcgagagcgagagtctgtctaacaaaa

SEQ ID NO: 238474 - DNA, 500 bp, Homo Sapiens
aatgtagtcgtacgtatgtctagaggtggacgctggtgatattgtcattgaatactttgcagaatacactaatgtcaaaggcttgcaggattaatgtgtaggaaccaacataagacatggaatatatataagaattatctagttacatgactaaaaaggaattgcaatactatcttaaattgaaggcttttatttcaatgtccttacatttaaaatgggatcttacaagggaagtaccaaaaaagtaaagtttattttgatgactctcaagatatatatgtttgttttgaatgttggcagatgccaatagcccttaacatttgaaaaatggtacttgaacatcaattatgtctcagagttcccttaaactttttgggcttaaatatttttattcattttggtcatacctttgacaatggatatgttaaactttaacaattatagtgacaaaacagcttgcttagaacctggaaattaaaacccaatttctagagtaaaaa

SEQ ID NO: 238475 - DNA, 454 bp, Homo Sapiens
  misc_feature (33)..(33): n is a, c, g, or t
  misc_feature (36)..(36): n is a, c, g, or t
atttatagaatatattggttaatataagaatanatnttagccatgcacatctattacaaacttcattttatactttgctatttttaaatttcttatgctcttataaaacatgtgttctggactcacgttggcttccatttcttccctctggcttctattagtttaggctatgagcatagatggaagaggtggctgctgtattggatcaaggatatgagcagagatggatgaggcagcggctgtaatggatcaaggctatgaacatcttgtgaagtaggatgttaagtctgcaaatatcagagtgaatccaaacttatcaattcaacactggattgtaaaacagctcaaaaaaagactaaaaacacagctctacactttaggaggttggggcaggcagattgctcgagctcaggagtgggagacaagtttaggaaacatggaaaaaccctgtctc

SEQ ID NO: 238476 - DNA, 525 bp, Homo Sapiens
  misc_feature (16)..(16): n is a, c, g, or t
ttatctcactgctgcncactctctctccagctccacatgctgtacctggatcattctgaagcaaattccgagcattacatcattttgtccataaatatttctaacatccttaaatatacaatcggaattcaagcatctcccattgtcccacaaatgtttggctgtttttgtagttggattgtttgtattaggattcaagcaaggcccatatattgcatttatttgaaatgtctgtaagtctctttccatctacagagtttagcacatttgaacgttgctggttgaaatcccgaggtgtcatttgacatggttctctgaacttatctttcctataaaatggtagttagatctggaggtctgattttgtggcaaaaatacttcctaggtggtgctgggtacttcttgttgcatcctgtcaggaggcagataatgctggtgcctctctattggtaatgttaagactgctgggtgggtttggagttcttggctttaatcattcattacaaagttcagcattttaaacaa

SEQ ID NO: 238477 - DNA, 332 bp, Homo Sapiens
tgattttttaaaagaatatctaaaatcattatgtttaaatagcctcaaaagaagcattttattatgtattgtaaatattggcattttaaaatgttattcggtcttttaaatgtatccagtgaaatgttggtacaatagagttttgatagctaccattttccatttttaaaaatactttaacacgctttgtaacagttggaaatattgtttgattccttttgctccctgaactccattcttcttcttctgaagaattttatcctaaaatgaatttattttttgcttaacagtcttattggttaccttattaaatattactcagtataaaaaaa

SEQ ID NO: 238478 - DNA, 557 bp, Homo Sapiens
atagtcagtatctgacgtagaaacgagctggcatttctgaactgctttcatggttgagaccaatgtgtaagttaggagagttttgttgacctgttccaagttgctagggtagctttatttctgtatggtcacattatggtgacctggtaattattttggcagtgatgatggtagaacttgtgcatcaggatttcctgctacaaggccaaaagcctgattgtggaacttttttttctgctaccaccattttactacatattagtgttttcagaatgtttgaccctggggtgggtcatgaaatccatttaatgggtcatgttacaaaaaaacaaaaacccccaatggaaaaatccatatttattttataaatagtattcctatttataaaataggagtaaacttctatttcaattatgtataggtaggtgtatactgtgttgcaatgtaaaatttttatgtggttcacataaatgtttgaatgatactgctatatgtgatgttaacacataccaccttagtaactgtaaaaatgtggtgggtagatagctcccttaaaa

SEQ ID NO: 238479 - DNA, 520 bp, Homo Sapiens
ttatttttatgcatattttcatttaatatagagtatacaatcgattgaagcctttcacaagtagtgcgctgagcttttcttattgaagagagtgaattagtttctgagaagtcaatctattgtgaaaagtttcagatgagattattttcttttagtctttttaaatatcactatatgtatttaaatagaagcaataaactagagagagtgtttcttgaaaagacaatgttttatttgccaccaggcagaacagaatgagcattggtagagaaggctccctcttggtatgttactgataaacttgtacttcctcatacttgtttgtggttctactgacttatttccaaacttaagagtaatgtacttcgaaaacaacttggttattctttaaatttcaggtaaaaccccttttcctaacactcatcttatttccactgtcttatttcctctcagatgttcatatttcacatgttcaaaatgaagcgtactatttcccctccaataaacgaagtctcctgcc

SEQ ID NO: 238480 - DNA, 385 bp, Homo Sapiens
tatattttccttactaagagttagttccctagcccatcagaaagattcccaggctggctacttcgggatgacccttgcattttttattgaaatcatttctgaatcttttttccccactagcttttaagacataggaactatatcttgttcagctttgcacttccaattataaaaaaatgcctggcgtgtgttaggcactcagaaaatgtttgaactgaaccaatggtgtgtgtgtctctgcacactctaagttagtgtaaatcagaacagcttgttgttgctgcttgttttgatccaagaccaaagagtgattgataaatgtgctaagtattttctgtgttcttaagtatgtttggtgtaacataatttggcatacgcacatatt

SEQ ID NO: 238481 - DNA, 683 bp, Homo Sapiens
  misc_feature (60)..(60): n is a, c, g, or t
  misc_feature (200)..(200): n is a, c, g, or t
tactaaacaccagagaaatcacactggagagaaaccctacaaatgtgaagaatgtggcanagcttttaactggtcctcaatccttactgaacataagagaattcatactggagagaacccctacaactgtgaagaatgtgcaaagcctttaatcggtgctcacaccttactagacataagaaaattcatactgccgtcanacgctataaatgtgaagaatgtggcaaagcttttaaacggtgctcacatcttaatgaacataagagagttcaaagaggagagaaatcctgcaagtataaaaaatgtggggaagcttttaatcactgctcaaaccttactacgtaagaatttttactaaagagaaatcctacaaatgtaaagaatgtggcaaattccataaatcttgctcaaggcattgaaatcacaagataattcatactggagagaaacactacaaatgtgaagaatgtggggaaagtcttcaaccattgctgacagcttattgcacagaagaaaattcatgctgagaaaaattctgattttaaagaatgtggcaaagcatttaataactactatgaacttactcatcagaggttttgtgctagataaaagcaatgtaagtgtaatgatacacattacatttatctgtggaaagatgtcaccaaataaaagccttagagtac

SEQ ID NO: 238482 - DNA, 436 bp, Homo Sapiens
caaaaaatcaggtgtcattcaaagttcactaggcttagggagctgggctcagaggccagaggcctgatcttgatcttgtcatcacttagcaaatctcctggccattcaggccttcacacttcctgtctgtaaatgggtttatcaccactcattcaagtcctaattattaccagcgctgagaaaccaatactttctttttccatctcgcttgtgtaatttcttcggagaagcatttggatggtctgaaccatttttaccctgagaaatgggacttaggaaattatgcagccacattttatatccattctggtcatttcagtaattggttctgagacactatttccccgagcaccatcccaagtataaactactatttccatctgtgttactggaggaaactggggaaagacatttgtgggttttttcccccccaggc

SEQ ID NO: 238483 - DNA, 535 bp, Homo Sapiens
atcgatactaacagtggacgtacttctctttgaataagtttattctatttccttctcccattttctttatttgttgaaaagaatggtgctgattgagaagccaaatattgttaaccattttccccgtctggcacggttcttttgcacagcactggattaggccaggggactggcctaaccctgcaaatatcaggaaaggactcttctagggaaagtcgtactaatttgaattgatcactagaaatacatggtctccacctaaaagatgctttgtcacttaaaaggctgagtagtcatcataatgtaaagaaacctctattgtcatgcaaccatttgcacccagacattgtgcctggttggcacttaacattttatcacttgattctcacaccacccttgcaatgtgatgaaaccaaggctcctaggtgctaagtgacattcccctagtcacgcagcctagtgctagtcacgcagcctagtggtagagcgaggattcaaacccagtttttgttttcctttgagctggagctgcaaa

SEQ ID NO: 238484 - DNA, 616 bp, Homo Sapiens
cctgctgtggaatccaccaccaacaaccaacatctccctcagaatactcactcggatggggcaatttcaccattcaccccggaatttctggtcaagcagcgctggggagctatggagtattcctgttttgagatccagagtccctcctcttgtgcagattcacagagccagatcatggagtacattcataagatagaggctgaccttgaacacttaaagaaggtggaggaaagttacaccattctttgccaaaggctggctggatcagccctcacagacaagcactcagataaaagttagagccgcatgtcctggaggtgactgcaaggttggttggatttggagtatcggccgtgtctcaccacatcctggctccagtgtggatgcagagagagtgtgacagaggatctgcctgtgaaccacctgggattagtcaagtcccaaggtgcccagagtgggactagttcttcacagtgtggcagctgcactaatctgtttgtgagggaatatccattccctcactctactctcctcactatcggaaattcattttgattcagaataaaaaccaaatgtatagagctttgggtgtaggatatgaaattgtacttagatt

SEQ ID NO: 238485 - DNA, 531 bp, Homo Sapiens
  misc_feature (2)..(2): n is a, c, g, or t
anatttatagtattgactacatagattagaaaagaagaaagatccaaaatctacaagcttcaacattaggaaacttaacaaaaaattaataatcaacattagaacagaaattaatgaaattgaaaacaggaaatcagagaaaattttaaacatcaaaagctggttctttgaaaaaaaaaaatcaataaaatcaataaaactttagccaggcttaacagaagggaaaagaaaagagccccaaattccaaacatcagaaataaaggaggggcatcactactggtaacatggctaataaaaagattaaaaggaatatcatgaacagccctacacccataaacttggtaacttagataacattggccagtttcttgaaaaacgctatctaccaaaactcaaacaaggagaaatataatctgggtgggcctacatcaattaaaagaaatggaatccgtaattaatactcttccaaaacggaaagcacaagactcagatgttttcacaaagtgaataataccaaacatttaaggaaa

SEQ ID NO: 238486 - DNA, 569 bp, Homo Sapiens
ctataaattgacttggttccatttacctcccagaatcagcatacagtgacaaagtagagagaaaaggtctgggcaccacaaacttgtacttgtgctagaaatgtaggtgccttttcatttgcccagcagggctagtttaacagccagggtatcttctgggactcttccccaaatcttgctctaccgctgactagctatgtgatcttgggcaagtttctcaacctttctgtgcctttcttcctttacttataaataaggataacagaatttgcttcatagagttagtctgaggattcagtaagtagatacgtgtaatcttagaacagtgtctggcacacagtaaaactctatctttgctattgttgtttttgttataactgtatagatgttagctattattactatccacaagaatgggacatatcaattatatatattactggcctagtaattatatatacttagaatccctgatcaataaaataaattgtaatagaaatttttattcctcaaacacatttttgttcctcaaacacatttttaaataaacatgtaaagggaaagccaaa

SEQ ID NO: 238487 - DNA, 276 bp, Homo Sapiens
ggtggcagaggtgaaagaaaataatgtatataagcagacttgcacaattcaagcctgtattcaagagtcaactgtactttgctatattcatccattaattctaatagtacatcagtaaattaacttggattttctgtgtacacaatcttgtcatttgtgaaaaaggagagttttatctccttctaatcctgtatcttatatggatatatgtatgtgtttgcattgactgggacctctttcacaattgtgaataaaagaagtaatagcagaaaaaaa

SEQ ID NO: 238488 - DNA, 624 bp, Homo Sapiens
  misc_feature (11)..(11): n is a, c, g, or t
  misc_feature (13)..(13): n is a, c, g, or t
  misc_feature (21)..(21): n is a, c, g, or t
  misc_feature (87)..(87): n is a, c, g, or t
ccagaaccacnancatggaangagccaggcttacagcgggtcccagtagccaagatgctgtgtgggcctcaggctccagctttgtcntgctcaagctgaagagatcttgaccctgaaccagcgtgtggccctgatctgcctgccgcctgaatggtatgtggtgcctccagggaccaagtgtgagattgcaggctggggtgagaccaaaggtacgggtaatgacacagtcctaaatgtggccttgctgaacgtcatctccaaccaggagtgtaacatcaagcaccgaggacatgtgcgggagagcgagatgtgcactgagggactgttggcccctgtgggggcctgtgagggtgactacgggggcccacttgcctgctttacccacaactgctgggtcctgaaaggaattagaatccccaaccgagtatgcgcaaggtcgcgctggccagccgtcttcacgcgtgtctctgtgtttgtggactggattcacaaggtcatgagactgggttaggcccagccttgacgccatatgctttggggaggacaaaacttgtaagtacagtcaaggacaagacttgtactcaaggttgagatttaataaaattaatatttttactacttcaa

SEQ ID NO: 238489 - DNA, 512 bp, Homo Sapiens
gtgaggcattcactctttggggaagtgaggaagctcatcacagacgagtttgtgaagcagaagtacctggagtacaagagggtccctaacagcagaccacctgaatatgagttcttctggggcttgcgctcctaccacgagactagcaagatgaaagtcctcaagtttgcatgcagggtgcagaagaaagaccccaaggactgggctgtgcagtaccgcgaggcagtggagatggaagtccaagctgcagctgtggctgtggctgaggctgaagccagggctgagatttattccccatgtttacagataccgctaataaattgcagtagtccttcccatggagccaaagtacatccttggaatctttgtccacacagcagtcaaggcagttatggccaatcagctgagggtgtcatgtgatggaaaaatctgtttgctgttcctgctttattgtttgctttctgtgtgctgtcatattttggtatcagagttacattaaatttgcaaaatga

SEQ ID NO: 238490 - DNA, 585 bp, Homo Sapiens
  misc_feature (25)..(25): n is a, c, g, or t
acagtaaattttaatatgcaagtanaacttattttactaaacgatgattactccttctatattcatattcctaaacacatacagtttcttaatgtaattaagtttttaactaaaaaaagggaaatgcattattgaggcgataggattactgggtggctataaacacatctgctgcacagctgacatttatcttctacaatgagcagtgacaattttattttttaataatcagtatggactaatcctgatgattttttttaacattttcaaatagggctgcatatggcttaaaattaatatatacatgtgtacctatataatattcttatttattaatggacttcctacatagctcatattgacgttagatttaaatgaaattccagaagggttttctataggtaagtcatacattggatttccatattacctatgattattgaagtatttatttctgtttttaagacttcagagcaattttgctggtcatttgttttctgtgtttttattttgaaattgttctttgaggcattgtcctattacatttttaaggtatgttaataaaataatatttttaatgaaaaa

SEQ ID NO: 238491 - DNA, 509 bp, Homo Sapiens
gtgccctctctttttaagcactgggctagatgttggagaaggatagggcaatcattcccaaggaaagatagaaagtgatgtcccaagagatgttaatgtcaggttgctaagaagcaggtgaaattatctggatataagctccatgaaggcaaacattttgttggaagctccattcccaaagcttaacacttaattggcagccatttgtatgaataagtgaggttaaacaggacagttccatgcagggaacgatggctgctaacacctatccaggacctagtttccatgaccatgcatatctttttaaaaatttcctttgcccacttcttaaatgttaacatacattttctccaagttaagtttcagcccttttctcattgtccatgtgatctttatgtagtcttatccactgccacggcctcaggttccatctctagttctcaaatttatattcttagcctagatcaggagttagcaaactttttcttaaaagagccagctagtagaaa

SEQ ID NO: 238492 - DNA, 463 bp, Homo Sapiens
aggagatgctgtgccacatcgctaaccgcgagttcctcgccagcttagagggaaggctgcccgaatacaacacccgcatcgccctgccccttgccacttccaaggacaagttttttgacgaagagagtgaggaggaggacaacgaggtagtgacccgcgcatcactcaagatccgttcccagaaattaatcgaaagtcacaagaagcaccgtcgctctcggaggtcctagactcgtcctgacacccaccaggcggcccccttcggagcccccgatccctccgggtctagcgcaggccccacggggccccttcaggggctgaacgcggcccggaccgggaacggaggcggccagcggcgcccggaggggaggaaggggccgggccagacgttcccacagtaaatctccccagctgggtccgccccggcctcagagttgcgcaataaatgttaccgaccatgaaa

SEQ ID NO: 238493 - DNA, 510 bp, Homo Sapiens
  misc_feature (22)..(22): n is a, c, g, or t
cttctccactctttgatcaganacagggtatatgaacaaattttctagtcgagttttcaatgtgaatttgttcttacattatggctcccgaggggaagcgattactttttttaattttaaatttttttttttaattgcacttcttgtaaagagtgagaaaaaaaatcaaaggcgctttgaaacaggggctctctgtgcaaggatgactaagtgtacgtctttccgtgtgtgtatgctggtgaacagtcagatttatttatatttttttgcaagcattgaataatctaagttttaaatattatttatccccatccgttcgtatttatattaaagaattctgtaccctgatggttcagaagggttcttgggccttttgttcaattgtgtattggcgtacttagaattttttttatttgaaagagaaatataattcctttaaacggtaacgatgcaataaaaccagagaagatccagcttttgaaaacagtaaattaggattgtaacatccgg

SEQ ID NO: 238494 - DNA, 551 bp, Homo Sapiens
catttcatcttcattggatagtgttacatagtaatatatttatgttttcttttaatcatttcataacttggaaaatactaacatagtcaaaactctagggtaggtgatacatgagtttctgtagtaatctggttggagacatgttgtaattctgtatatatatgtacatttatcccatgcatgttatgcctaaactaagacggatacccctgaattaagaggtgctgttatacattgaccaggcttaagaatatctctttaaagtgtgtcgacatttaattgacctttggaagttcattctgttaatcatactcaaagtgctaaagctatggttgactgctctggtgtttttatattcattcgtgctttagcatataaattcttcagcataattgctacttatttagcaagagtttcctttatttgaaaatgtgagttgtgcttgtatttttgtgtctttctttctttctttctttttttaaactttgcttcaggctgggtagtggtagaggtttgaattaaaatgttttcctgtcagtaaaaaaaaaaaa

SEQ ID NO: 238495 - DNA, 369 bp, Homo Sapiens
tcagcctccaaaggagccagcctctccccagttcctgaaatcctgagtgttgcctgccagtcgccatgagaacttcctaccttctgctgtttactctctgcttacttttgtctgagatggcctcaggtggtaactttctcacaggccttggccacagatctgatcattacaattgcgtcagcagtggagggcaatgtctctattctgcctgcccgatctttaccaaaattcaaggcacctgttacagagggaaggccaagtgctgcaagtgagctgggagtgaccagaagaaatgacgcagaagtgaaatgaactttttataagcattcttttaataaaggaaaattgcttttgaagtataaaaaaaaa

SEQ ID NO: 238496 - DNA, 481 bp, Homo Sapiens
cgatgcctgggtcttgctcttgcccatttcctagccagggtttgtggtccaggcaacctgtcacatcagtgtgttccaaacatggcacccagatctcaaaagcttcttcaacgctcccatggtttgggatacacctcaagttttaacttacgtacttcaagtttcttttattcaattagatacaaaccgtctgacttttggcttctgaaacaggaaagtcaattttgttgttttcactgtcccatgcttttttatctcagaatcttgatgaactctgaaatgacccctgatgggggcatgcctctatttatgctgaataagagccattttacattttactacaggttgagtgcccctaatccaaaaatttgaaatgctccaaaatctgaaactttttgagcacttacatggtattgaaaggaaatgctcattggaacatttcctcttaggcatgctcagccgttaagcttatgcaaatatt

SEQ ID NO: 238497 - DNA, 565 bp, Homo Sapiens
gggcccgataaggcccatttttttatttttaaatttatttttaatttattttatattttaagcatggtactatacaatttttaatgcattcatacaacagtgcattggaaaagtactgagcctctacaaaatagctttacatttttaaacaaatgaatgtgattttttttcacttacacaagcataggctttttaatatttccacaagataaatatctcaattaaactataagctcactctacagtgtgccacagtgatgggcttaggagacagttatacacttagaagatcctaaccttagtgttatttacactgacatgtccagtatcaccaagtctgaaaggtgaacaaacaatactcagaatgtggctgaatttgtgttaactaataactgggaatgatatagctttaatcacttatgaaacacatactgtaacttagtctaaactggtaatttcctttgctcctctcttatggtgtgggaaaatttaaagatcaacatgaaaaagatctgccttagcaatggctccttttaagataacaaaggaaaaattgaccctcgtg

SEQ ID NO: 238498 - DNA, 503 bp, Homo Sapiens
agaataataagaaaaagttaatataaaagacaagggtataaaataaaggtttgaaaatgctagtcaacttcaaaatttaaagagtaaaaatccagagataaagattgggggtaagttacagcataaaaaaataggaagaaacttcatggtgggggggaaatctaaaattattcttacataaaataagtagacacctgaattagaatgaaaactgtattttctttaaaatgtaaaagcctgactctcagtttcaccagtctgagcacaagtttgactgcaacccaaaatatactatcccttatgtgaaggtatgtgacaacgttgacctcaccaaatgagttttaacatcagctcttttttcatatgaaagcacataccctgctccccattcaagtatgtcttccattgtcaggcaggctgaccaccttcagcaggagtcctccaagagtgcccaactccccttcccacagtacacaacgctgtagttgttgtcctgaattcca

SEQ ID NO: 238499 - DNA, 535 bp, Homo Sapiens
gtgcagtggagaaatctccctgggccaggggaaagttcagacagtgcctctagattgtgttttgcctcctccaatgtagagttgacatctggaccccagagcccagcagggctttctgtcagacatgctagggtggtagaaatgggccctccaggtccccctgcagtgcactgggcagagacctccggaaagccggcagcgggagcgcttcctgggcagcttcccccagcacagtgttcccaaaccagtccatccggaaaacagtctgtacagcaaatgctgtgtgagatcttaggcttttcactttttttgttttgttttgtttttgaaagaaagaaaaaaatacaattaacaagcctcttttgtaaatgggtttcctttctatgtataaaatcgtggtggtcccttgtttttacatgttcatgctgtgtaattttgagatgttactgagatatgttctgaacataatgtgcatttttttctgtacagatgaaatgggagaatttaataaagagtttgcaggtttttacttgtt

SEQ ID NO: 238500 - DNA, 533 bp, Homo Sapiens
cgctccttgaccttttccccggactcccagctccttgtcactgcttcagatgatggctacatcaagatctatgatgtacaacatgccaatttggctggcacgctgagcggccatgcctcctgggtgctgaacgttgcattctgtcctgatgacactcactttgtttccagttcgtctgacaaaagtgtaaaagtttgggatgttggaacgaggacttgtgttcacaccttctttgatcaccaggatcaggtctggggagtaaaatacaatggaaatggttcaaaaattgtgtctgttggagatgaccaggaaattcacatctatgattgtccaatttaaacatcaaagtctccaggcttatgctgcaaagagaatgtacggattgatcatgacattccttaccttcttaggcttgtttaaaagaaatatagcatttattgtagcaaagacttaaattttgtagatacaatatgaatcttttcatgttttattggaaatgctgttcatactttaacataaagctttcttaatgc

SEQ ID NO: 238501 - DNA, 513 bp, Homo Sapiens
tttattaccatcaacctgtccccagctttccagcacaacagccagcccacactctagacacgccttcactccagtccattctggcacctagcctcagtcttcaccctcctccctcctccacacactccttcccccagccctccaaggcagcaccaggcctgagggccacacctcagctgggggaggggagggaagacagtgagacagacagaagctggggaaagaggagccagggttggccccaagcttctgtagccaccactccaggaaggagggaaagggggcagggctgaggctggggctggggttgccaggtgatgacagttcacgtggttcaggcaggaggctcttctccaggaggtgcagggaagccactcaggtctcggccaatgatctcactcactgtaaaggaggggcagttgagagactgggctagaggtgggtcccctccttttccaaagacccacccccaatccattccaggcaggccttaatctaggaggcctctagatc

SEQ ID NO: 238502 - DNA, 552 bp, Homo Sapiens
cccgagccgccagagcccaagaggaggaagtacggcggcatatccacagcctctgtagacttcgagcagcctactcgggacgggctgggcagtgacaacattggcagtcggatgctgcaggccatgggctggaaagagggcagcggcctgggccgcaagaagcagggcattgtaacgcctatcgaggcccaaacacgggtgcggggctccggcctgggtgcacggggcagctcctacggggtcacctcaaccgagtcctacaaggagacactgcacaagacaatggtgacccgcttcaacgaggcccagtgagcagcttcaagagcaacttctccacatgttgggtgtccatcctggggcagggaaggacagagtgttggatggctgggacggggccttgctcttgtcggccagcccactccccagccagagagggcttgaccaaatcaaattgaggtggtgacttttgttggaaaattgggctgggatcacgtcctgttttgtaataaaagctgaaaagtctgcaaaaaaagaatccgagcacactacggc

SEQ ID NO: 238503 - DNA, 553 bp, Homo Sapiens
atactttgttaatttttatgaatgttaggtgttatgtctcttttctttgacgctctccttttttatcctgtgcttacaccaaaaacaaattatttgaaaatgctaaaataaaatgtggcatgttttcttagctgttttgtattctgttataagatattttacaactatgaaagttgaaaaataactttattggttttgctgcatatagctgcctgtctactataagagaactaatccataaaattaaggcattttgttatttcaagtgtagaggggcaagaacataagggaattataaaaaccccaagatgactcatttaaagtagatgcacattaaaatactatagatctggcatatttcatatttataaagcagacaaaaagaatgtttatctttgcatttggcaagagtatcttcaagataactaccacttttcaaagcactattgttgggtaggttttattaggggagaggacttagaaaacatgactttcctcacccaaaaccaaaaataaatcccggctcgagccgggaatccgagcacactacggc

SEQ ID NO: 238504 - DNA, 533 bp, Homo Sapiens
gagcggccgctcgaccggggattattctgtaccctggttgatgtgtagagtagattgtctggtgctctcagttgtttttatttacatttgtcacgttgttgtaagagaatgttaacatggtataaaactctgtgacaagataagcctcctgctttatataacttcttgaatccagctaagagatttataaactaatggcataaatgtctggagccaaccttggcagttatagcaggagaacactgtcttaatatttctttacattctttcaaaaggcaaaataggattgccctgtattgatgtagaaatgtctgtaaacagagcttgtatggtttgctgggtcaaacaatgtttccaacttaaaatcaatctcattgccactttaactacttttagtcatatttattaagtaatgcagtttgtactttttttattttgtaacattttgtgatttttttgtacaaaactgtatttgtacaatagagcaattcccagctgatggaatgaatgaataaaatgcaaaattaactttc

SEQ ID NO: 238505 - DNA, 550 bp, Homo Sapiens
tttagtcatagagcgtatctaacacatcaccagagaatccatactggggagagaccctacaaatgtaaagaatgtggaaaagcctttaggcagaggatacaccttagcaaccataaaactgttcatacaggagtgaaagcatatgaatgcaaccgctgtggaaaagcctataggcatgattcatcctttaaaaaacatcagagacatcacactggagaaaaaccttacgaatgtaacgaatgtggaaaagccttcagctataactcttcacttagtcgacatcatgaaatacacaggaggaacgccttccgaaataaggtgtaaaaacagatatttgacttgagaacaaaagccaagtgtaaattggtgatttagagtgctttaaaatttcaggactcagatatgaggaattgatgtaatgatgccaacttttaatttttcccattgtaaataaacattacattgacaggtattgactactaacacctctaaaaagtacttaagattaaaatctggtccttaaaattaaatgaatccacgcacacggcgc

SEQ ID NO: 238506 - DNA, 532 bp, Homo Sapiens
ccttgttcctctgacattgtccaggcaagagggcatcctgatcagatgagtagatttggctgagaaaaaccctagagtaaggcaggcactttgtggaggtggatgatgatggctcataaaaacgtttgttctcagtccagttcagggctctgccagcagtctttcagatttgaactgcttaaacaaaccctacagataaattggcactctgatttgtaattctgtttgtacaagtttagagcagcctagctcgagtcctcaaccccagtcctcttagaagtgaactgattgcactggatccctaaacccacaatgttgaggacacatgtgatgactccacttgctcagccagctggcctcttgcactttcccctgcccaccacttgtaactaccacttaattatcttgtgttaattgcttttgttgtgttgggtctgtatttttgtggtcagtgcctgcaggcagaaatgtgaaagcatttggtatgttgaagatacttgcttcttttttaataaaattaaaagtacagcac

SEQ ID NO: 238507 - DNA, 530 bp, Homo Sapiens
tgaaagcacagtggagagatcgctggagcgggcgttctgggcaggaggaagcacagacggcaggcagggtggactggccagcaagcgcgaggttgacctgccagccttgggccacgccgatgacctcaggccccactaacaaccacaggtgcgtcaacagccacgggccgtgccggcagccagggccacatcaataaccagggtcccaccgaccaccgtaggtcccaccgacagccacaggtcccattgacagccacgagtcccaccgacagccacaggccacaccatcagccacgggtcccaccaacagccatgggccacaccaacacagccatgggtctcaccggcactttggcctggagccacagagaaacccgagtgaggaataaaaggaagattctgtaaacagtgcacaacctctggtaacaaacgctacgatttggtgacgacgcagacaccctttgctctctcctttcatacagcgagtgccacgcacggaaactttacaaaaatagcaactatccgagaat

SEQ ID NO: 238508 - DNA, 857 bp, Homo Sapiens
agacgatactcatcatcgatggctgatgatatccatgtcattaagcaggatacatgtgctaaggctctaaccaaatctgctgtcatcgatacaagtgcatgtgaccaaaatgatccaagttttatcactcacactaaaatatagaactaagctgtcagatgaaaattaaataaaaaatctgttctatgttcttaaattattctttggtcaaatgatgtgattttgagagatctgaaaatataaacctatttctcatttccaaatacaaggttataagtatgtacagcaaggtagcattttcttactagaaaacaaggctttcaggtaccgtatcattccattaacattgtacacttttatagtccctttcctcccatggctacaaagtgctggacatacagagaatacaggaaagaataaaggagcaaatgaatagagcctcacaacacccctgtgaggtaggtaagtattattaatcccattttacaaatgggtaaactgaggcacagcatggtaatgtagttggtcaagtccacctggcaagttacaaaagcatggctgggaacaaagaaaaagaaatggaagatcagtcctggctcccagccctagacactaaactttatttcaaaatattaaaaaataaaaatagcccacaattgccttttaaatgttggaatttagaaaaacctttaggtattcctcttaaacatgtgcctttctttcatattcctgctaagtgaagaacggatagatgactaaatggtattccttactctctctaactgcaattcccatgatagatcagatgtatcagcatttcaccagagctcaggctccaaactcaaggacacctcgtg

SEQ ID NO: 238509 - DNA, 798 bp, Homo Sapiens
  misc_feature (792)..(792): n is a, c, g, or t
  misc_feature (796)..(797): n is a, c, g, or t
ccaacccttccagggacccggcccttgggggaccttggcccaaggatgcttggggcctgccagctgtgctgcaaaggtggggggcccacaccctaaaactaacccaggccccagaccactggaggccagggcttccctgcacgggctaaggggagttgggatatcaccccaaagtgaccttgccagtgagctgttcagcaggtagccactgccctgccatctgtgcagagccagccaccttgggggctggggttcccgctttgaggcccaccttccatactccccttgactcggctctggctgaactggggaactctcttgtggtcagcaaagcccctgccatgcaggccaggtgccattgagaattaagtgctcagagggccaggagcccaggggatgggaaagtgtgtggttttagtacgttcaaaagggacaatcgcttgcagttggtagatctagcgatctagttgggagataatggtgtttaccccatatgaagtattcaatagttctacttgtgaatttgtatttattttgagttatacttgacacagaattccttttttaaaaaaatatgtgtgtattttggaaaaaaaattcatagatgttaaaatttctgcatggttaccagtttttctcacaacactgaatttggtagcttttcccgaaaaaatcttcacagtaattttttgtctgtatatatttgagggccttttttttaaaaaaaaaaaaaaaaaaaaaaaaagggcggccgctctagaggatccaagcttacgtacgcgtgcatgcgantctnnc

SEQ ID NO: 238510 - DNA, 501 bp, Homo Sapiens
ctgtatgtggtacaaataatttgggtaatatttttgtatttttgttttacacactctctaatctcaattatcctttgctgggagaatgacaggtttcaattatacaggaaggtttttgcacaggaaatttggtcccagcccttggaaggaagaagttccttcgtttacttagtgaatggagtttctggccgcagatgtgccaagtgattgaagaaagatataccccaatatcaagtgataatttattttcctacagactgaatttgctttatttgaaagatgttgtaactctttttaaagttagattttaccctgaggtatagtatatgtaattttgtgaagattgagctggaagggaagttcacaatcctcacatttaaaaaaatatagtgggtgctaaatgttttcttaaaaatctagtacagcatttgatctttgttatgcacagcatacttttattttacagaataaattttcctgtgatagaaacaacaagacaaa

SEQ ID NO: 238511 - DNA, 491 bp, Homo Sapiens
atagacctgaatagctttttgaaatatttatagttctagtatttaaagagaaacctgaaattataaagctgagttaatttctatacctgaaatgttcatttgtctgctgaattcagggagcatttgagatgtcacattttggaactttgatttaaatagttcagtattcccaaggctgagttccatgaccctggaatgagaaatatccactgtacctctggttctgaagagtctatagtcggccaacactgtgaatgtgtgaaggactaattgtcactttcatgttatttgccaccctgacagctgagacactgcttttcagcattttagttaagatttgctttttaactgtgcaataatcattttattttggcattataaaataaaaatcacaacttctgcttttcttatatgctttgtgtgttatcacacaaatattctcaaatattcataagatattttaaataaatcattgtgaattagacaataaa

SEQ ID NO: 238512 - DNA, 616 bp, Homo Sapiens
  misc_feature (88)..(88): n is a, c, g, or t
agtcggggtctctttcgccttctgtctttctgcgtcctactagcaggtttgtgcaggggaaactcagtggagaggaagatatatatcnccttaaataaaacagctccctgtgttcgcctgctcaacgccactcatcagattggctgccagtgtgagttgagatggattcatgtttgtggacattgatatttgtctgtgccctagatactaagtaacatccatgtcctgcttaggagatttgacacttatattggactgtatgtaggcagttacagataaccgtctgtcaagctaggcaagataattaataagaactaacatttagtaaatgctgcataccaagctttttacatgtgcatctcatacaaccccaaccacaaccccacaaaataggtcttactgttattgtcactttataaatgatgaaactaaaacttaaagaagttgagtaactttcccaagatcatactggtaataagtgatgatgccaggatctggtggcccgagcactaagctgagagaccttttttttttgacacggagtttcactcttgtcccccaggctgagattgtgccaccatactccagtataggtgacagagtgagacactgtctg

SEQ ID NO: 238513 - DNA, 534 bp, Homo Sapiens
cacacatattgctgaaaggcatggtcacaaagaactcaagaaaatcttcgaagacttttcaatccaagaaattgacataaataatgagcaagaaaatgattatgaagaggatattgcctcattttccacatatattccttccacacagaacccagcatttcatcatgaaagcaggaagacatacgggcagagtgcagatggagctgaggcaaatgaaatggaaggggaaggaaaacagaatggatcaggcatggagaccaaacacagcccactagaggttggcagtgagagttctgaagaccagtatgatgacttgtatgtgttcattcctggtgctgatccagaaaataattcacaagagccactcatgagcagcagacctcctctccccccgccgcgacctgtagctaatgccttccaactggaaagacctcacttcaccttaccagggacaatggtggaaggccaaatggaaagaagtcaaaactggggtcatcctggtgttagacaagaaacaggagatgaacccaaagg

SEQ ID NO: 238514 - DNA, 563 bp, Homo Sapiens; identical to SEQ ID NO: 101454

SEQ ID NO: 238515 - DNA, 479 bp, Homo Sapiens
cgtcagggagagttgaggctgcgctttggtctctccctcctcgctgttacatcctccttgcaagtagcggctgtaaagcttctctgcctctcctaacatgccatcctccactcctgttgcctcaatctctcttcatgcccagctaatccacctttttgggtcttcagacatatcgctgcttcattgatcctctctcctgtatagcagctctctcccctctgcctatgcacagctcttcattccagaacagttgatgtaagcctgcttcccctgtttcttcactgcctttcctctttgtaaaacatactttcacccagagtctcttgaacctatgctcctaaaattcacaaggagagcagggcacagtggctcatttctgtaatcccagcactttgggaggccgagtcaggaagatggcttgagcccaggagatcaagaccagcctgggcaacatagtgagaccccatcataacaggaaa

SEQ ID NO: 238516 - DNA, 642 bp, Homo Sapiens; identical to SEQ ID NO: 149256

SEQ ID NO: 238517 - DNA, 566 bp, Homo Sapiens
agcataatttgattttcctttggctcagaaaactcatttggggaaattctcttttgtgttcagtttaacctagaaaggtcctcttgaaaaaccaacattttaggaaagttcttttttcaggatggagtatattaaaattaagccaggctttgacgtgaattatcacttttttttattattttgttttctattttggtttatagctatttctggttcagttctgaacttcagcacttaatcatccttatcaaccaggcttttggtagcctaaaccgctatgctgttgtttttttaatttaaagatgtataagccaaaatttggatgggagtgagacataactgatttatatgaattttaacagagttgtatttgtgtgtgtttaataaaatatatatttattcagtactttcctcagtattttatgggcaaagtaaaaataacaatgcatagtgaaagggcatatattaccagcagtaataattcaaaatcctgaaaatgtttcattttttttgtttttgttatgcagaataaacaaggcagaaatgctctttgaacaacaaaaaaa

SEQ ID NO: 238518 - DNA, 559 bp, Homo Sapiens
acatgctttcatccccttttgtaatggatatcatatttggaaatgcctatttaaaacttgtatttgctgctggactgtaagcccatgagggcactgtttattattgaatgtcatctctgttcatcattgactgctctttgctcatcattgaatcccccagcaaagtgcctagaacataatagtgcttatgcttgacaccggttatttttcatcaaacctgattccttttgtcctgaacacatagccaggcaattttccagccttctttgagttgggtattattaaattttggccattacttccaatgtgagtggaagtgacatgtgcaatttttaaacctggctcataaaaccctcccatgtgcagcctttcatgttgacattaaatgtgacttgggaagctatgtgttacacagagtaaatcaccaaaagcctggatttttgaaaaaactgtgcagagccaaacctttgtcatttgcaactcccacttgtatttgtacgaggcagttggataagtgaaaaataaagtactattgtgtcaaaaaaaaaaaaaaaaaaaa

SEQ ID NO: 238519 - DNA, 421 bp, Homo Sapiens
ataagccattaattatgagatttttctgtggtccccaaagagttcactctttgtcctaatatacttattggtatgttaatagtaactctcacttgatttattctcaggcttatctccacactgtaatggtagtgattgtggatattcatctagcatggaagggagtgaaacaggttctcgggagggttcggatgttgcctgcactgaaggcatttgtaatcatgatgaacacggtaggctcacattaagtttcccagttatttctactacatggctgacttaagaacataaataagaaggattattgatttctgcaggtgatgactcttgtgttcatcactgtgaagacaaagaggatgatggtgatagttgtgttgaatgttgggcaaattctgaagtgaacaaccccaaaggaagaaat

SEQ ID NO: 238520 - DNA, 542 bp, Homo Sapiens
aaatatatttgtacctgaggtacagattagaggtgctagtaattccttgaagattctgaaaatgatctttttttccaaaatgctttcttggtttttattaaactttttttttttttaaaactctcacatcaggtatttccagtgttttcaagcatgtataaatattttaatgtataaatgttgtttaaaatcccctcaatcggtatctcctgattgagaaaatacacagtgaccaatagctaataggaattcagtattgctttcaaagaaatgtgcatattaatcactgtagcatctgcatacatttgaaacacggagtaatacaggtctgtgcaagaattagcagcttgttccttgctaataatgacttgtgtcatctggaaggcccccaagagcccatggtctacaggtggaatgaccaccacttgggagtgagctgatggagagcacccagcaggtctcctccatcttcctggttcctgtgctcaccatagggctggtgtacattgggccattaataaacgtttattgaacaaattaaa

SEQ ID NO: 238521 - DNA, 555 bp, Homo Sapiens
  misc_feature (110)..(110): n is a, c, g, or t
agttattagtattggtatgacccccaatatttcctattcaaaataaggacgttattgtctacaagagtattttaaaccaataatgagataatgtttaaatagaaacaaanatatttgtgagtatttctggagtatctggctggtccatatcaactggaaatacagataacccaggtgtagatttctttgctcttagagggtgaaaaaagctttttgttgttttattttcagttatattggttttaattatccagcctccagcaaaattaaatacatatggattcaaagctgatagctaccatagtttgccaaaatacaaccagatgttttcaaaatgtggaaaaattgtttttggactctacaggaatagaacccttcccccaacactgggaaaaggttgttttctaggcattttcagtgttactgatatcccaggaactgtcagatcaccacccggcacatttttcatttttatctgcacttgtcttacatgcgaaatattttcttaattcatgtctcttttttgtagcatctttttttcccaagtaaatacca

SEQ ID NO: 238522 - DNA, 569 bp, Homo Sapiens
aaagatgttgtgtgcggtctcctgtatcggtgtggatccaacagctctccagggagtcacattgcatgggggttgagttgacggttcttgtgatatgtaaacccccgagaccaaacttgagggtttatttagggttttctgtttgtcctttgggtttttgtttcactttgttttggtgccgtttctccatttacagccaaatcagtttcatgatgttcaaaacatttactgatgtcaaatggaggaaaggaacagaaaaaaagatttttacaaagtaataaaatttaaaactgagctgtttaatgttgctgtttttacctgtctgttcttgtccaaaagtggaacattcccagggagaagaggaaggttccactcggttctttaagtcgccaaaagccccagcccgggattcagtacctcccctgccccccgaattcttgcagcactatttcccagttggttgatgccaaggcaaaaagataacttttaacagttagagaggatcagttgcttaaatgatttcatgtcagtgttgtatttatggttttacaataaaacaacctttagga

SEQ ID NO: 238523 - DNA, 684 bp, Homo Sapiens
  misc_feature (163)..(163): n is a, c, g, or t
  misc_feature (209)..(209): n is a, c, g, or t
  misc_feature (296)..(296): n is a, c, g, or t
gtctcacaataacacacataaggcagtaggtgcaactgtatgtccagcactggagcttagcggaggatgatgagtcagagtcaagctgagtgactatgtccacattgatccaagcctggcagccagtagactgtctctgaaataaataataataataatcttntagagacttgaatttgtcgtttatgcatatataagagatttgactntatccagtcatggtgtatattgaaatgtcactgtacgcagtcatagggtaacattagcactttcctttatattacccaaaagtgaanccagttcttgtttcttctcaaaaaaatgaaaaagaatactttatttgtaatatctttgtagtctcattcacagaattcctaatcccccgcaacccggaggctgtaaaaatgaggataaggggttagaaatttccaagaagtgactgttgttaagatagacattgaaggacagcaaaataagagtagaattaggtatcataaagagcatagtctttgaatccaaggttcagtttaccccgaatctagatgttggatacttcaagagtagaaaattgttctatcacatcttaaaaaactgttgttttaatggtaactattgatttgacccactttaaatgggatatattatatttgcatatagaagatgaagctctagtagcttcaacgt

SEQ ID NO: 238524 - DNA, 425 bp, Homo Sapiens
caagagcctagccattcagtattaaaaagtgatggccctggttgacggtaccacacctgaagacctatgccctttccttcacactccatacttgtgcatttcttccctcctgaacgtctatcaagtggaccatatgaaattgccagtattcaactgttttttatcttaaaaggtgacaattctatatcattcaacctaaattaatgtctcaagaacataacctttgtttctattattgtgaccttacttttaaccatcctagagctctttaacctgttcacactggatttcaaggatcttaagttgttctactacataatcactatcacacttcagaaacattttagtttacattaaatacacttaaccccctcatatttcatctcttcctttctcaaaaatagtaataaataacctcaagccat

SEQ ID NO: 238525 - DNA, 506 bp, Homo Sapiens
tgagcttctccattccatggcttatccagacttctcatttatcactctctgggttctatgaaattgtggtgcaaagagtaaacaccctcaaccatagtaatgtatacttcaagataaataattccacatttcctatataaagttgttgaattttgattcaaaaatgcgtaagtattccaataagaaaaactttgtatgtagtgatttctatgtaaaaatattgttattattattatattcaaatggtttatatgttttcattgtcactcagttaagcagccaattctgttagctggtaattccacaaagagaagccatctgccccaggagcaacagaccaagctgccttggtctgagagggtgcatctgtggaactcttgcgcaacttacattttatgtcaccttttgattttactcccaagatactgtgaaaatgttgcacttggaatttatttatggctataacttataatattcattttaataataaagattgtctttgtaat

SEQ ID NO: 238526 - DNA, 440 bp, Homo Sapiens
ggctccactgcaacatcacggttttccttgttcccgcatgttcagccaatcgtgtttaaggagaaactaacaatgaaaacggactcgttgatggaggaaaagttggaatgcagcctctggtgctgtttgagcgatccctctaccccgggtcgctgctgtgttctggaaaggcgcattgtaccctggatgcagcaggaatcctattcatcttcttcaccgatatggtttgtggactctgatgagccaaatctgacatcagttctggaacgtctagaagatactaaggacaacagttcggtaaggaaagaaaccaagctattttctcttttcctcatgaacattatatttagaaattaaatgttaaatgataatattatataaaaacatgattaataactataatcttagaggaattaaagtctgggtattttaagtcctcc

SEQ ID NO: 238527 - DNA, 450 bp, Homo Sapiens
tactgtcttcccatctgagcactaaattcttattaatgatgccaaaagttgtattggcaggcaaaacaaaaattgctcttttttattttttgcatgaacttccattatgccagtctttttcctcacatgtatgtacaactaaatttttaagcccaaagacaactgatgttcaattttggtgtttatggacttattttcccttccttctgttttgccatttctcttgtaattttctagtgtttagttctataaaactattataatgcaacctcaaaagattggactctattaaagttgatgataatgagactttgactttaataaattcacctttgccttaattataaagaaaaactttacaaaattcagctaccttcagaaaacgaattctttaaaagaccatagtgcaaaatgatgctgtcatgaatctcattggttcattcagccaaa

SEQ ID NO: 238528 - DNA, 506 bp, Homo Sapiens
ttaacttgattactctttcttcacttgaccagagagtccagaagggcaggttctatgtctggttttgcacaccaattataaagcttcatttatgcatttcagacttgaatagtaagacgaaaatctttatattttcttatgagtctccataaaacctagcgtttactcattcttaactcattctttgtagcatcataacattgtagactttgtataaaataagtaagatactctttgtatatgcctaagtcaagatctaaaatattatatggtactacaatgtcacttaacatttctcactttctgcctttccatttggttatttaattttataaccatcccaaatcacagaacaactgtatctatcctacattatatataagaaaaccttgtagaagagttgaaacccaggatatcaccacatatcaaagacccaaccaaaggctgaggaatactgctttgcagtacaatttatgttatcaatatttgtttgtatttgtcgacgc

SEQ ID NO: 238529 - DNA, 524 bp, Homo Sapiens
caaaagcagcactaaatgttcaggtctgattacaaaggaggagttcaacaaccctgcctgcttttactcactttgaaatcagctttgctcttcctgcctgcttgtattctctttatgacagggtataaaggacctaaaagagcaagaagaaccttgggtctcttttgagccatatagtttggtccaaatagttcttgtctgaggaatccaaagccaataaccagataataaatattacagaaagccttacgcttttttcagtgattgctcttgtaggtgaaatagagtacggagctgacagtgtcaagccccaaaccaaaacttgtgtaggctcctatcctaagaggcccaggccaccattaaattgaatattcatgttttatacattttatttatgcatatattgtgaaatatacatatcttatatttcacaataaaagttttaaagaatgttacttgcccaccctagtggccaggggataagaccattaccagaaggtggacatgaaagcttactgaacaaa

SEQ ID NO: 238530 - DNA, 486 bp, Homo Sapiens
ctaggcagcctgctccgtggctcgtgcttttagccactaggctttgctgtgtaaatatgacacaaactgataaacaagagggcaaaaagaaagcgttgcaggctgggcgtggtggctcatgcctgtaatcccagcactttgggaggccaaggtgggcggagaatcacttgagctcaggagttctagaccagcctggccaacatggtgaaaccccgtctctactaaaaaaatacaaaaaattatccaggtgtggtggctcatgcctgaagtcccagcttcttgggaggctgaggcagcataattgcttgaacctgggaggtggggggttgcagtgagcctagatagtgccactacactccagcctgggtgacagagtgagactctatctcaaaaaaaaaaaaaaagaaagaaagaaaagaaagcattgccatttctatggattggattaaatgctttgaaaggactcactgaagccattccgataaa

SEQ ID NO: 238531 - DNA, 570 bp, Homo Sapiens
ctgagtttgatttttcattttcagtgtttttgtgtatacttcatactgttccttttttagaagtccactgtatatgaatttgaacccaaagtcaaatggttaagtgttcagatcattgaggtccccaagctaaatatcaccatcataaaatgtaaattctgggatacaaaagtaaatctcaaattttattaaacatttttcacgatagtaattgtattgcattttagtagtcagattttagaagtttggaattttaatataggaaaaatactttgtgggcactaccggctgctaggttactcctgtggtcactatgtcacatgtgtagtatcatctcaactggcacacctgaccaaacccaccttcatagtaacactaagctgtcatttgcccttcccactgcattggcatctgcaatgatggcacaaatacgacggggggtgaaatggtggcaacttagcctgaatcaaggcaggcattgaagtgtcctatcccaagaggccttgcattcttccctgacatcttctctccattaaaaacaataaaaactaaaaaattttaaaaaaaaaa

SEQ ID NO: 238532 - DNA, 532 bp, Homo Sapiens
ctttttaatatagtgaacaaatatttaagttctgaaaatccactgttctttgaactacgtgccagatacctaattgcttgtgaacgcatacccgaagcaatggctcttattaaatcttgtataaatcacccagaaatcagtaaagacttatacttccatcaagcactcttcacatgtctgtttatgtcacctgtagaagatcagctattccgggaggtattgtttgagactatttttgcctattaccattttaaccctaccaaaaaaaaaccaaaaaaaaaaagtagcccactgttgttgttaaattccttttacagtaatgccaaagatttaaggattacattatctggatgtgttttcttttggcaccataacttaaggtcatgttgaattagtcaaaatctgatattaacaaatgatgaaatcaataaaatatactcattaataagtattattcacattgcacttttgatgtgatggagaagaggtcaaataaaagtcaacaagctcacagcttgccaggagtaaaaaa

SEQ ID NO: 238533 - DNA, 496 bp, Homo Sapiens
  misc_feature (486)..(486): n is a, c, g, or t
gaggcaatgtattgagtatgctgatagaggtggagttcagagacaggcaagcatacataagagtcaggatgtttttcagtattatctttacaaatgagtttctcacagtggtcaatgacaaaccaatttcattcaaagcttgcttcaataggcaatggtttgatgccaatatgttagctatttactttgaccaccgtatgcattaaaaagaagaaaaattaagaatactcaagcagaacctccaacttagatagcactttccacaaaaagtaatggagggatagactgaagttaaatgggatcaggtatgtgatgagatctcagaagtgtttgcacaataatgcagatactcattttaaacagagtcataaggattggaactaataaaaataatagaataaaataccgatcaagaatgtgtcctcctgcgtatctgggttttgaattctggctccacagaacatgtcagatatatgtcattaaacngagttcttca

SEQ ID NO: 238534 - DNA, 459 bp, Homo Sapiens
agagtgattcagaataatttagactgttaatgaaaagaggacatagggaatagtttttcattttatgccaagtgatttttctgttttattagctagtgaaaccaatgttggtaaaattaagttaacaattttagagtttgtgctagaaaagatattctgaggccggatgtggtggctcacgcctgtaattccagcactttgggaggccaaggtgggtggataacctgaggtcaggagttcgagaccaccctggccaacacggtgaaaccccgtctctactataaatacaaaaatcgtccgggcggggtggctcacgcctgtagccccagctgctcaggaggctgaggcaggagggtcgcttgagcccggaaggcggaggctatagtgagctgagatggcaccactgcactccagcactccagcactccagcctgggcaacagagtgagaatatgtctca

SEQ ID NO: 238535 - DNA, 509 bp, Homo Sapiens
cgagatgagattctactcagccgggagggcacaatcttgctgagccaaatgaccattaactgagttaggggagggtaaaacctgccaggctgactgtgaaccgcctccagctcaattgtcaacctggatcttacaagtccacaaggtcatggatgccagggaaaaacttccccctgaaaggcgcacaagcaggcggaacccagccaataatgtaaatacattaggatgcaaccagaaggtacattgcaaacccactgcttgaaaggtaataaattcatattgagctaataatgtgttaggtgaattgataatgaatttatattaagtgaatcaattaagtaattctgaattggcttttgaaagtctgcgagaggctgggcaccatggctcacacctgtaatcctagcactttgggaggccaaggccagagggttgcttgagctcaggaatttgagaccagcctgggcaacatggcaaaactccatctccaccaaaaaaaaaaaaaaaaa

SEQ ID NO: 238536 - DNA, 531 bp, Homo Sapiens
acatcacagctcactgcagccttgaactcctgggctcaatggatcctcccaccttaggcttgcaagtagctaggactacaggcatgtggcatcacacctggctaatttttttttaattttatttttgtagagacaggctcttgttatgttgtccaggctctctcactttttctcttttttttccccccaccccgagatggagtctctctctgtctccaaggctggagtgcagtggcacgatcctgagatcctggcttactgcaatctctgcctccagggcccaagtgatcctcccaccttggcctcctgaatagctgatacaggtgcagcgggtgccaccacgcctggctaattttttgtatttttggtagagatgggatttcgccatgttgatccacctgcctcagcctcccaaagtgctaggattacaagcataagccaccacaccctgcctctttcatgtatcttctaattacacctaacagtagcaaatattaaagaggttatttgggtaaacgcgaaaacgaattg

SEQ ID NO: 238537 - DNA, 553 bp, Homo Sapiens
catctctaaaaaaaattttttttaaataaataactaacagtaaccttaaaatgaaattatggttcttaatgatagtggcttgttacatctcttatagccccacataggttagatttttcaatataaaattagaggataggcacattctttctttttagatgcttaagaaattacctcacataaacattttaccatttaaaaaatgatgtttaccagtccatttcagttcttcaactgaggtccattgtaaaatatactacttttgctgtataccaagctacagttgtagatattgattcaagtaaaggtgatacttcctcttccagttgatttttatactcttaatttgtgtatacatacattttcacacatgaatatgtgtgtgtaagagacagagtgcattcatttgcacccagggttggaggaaagaagagaaagaaatgagaatatgtatattggagatacttggctatttgtacctcacctgcccatgaaggctaaaaatggatggttaaacacctgtctctgtgctcatgatgaaaatgacctttgc

SEQ ID NO: 238538 - DNA, 613 bp, Homo Sapiens
tttgtttgatggcttcataggatccaaagaccctgaagccatccatggctcatgtatttctgcttaagaaagcataatcttgttctgctctctcattttacaaatgattaatgcatcccttttcaactactccagcgctgttgctgctgcaatgttagcaaatgcaagccagagagaagcacttgaaaatcctttgatgtctaaaaaatgttcaaatagtgtggatgtttacatatctgaagttttcagcatttaagcaaattaatgatcatttcaacaaatactagcatatccggtttcccttaatagcctgtcagcagtgctgccttgtcaatttgtgtgtgtgtgtgtgtatgtgtgtgtgtgtgtgaattcataaggagtgcttctgatgcttagtccttgaaatggaacttcaactgtctttcaaaacactggcttcaaaataggatgtgttttcctaatgaatcagaagtgggcaatgagcattgttccacaggaataatttttaatttaatttctataaaactagttgagaaatgagagcctgtccacccaccatttgtgtatcagtggccaattcattagtaaaaataaaggaggggaaaggaaa

SEQ ID NO: 238539 - DNA, 360 bp, Homo Sapiens
cgcggccgcgtcgacattctatcctgccagtgctttagaataacttgcattttaaagtacatttgcacattttacatataatgctatatggttgtgtttgggctttgtgtacagatgacttttgttattaagtggaaaaggcctgaaatatgctgttctatgttaagtaaattgatataacctaagaaaagatcttgttgccaattcagaaaccataaccttaaatagcatgcctgggtctcctctgtatctggtttaacatctgcattgaatattggtattttccaataatctccaactagcttatttattttgaaaaaaaaaaaaaagtcgacgcggccgcgaatttagtagtagtag

SEQ ID NO: 238540 - DNA, 464 bp, Homo Sapiens
cataatttttattcatttaaaaaccctgctattaccatatgaactcaatattcaatgccagtaatttaaaaaaggggcagagcaggacagaggagacatgtaaacttaataacatgcattgcaaacagtaggtaccaaatgggcttccagccagtcctccacacaaggaagttaggatgtttcaaagagcccttataataaaacaattttggcacatcatgtttgtagaaaggagcacttaattctctttcaaataccaatatccctttaggaagatggtagtctacagtatcttcattttatgatgaggaaaccgaggtccagagaaatgtaaagtaacctggaccatgatatagtcagtcaaattgttgggggtataaagattaaaacttggtgttgcctacatttttccaagctgcctaccctcagacaataacagcagtgactggaatatataagaaatg

SEQ ID NO: 238541 - DNA, 471 bp, Homo Sapiens
caatctgtagctcaatctatcaaagaaaatggtggcttttagtaattaaataagcattagttcctaccattttaatgtgttcagggtaggaaacagaatagacaattgtgactgtaatgaggtccatgaacgtttagaatatgattaatccattttccacactgacccatggaaacaataacagctaatgtggccccactctcacctgtgaatcgtcttattcccacaggaaacatcaaacctccccaaatatcatcctctaggcagaggtcacttaactattaaatttacaaggcaggtgcaaaaaaaaaaaaaaggtggggggaccgatgaaataaaggaaaaattctatttactaaaattcaagtagctaaactatcttttaggtgaagtcagtgaaaaccttcacacattgctcatttacccttatttcaatcataaagctaatatacttccccctcgttccgaatt

SEQ ID NO: 238542 - DNA, 518 bp, Homo Sapiens
atgtggcctcgagtccatccatgctttagtagctgctcctcagcaaacttcatcccacgactcttgacctctggggtgacattcatggtgagaaaaaagtctctatcctcagactctcaccagagaagaagaggtgatatcatccttttaagaagaaagtagaaagtgcccaaacagccatcagttccatcctgactgcttgttaagaattctctgctagttgggtgcagtggcacacacctgtagtcccagctacatgggaggctgaggcgggattgcttgagtccagcctgggcagtatagcaagaccctctctcataaaaagaataaagcggccaggcacagtggttcacatttgtaatcccagcactttggaaggccaaggtagaagaatcacttgagcccaggagttccagaccagtgtgggcaacgtagtgaaaccctgcctcgtcattgctgggtccgctccgcggaaacatgtgccggacctgacttgtgcgccgcctcttcccggaaat

SEQ ID NO: 238543 - DNA, 860 bp, Homo Sapiens
  misc_feature (225)..(225): n is a, c, g, or t
  misc_feature (262)..(262): n is a, c, g, or t
caaaggatccaaagagttcactgattctacctatgctctttataagaaagattttttttgaaccattaaaacaaacattacaaaaaagtgctttcttcttaactgcaaggatatagagtcaaaaagtctcttatcaagctgatgatgatcaagttcaggtccaagatgcagacagaacttctgtggtacagtacatggacttattcttcctttattccttgcagnttgtcataaaaaggtggatagtcatgtcttttgtggncttcttcttattcttcttctccttctgctgctcctcgtgcttcatctacttctccttaatctcttttcttcctcgtttctttctttctttttttaattaatattggagaagggagtcttgctctgtcgcccacgctggaaagcaagtggcgtgatctcaggtaactggcaccctctgcctccaaggttcgagcaattctcctgcttcagccctcccaagtagggtgggactacaggcatgcccccatgacgcataggtaatttttgaatttttagtagagaccgggtttcaccatgttggccaggctggtctcgaactcctggcctcccaaagtgctgggattacaggcatgagccaccatggccggcttatcaaataacacaattttcttataccaaaatgacaaggtagtcagtgagatgggagagacatagattttttaaataccctaaatccttttgtgtgcccaggatatggtggtggtggtgaaacactgtgttttctggtcagcgccactgcctgttcataagaaggtaatcctgcatcctccacagaaggccgcaatggagacaaggcagcctcctcaaaacttctgaaa

SEQ ID NO: 238544 - DNA, 506 bp, Homo Sapiens
ttggtcagcctgctgacaaatttaagtgctggtacctgtggtggcagtggcttgctcttgtctttttcttttctttttaactaagaatggggctgttgtactctcactttacttatccttaaatttaaatacatacttatgtttgtattaatctatcaatatatgcatacatgaatatatccacccccctagattttaagcagtaaataaaacatttcgcaaaagattaaaaaaaaaaaaaaaaaaaaaaaaaaaaaaaaaaaaggggggggcgtcgaggtcgggcttgggaagggtcagcgggaggcctgagggcgccgggcgctgcggcaggcgggcccggggtccagccgagagggtccgggcgccaggcaacgcgattcgcgcgggggtgaacccggggagggggccggcctccccgttctgggacctttcgctcccctgggacctgtggccgccgcccacagaccatgctcctggggcgcctgaattcccagctgttgagg

SEQ ID NO: 238545 - DNA, 466 bp, Homo Sapiens
agcggggtgcggcgccggagtgcggggagaaccaccaggcgccggaattggggagcacgtggagggggcagcggctccagccccagaccgccgcgctctgtcactttgcattaagaaagcttccggggaatgcacacggcctggccgccgccttcgtgcagcccgccctgcaggtgcaggaagaaaagaataatcgcacccgtttctcaggtgcttacttcaccatgtccgatccggacatgaggctctgcctgcagtcagcaacttggaatattcagacttcagaccagcatcacagattataaccctccgtaaatcatctgcatcccagctcccatcaaaagccagcctgaaggacccatggacacgtgactccagtgttctcaacaacatcttaagatcaagttggtttgcacaacatttgcatctacttgggacaaagcaagaacaataagggcaaaaaagt

SEQ ID NO: 238546 - DNA, 566 bp, Homo Sapiens
tatcagcaaatgttactttatctgtgatcaggtcagaagtgtaggaagattgacttagaacaaaacataacaaagacagaagtgtcagcttgactaaaggtgttcctccattgtacaggattttaggttagcttccttccacagtgaaagttatttttaatgtaagtgtatgcttaaaagagaatacggggaggtttttacctttaaaattgatttaggaaaaaaatgccaggtggtgtaatagtccctggagtagattgatttgagaatcaggagtttttaaaaggttttacagaatacagtttagagatgatcagtcagtattgcatagcaatgcaagattttagccaaatctaatacttactttaaaagttttttttatttgagatttgtggacagaactagtattcagtgattagctgcccttatactcattttctgaatgccagcatagttattccttagaacccagataaagcaccatgtttttgtttctcacttatactgtactttgcagacactaacagactaaaaacaaaaaaacaaaaaaaaaaaaaaaaagcgtt

SEQ ID NO: 238547 - DNA, 470 bp, Homo Sapiens
cagcaggaaaggatttcctttttatcactggttttgatggatttgattaaggcgttccttggtgaagttttcttcatgtttcttgttcttagaataatcatatttctgtaatatttgaagtttatggtttccatggagcttctaaatctttcatccagtatgttttaaatatctttgtctctcttctccactacacgcccttcagggattccatttagccctatactggggggtttaaagttttgatgccaatggtctttttatgttttcaagtcatttgttactgtgtgtttcatttatgttagtttcaacttctattccttctagttcaataatcttctcttctgcaatgtttaatccactgccttcttccacttcagactgtaaatcatactttttatctacagaatttgatatttaaaaaatcttcaacctccccatttaattaaaatacaataaaaataaaaaaa

SEQ ID NO: 238548 - DNA, 558 bp, Homo Sapiens
tgtagttttcagattgaagaatgaacctggatcaccaaactagataccgaaagggctcctcatttgtctcttttgtcccattgtgggcatatggtgggctccttgagaggagggagtctcagctggggcctggctgcagagacctgctcttgaatagggctgcctttgggatcagggagccgagcatactgggcaaggctcatcatgttcctttgtggaagtggttacttggtgggggtggggtggggaaggggggtcataggaagccgaagctgagtgcgcactagagctgctagcaggcaggccagagggtcagcttgtgttttattttctgatttctcctgcatgctttctggagatgaggattttttgtcaggtagctaggagagcactgccaccttgtgtccatatagcacaatgtttctctttcctattcacagacaagattcaagaaaccatttttacgtgtgtacattcaaatcttcatgaatggcatcacttgctttagacccattttttttttattggtcagaaataaaatgtaaatgcaaaaaaaaa

SEQ ID NO: 238549 - DNA, 508 bp, Homo Sapiens
agtctttgggcaacaacttgaaaggggaaaaaaaaactacaaaaacttaactttggtataggccaagtcagggagaaagtagagaaagctgtcatgccacagacttctttagtggagatcatttcctttttaactttgttcaggttgcccttcaccatggatacagtccggtacccttaaacatttaagggctgtttttttttttctttacatgatgttcagcttggtattaaccaaacttaaattttttttccagaagtattaaaatttagttaaagcaagatgaagtcttttcccatgaatgtgtccccttatctcattatagcttatgctcagtttcactttcttggaaaggttaaaacaaattagcctggcactttaggtaacttgaaaataactctcacccttctgactgccttccatccactctcaccccacacctttttttaatatatatacacccttacagattttctaacaaccaaataaaaaaatagcaataaattga

SEQ ID NO: 238550 - DNA, 450 bp, Homo Sapiens
ctccaccagggtcaaaaactgctttttcacgtcaaatggtgttggttttataattttatggaaactgaaggggactagctgaagttatttattactttccagcagctaataaatgttggtgtttaatagctgctgctctttaatatgggggtattgaataacttacataaaatatgttagcaaaacttgaaaaagttaaagcactgtccacttcttatggacttcttggccatttcctctcctttctcttcccctaaatgggaatggactgtaggtagacctcatgagtataagtctcagatgtccattatgttaccactggaaccatttagattagaagctgatcttcagtaaatatatttacattatccagtttgatcagataggtattatactacaacataaaacaaacagaagaatattatttatctcaaatatcaggtcaattta

SEQ ID NO: 238551 - DNA, 520 bp, Homo Sapiens
ggcacgagggccagctgttcaattcacgtcccacagacctgacatacctagtgctgacggagtgctccagtagtttaagagttaaaaacatgtgactcatgtgcccattcaggccttctgtctcatagatcttctccttttcgataaccatattttgtgaatgatgattttctaacacaccattgcaagtttctacaacttacttagtcgttaatagatattctgactgtgttcacagttatagtagtccccttttatctgcagggaatacattccaagaaccccagtggacgcttgaaaccatggatagtactgaaccctatggatactgttttttttcctatccatacctacgataaaggtatgataaataatacactttaaggcctggcacggtggctcatgcctgtaatcctagcactttgggaggccgaggcaggcggatcatgaggtaggagtttgagaccaccctggccaacatggtgaaaccccatctctactaaaaatacaaaaaaaaaaa

SEQ ID NO: 238552 - DNA, 591 bp, Homo Sapiens
catgctatatgactgtatcgttaaaggtacttgagcgtatgttgctgtaggtggtatgacactcaaatgcataagaacttgaagggatttattcttaaccactagaatatgaagagccctttttacctgagaagagtgaaattatgtcagaccttttaatttgatatcactgagtaaaaggtatgttcctatagccataggaatatgtctgcttcctttttttcatgttgagaaaacagtcaaatttaaccatttggagtttatttgaattcttggaaagagcaatattcaaaaccttttcaaaaataagatattctggactactggatggatgttttgttttcagttcatttttcatcagtagagatggtgatttcggttttgtagtatccttgtttctatgtctgtgcatgttaacattggatgtatttgtatatacttaattaatatacagactgtgtgtcattctggcttgattagaagctaagtcagttactgagtaacattttgcaactttattccagcaagtactaaatcggccaaaaaaagttttgtttttgataccattaaaattttattctctaaaaaaaa

SEQ ID NO: 238553 - DNA, 492 bp, Homo Sapiens
atgtcagcttttgatagcatagcagtaattgacatttcaaaaatatatatttctttctgtgtttggttgggtgtaatgaggaaaatacctgataaaatgtctgaagacactttctaatgttatcttggtgcataagctgtaatttttattcaaaattaaatttcaaatgtttgcagttttggctaaaacattgagttgaaagaattatgaaaagtgggcccatatgaagtaccatgttcattttgaaatatagatttaagatttagaaatatattaaaagagttaatggagcctcctaaattggattttattttgtgggtgaagaattgtaggaagatgaatgtggcctacagttttagtaatctcctagtggagttttttttaacttagtacttttttatttttaagttttttaatctataaaaaatgtgatttctataaaccatgattacaataaataattatattaaaaaaaaaaaaaaaaaaaaaaaa

SEQ ID NO: 238554 - DNA, 594 bp, Homo Sapiens
cattgagggaactgtgccctgtggtgtgggtgtctggagtgtcctgttgagtgatgatgtccacaggtggcatcgctcctccctggacctaccttgggaggggggcatcttctcttcctgtcgtggtacctcttccatggcccccagcacttcaggcacccaaggacggcaattaccacaattgttatagaacattttaaaattcattatgggaaaagatgccttacacaaaccagaaaatgtaacagtctaaggtgaaaatatttaccatttggatatctaaaacaagatacaatccaaaataagaatcttatgcccagaccagggaagaaaatccaaagaaatacaaataaaggacattaccaggaatgtatagaaggagaaaaacagatgtcaataaatatttgaaaagatggtggtattcatttataatcaaataagtgagaataataaaacaaaatcatggccaggcctgtgactcacacctataatcctggcactttaggaggcttaggaaggaggattgtttgaaaccaggagctcaagaccatcctgggaaacatagcaagactctatctctacaaaaagaaaaaa

SEQ ID NO: 238555 - DNA, 577 bp, Homo Sapiens
  misc_feature (8)..(8): n is a, c, g, or t
attttatntgactcaaattacaaactgagcatttatgggtgtctgtgtgtgcatagcactgaattagatcatctggagatacaaaagtgtgatagatgctttcaatataaaataaacgttacatagctactgaacaagacattatataaaggttcgttaatgacctaagatgtaaatttgtttataatttttatcatagttcaatttcatctaaaccttatgtgatttcagtgttttcctcagatttgtctcacactctagtctggtgatttccaggcttgtgcctgtcccagcacacctaaggaagagggaaaatgtccatcaataagtaacaggggtttactttcagtggacagggtggatggaaggagagatgagcaaatttggggtgaaaaataaaagccctccagtggttctgacaagctgtagctagaggggggtggcagttgcagaaggggcagtttctccgtcttgtattttttatttttttttttgattcttgaaaataagttcttatttttgataagatggaggattattattattattattttgagacagggcctcaaaaaaaaaa

SEQ ID NO: 238556 - DNA, 488 bp, Homo Sapiens
agagttctgcagattttggcatagatcacaaaaataactattactgctactggcaaagtctcccctctgctattagagtgaagcaggagttccagcccagccagagttaccgctatggcaactggtatgcgcgacagcacggctcttaccttctttctggctacagctatggctgtgcagtggatggaaatggaaaggactgtttttctgcgcatgagacccctgaacacacagctggaactctggttatgcctaaggaaaccacacctctagctgaaaaccaagatgaagacccactagaagatccacatcttcatttgaatattgaggaatcaaaccaagagtttatggtgaaaagtgaagaactctacgactccctcatgaattgccactggcagcctctggacacagttcactccgaaatcccagatgagaccccgaagtgaagcaaggtgttcattaaactccgcaattatcataaaaaaaaa

SEQ ID NO: 238557 - DNA, 504 bp, Homo Sapiens
ggtgcgctccgccaggtgctgtgcagcctgtgtggctggctctcgctctatatttctttctgccacctgaataagcaccgaagctatgagtggagctgccgcctggtcaccttcacccatggagtcctctctataggcctctccgcttatactggcttcattgatggcccatggccttttacccacccaggctcacccaatacacctctccaagttcatgtcctgtgtctcaccttgggctacttcattttcgaccttgggctgcatctggcgctttgcatggaggaagagcatcaagaagtaccatgcttggagaagcaggcggagtgaggaacggcagctgaaacacaacggacatctcaaaatacactagccaaggcttgctccagattatggattgggttaagtcagccatgggaaccaggttggaaatatgactgttacataattacacttataacaaacttaggtttcaataaagggctaaatgtattgatcaaaaaa

SEQ ID NO: 238558 - DNA, 600 bp, Homo Sapiens
tttcctcttagccataccattgttttctaccaaattaccattcaatatcttaatgaaagcactcaacattaagtgacataaacagtggcatttgggtaagcaacactcagtggggtgctgacatacagtttgggtaagattaaaaaacaccaaaggctgaaatctgtgagtaccaagaactgtgcatataggtttagaaattgactgtgtaccctagaatgtgcagtgtaatattttcaataggtgtttttttaaagaacactagatttttggaataatatatttctaattaggactatactgtttttcaatggtctgttaaaacatcatacagaatatttatttagttttattgtcatgtattggctaactttcaggggcctcagattccatatgtcttcagtggattgatgaatatcaggttaatttgtgcctgccccagccatctctactttattctgaggtattccacaatcctcttgttgcaggtgctgctaaaaaaaactcaaaattgtgtatcaaatattttctttcaactgtaaaaaatcatctgtgttaaagtgaataaaaagtgcattttgaataaccagcaaaaaaaaa

SEQ ID NO: 238559 - DNA, 709 bp, Homo Sapiens
tttagctgctgtcaacagaagagtgcctttgccgctgtcgtcaggcgacgaggctctcagtcacatgcatgctccagcggcaatggagatggattcagagccatgaacggacttgttgtaccgccgatgtaacgaagaactgctttcttatggcacaatactacttactctgatggaccaataatgaagatagcactaggagctcttttgggggtgtagtggtgcccccacatgaacatgatggacacccttgggtctgcaaggagccagcatcttacttggtcccacgtcctcctatagctctgatggtggctacgcaaactgaccctcttgggacaaggacaaaagatgtcattgacgtagtcagtgctaagagcagaaatgcaattctttgttatgaacattatgaaaaccaccttcctatgtttgtaaaatatttaagaaaaaattggcaaacaattaatgcttaatattttggatactatttgtttttctttgtaggaaaaaaaagttgaaagtttctattttctatgaagcctttcagataccaatttagtttatgcagaaaaaaattgaacaaaacagggtaccagcacggaagactttcttaaaacgcaacctgaattgaatgatgaaatgttgtatgtgtgtttgcttatagcttggtctctttaaaggtagcacaaaaaaaaaaaaaaaaaaaaaaata

SEQ ID NO: 238560 - DNA, 486 bp, Homo Sapiens
ctcagcctcccaaagtgttgggattacaggcatgagccactgcacccggcccatgttgtggtttatatcagtagttcctttgtaaatagtgaacagtattccatggtatgaatagagcacagtttttttttttatccattcaccagttagaagacattgggctgtttccaagtttgggtgattacaaaaaacagctactgtaaacattctcatacaagattttatgagatcacatgttttcatttctcttgggtaaacagctaggattggaatggatgggttatatagtaagtgtatatttaatctaagaaactgccatggctgggcacagtggctcacgcctgtaatcccagtactttgggaagccaaggaaggaggatgactagagcctctgaggtgaagaccagcctgggcaaagtggttaagactcaaccgcaaaaaaagaaaaacagaaaacctgaaaacaacccaaaaaaaaaaaaaaaa

SEQ ID NO: 238561 - DNA, 465 bp, Homo Sapiens
gctttacatttccacttgaatgtctagtaggcatctcttgaccaaaaacagcttttgattcctgttctccaacctgttcctctcctagttttctccatctcagaaatgttacttcctctgcaaagtctttccctgacttatctaaaataataacctcctctgtttgctgtgggaatttgtatagaatggtgggaaaatttcaagtttcatatttggattagctctgacatttatttatctgaacactggtaattgcctcagtaaagacactgataataagtaccttttagagttattttaatctttaatgctttaatgtgtaggaagagtatagtgtcctgttttgcacagaaaggcattctgtaaataataagttgccttaattttcctgtaatgttcattatattgttgtgggaaggtatttactcctattattaaaaataaaaatgtgtaaaatctcgtgcc

SEQ ID NO: 238562 - DNA, 496 bp, Homo Sapiens
aaggaaggctatgcagaaggcaagattccaccggatgctacattgatttttgagattgaactttatgctgtgaccaaaggaccacggagcattgagacatttaaacaaatagacatggacaatgacaggcagctctctaaagccgagataaacctctacttgcaaagggaatttgaaaaagatgagaagccacgtgacaagtcatatcaggatgcagttttagaagatatttttaagaagaatgaccatgatggtgatggcttcatttctcccaaggaatacaatgtataccaacacgatgaactatagcatatttgtatttctactttttttttttagctatttactgtactttatgtataaaacaaagtcacttttctccaagttgtatttgctatttttcccctatgagaagatattttgatctccccaatacattgattttggtataataaatgtgaggctgttttgcaaacttaaaaaaaaaaaaaaaaaa

SEQ ID NO: 238563 - DNA, 788 bp, Homo Sapiens
  misc_feature (110)..(110): n is a, c, g, or t
tttgcgagtctcgtggatcacgtctcaacttgcgtttagtgtgacagtacagagcagtgcttcctgagtcgtgtcaggaattggattccttggtaactgccattgaaatntctccatctggatcctgtccttatcctggccattcctgaagcgattggcttcgtcatggtaccctttgaatataggggtgaacagcataaaacctgtatgctcaatgccacatcaaaattcatggagttctaccaagatgtaaaggactggtggctcttcgggttctatttctgtatgcccttggtgtgcactgcgatcttctacaccctcatgacttgtgagatgttgaacagaaggaatggcagcttgagaattgccctcagtgaacatcttaagcagcgtcgagaagtggcaaaaacagttttctgcttggttgtaatttttgctctttgctggttccctcttcatttaagccgtatattgaagaaaactgtgtataacgagatggacaagaaccgatgtgaattacttagtttcttactgctcatggattacatcggtattaacttggcaaccatgaattcatgtataaaccccatagctctgtattttgtgagcaagaaatttaaaaattgtttccagtcatgcctctgctgctgctgttaccagtccaaaagtctgatgacctcggtccccatgaacggaacaagcatccagtggaagaaccacgatcaaaacaaccacaacacagaccggagcagccataaggacagcatgaactgactcgattagagccg

SEQ ID NO: 238564 - DNA, 779 bp, Homo Sapiens
  misc_feature (57)..(57): n is a, c, g, or t
  misc_feature (148)..(148): n is a, c, g, or t
cgtggttctccgtcaggggttctggacagtagcttgacgcttccttcaccaacttgntgttatcgccgtggagaggcacatgtcaatcatgaggatgcggtcccatagcaacctgacaaaaaagagggtgacactgctcattttgctngtctgggccatcgccatttttatgggggcggtccccacactgggctggaattgcctctgcaacatctctgcctgctcttccctggcccccatttacagcaggagttaccttgttttctggacagtgtccaacctcatggccttcctcatcatggttgtggtgtacctgcggatctacgtgtacgtcaagaggaaaaccaacgtcttgtctccgcatacaagtgggtccatcagccgccggaggacacccatgaagctaatgaagacggtgatgactgtcttaggggcgtttgtggtatgctggaccccgggcctggtggttctgctcctcgacggcctgaactgcaggcagtgtggcgtgcagcatgtgaaaaggtggttcctgctgctggcgctgctcaactccgtcgtgaaccccatcatctactcctacaaggacgaggacatgtatggcaccatgaagaagatgatctgctgcttctctcaggagaacccagagaggcgtccctctcgcatcccctccacagtcctcagcaggagtgacacaggcagccagtacatagaggatagtttagccaaggtgcagtctgcaaaaaagcactctaactcggtctgggcccaagctccccaaa

SEQ ID NO: 238565 - DNA, 805 bp, Homo Sapiens
  misc_feature (63)..(63): n is a, c, g, or t
ttcatgttttggctcactgctgccttctcacactcttgcaatatgatgtcacctatttctcanttccatgcttacagagaaggcttacttagtcaaaaacaagccacctcaacgcctaacatggttgactgtgtctacagttttccaaagggatgaaacaccttgctcgtcaccggaaaaggtggcaatgctggatggttctcgaaaggacaaggctctgcccaactcaggtgatgaaacacttatgcgaagaacatccacaattgggaaaaagtcagtgcagaccatttccaacgaacagagagcctcaaaggtcctagggattgtgtttttcctctttttgcttatgtggtgtcccttctttattacaaatataactttagttttatgtgattcctgtaaccaaactactctccaaatgctcctggagatatttgtgtggataggctatgtttcctcaggagtgaatcctttggtctacaccctcttcaataagacatttcgggatgcatttggccgatatatcacctgcaattaccgggccacaaagtcagtaaaaactctcagaaaacgctccagtaagatctacttccggaatccaatggcagagaactctaagtttttcaagaaacatggaattcgaaatgggattaaccctgccatgtaccagagtccaatgaggctccgaagttcaaccattcagtcttcatcaatcattctactagatacgcttctcctcactgaaaatgaaggtgacaaaactgaagagcaagttagttagttagctcagttgaggccttacccc

SEQ ID NO: 238566 - DNA, 784 bp, Homo Sapiens
atgtacaggaagacacttttactgtgcgagtgtacacagcctcgacgttatggatctgctgggaggtgcagaatatcatgatatcacagtccagatttcactgacagagggtgacgtacatgcgtggcaccgtgaagcttgatccgcaccctgaagcaagatatcaaatcgatctggtgcgtcgtcatctgtggcattctgcaaagtccttgaggcaccaaagtcaggaagacgtcgatgtcattgagtgctccttgcagttcccagatgatgactactcctggtgggacctcttcatgaagatctgcgtcttcatctttgccttcgtgatccctgtcctcatcatcatcgtctgctacaccctgatgatcctgcgtctcaagagcgtccggctcctttctggctcccgagagaaagatcgcaacctgcgtaggatcaccagactggtcctggtggtggtggcagtcttcgtcgtctgctggactcccattcacatattcatcctggtggaggctctggggagcacctcccacagcacagctgctctctccagctattacttctgcatcgccttaggctataccaacagtagccgaaatcccattttttacgcctttctggatgaagacttcaagcggtgtttccgggacttctgctttccactgaagatgaggatggagcggcagagcactagcagagtccgaaatacagttcaggatcctgcttacctgagggacatcgatgggatgatgaaccagtagactcggttaaggccctacccgcc

SEQ ID NO: 238567 - DNA, 574 bp, Homo Sapiens
ttttttttcaggagataaaacatagggaaaggttttcatgtgaattctttgtatcactttgaagtacatatatttaaagggaagatggatacaatttgtttttattatataaatctaggtaaggtgaaatgcttttgtcaacaaaaatacagtgtagtgaattttatatttgtcacttgattaggtaaactgaaaactaacaatagaaatattattttactgcattgaaataccatgaactttcagacttgttagttctacaagaagttgtgctaccttaattttgtgtttccagaaataaaaattaaccttagttatgctgtcatttttaactaataaaaaaagtataattcataaaacttttggctttataagataattataaaattatatatttttttctgtttttgtggggttgggaaaacattttcttatttctattcactcttcaaatgcaggtctcataatatgtgtcaatgatataagatgatggaagactttgtaataaaaacatatgtcattatcttcaatttgttcaataaataatttaatgtgaaaaaaaaaaaaaaaaaaa

SEQ ID NO: 238568 - DNA, 1000 bp, Homo Sapiens
ggccttcacaaaattctttcaagaacctaaatcaggttctctcagatgtgaacactgtcaacctaatgactgtcaagaggttaaatgatacacactaaaaaacaaaaagcacgcttttctcataacttatgcattctgatatagacaaatgacaacagaaacattttcatatacttcattacttttataactggaatgaacaatttacagatagagtgaggttctagaaatcagaagtcaatgctaaacctaagattactatattaatataatggcatggtatgaagtcatgatttgctaatatcagattaataccttgtgactcaatatatacatattaacatttatctaaaacatacttatttggttttattcttctgccagtctccaaaccccattacagtggctaaagcagcaaaatcttttaagacactaattgatggtggatttagataagagggagcagtaaaatacaagaaaaaacactgattagaaggaatacaagttggtaattgctaatataaagaggaggaaaatattcagggcctgaataagacaggaaaacaatttaaaaagaagttaaaaataaaaaatcatctgaatccagcttatactaatcaccctaaaattcaccaagtattttactatttatcttaatcaagctaaaaataaattggccaaattagattactgagaaagatcaaccacttaacacacgtgttacacactcttgatgtgtcaaactgcaaatttatatatatccaactcagatttctcagattcagcagttctctaaagggctgctttcatacactagtaggtactaataattcagatttaagaagtaaaaaagtactcttttttcactgtaatagctagaaaatcaaataacatatacagttgtcccacagcatctgaagggcattgctttcaagacctctgtggcactaaaatccgaggacactgaagtcccttatataaaatggtatagtatttgcat

SEQ ID NO: 238569 - DNA, 1000 bp, Homo Sapiens
gctggatatattagcttgatttaatcatcccacattgtatacatataccaaaatattacattgtactctacaaatatatacaattatgatttggcaattaaaactaatattaataataaaaagtagaggtggatgccatctgtgactggacaattgtaatcatcaaatgcaatccagttgttcggcaggctaatgtttagaatttctattccagaagtactgccgaaagttaacatcttctttcttaaatattagtgctcgaacttcatcaggatctccgttaaatatagctgcaccatgatggcaatacattccagaagtggagaatgtaggatttatttccgtggcaatttagaaagatgcggagattcatcttctacctcctccaaacaacaatacacactcgactcattcgatcttttaaaacactaaattccagctatgtgataaaagtcacagttggaagagcacaagtagtttttcctcctcttctgtacaacacttacaaacattctctgaacagcacagctgggtttttttttttttaaagttaataagtactactggaaaaacaagtttaaaattatgactacataatttgtaacttcctaaatataacgaaattctattatttctgttggattactgcaatacttaagaagaaatttcacaccaacatgtcaataactaaaactgagtccaagctcatttaaaaatatttttcctctaccaaaatagtcttattgctctatctctgaaatttacttgcacaaaacaatcattgtttttggtgacacaacaccacacaatatagaatgaaatgagaaacaactgctgtgacagagatgatcacagcgatacccactcttggcctgcaaggtcatatagttaccagtagctgttttgcttataattgaaaataaaaaataaaatctcactattctgtttccacttctaatttgtcttcatttcttcatcactggtttaatgcagatactat

SEQ ID NO: 238570 - DNA, 527 bp, Homo Sapiens
gattgttactattaatagccagagtcagcagaaaaatcccttcccccaacgaaatgcatttccgcaagcataggaagctctgtttgttcagtgctgactccggcacctcacggagcctgggatacagcaggcaccaagacacaccttgtttggtgggaacacttctagtattctcacttcaaactatctcagatttaccatttctatatcctaaggcatgttcccattctctaacgcaagggttccttctttcccagctggcctccaaccctacaaaagcactgcagggcatcactcagccttctgtgccttagtcacgctgttcttctcaccgttccacaaagcctccctcaagcccagcctcacctgaagaccgaagggcacgggcctctgaaaatgtcagccagggaacctgttctcttgtgtctaacaccaaatgcctttcagaataggactaaagcagtggacttcttcctagaaaatacgcagcaattcttgcaaatagtagacaagagattctcattcat

SEQ ID NO: 238571 - DNA, 783 bp, Homo Sapiens
tttttttttttttttttttttttttttttgagacaaatctgcccttttaacagctggttctgattcaggtgatcccaggaacttactgtcgttgagtcactgtggtctcccaacttgttccttctttttgtatcaggaaggtgacttctcaataccaggatagggacaacaaatttcagaatgtagagagaatccctctttcggggagtcacagaacagtatgtatgatgggtgtgaaaggaaaagttaaaacgcaagctaagccactaagtggagaggaggtatgtgtcattctatcagcatttgaaaaatgggattcagggaggccttttgcaaaattgtgctttccaaggaaactaatacagggtggcatgttgcaagattcttgtcaaaggaaggggatccaagtacagatgttgcaacactgtgctgccaaaggaagtggaagcaaaggaagtggcttcttagtctatcagatctggaacaaagcttagagattatcttgaccaatcttctcactggatagaaggggaaactaaggttcagagaagggaaggcttgtgcccaggggcagccagggagttactgatgagttcaaattgcaatccaggcttcctatccaccgcctacctgctgccctttcctcttctccctgaatatctatcccctcactgttttactctgggtccctagcccagcctccacatccccaccctctggacagtgcccaaggtcaaaggatgagcctaaatctgtgtgccgggatctaaacccaccagatgc

SEQ ID NO: 238572 - DNA, 520 bp, Homo Sapiens
tgaaaagcaaatgatgtaactcaactcattattttctgctgtttcttcattcttattcacttgtgaaagcttgtgatcatttgttgctgcatcagaggtatgagagattcttcttcattagatgggcattatttatgatcttttctatggatgagtaagaatattaaaatgtaagatgcatggtgaaaatctaagtggagaggttctttgtggttaacttatactattgagtgatgcacaaggtaggtgttaagagtaatattcttttgcattatgagaaaactagtatattattcatatattttactaattgtactttttttattatactttaagttttagggtacatgtgcacaatgtgcaggttagttacatatgtatacatgtgccatgctggtgcgctgcacccactaactcgtcatctagcattaggtatatctcccaatgctatccgtcccccctccccccaattgtacttttatataataaaatgcagtacattttaaaaaattttaaaaaa

SEQ ID NO: 238573 - DNA, 567 bp, Homo Sapiens
tttgctatttaccgagcatctttatgtgccagacaccatgcaaactgctaagaatacaaaatacagagcctctgtcctgggggaaggtagtcttcatttgcaatcaggaaaacgaacgtaaaggcacaggtataaaaggacctagtgtgttttaaaatagcaagaaactaagagtgtctgaagcttaaagtgagtggtgattaggaagaaatggaagcttcttcagcctgacaaaagccatctaggaaaaacccacagctaacatcatacttaatggtgaaagactaaaagcttttctcctaagatcagaaacaaaacaaagatgtctgcttttgtacttctattcaaccttttactggaggttctagccagggtaatggggcaggaaaaaaaaaaagtaaaggcatctagattgaaaagacagaagtaaaactctctctattcatggatgacataatcctattataaaaaatctcaaagaatctgcaaaaaaactactagaattaataaatgaatttagtaaagttgtgggatacaaaatcacaacacaaaagttggttgtttttg

SEQ ID NO: 238574 - DNA, 749 bp, Homo Sapiens
  misc_feature (25)..(25): n is a, c, g, or t
  misc_feature (71)..(71): n is a, c, g, or t
actgaggttgctgccaaaatggaanctgaattcttaaaagcaggaacgtgcctatgtgaaccattagaaancccaaaataaatgggaaaaattcagacttgaagagctgaatcatgtgacaacaaagtactgatcttaattcagaaaggctacttggagaaggtgtatcttaaggggtaaaaaacctgtgggttaccacatattaacagggaataatatcaacagaggcacccataagcaagcaagacacaactgagacagatgtaccaggtgaaaaaaatcttcagtatggatacacatgggtattctgaaggctacaatgaatggtttagtctttgacataaggaggatgaacatattatttatactgtgtaatctaatctggcttctatggggaaagcaacatgtacataagtgaattttctacatgaagtgggctacttctgattttaatcaaagctataaaatagattgtatatttcactagcttcttaaagtaactcttccattttcatttatctctaaaaacagttaacttcctgtgctctaggaaatgcaccaataccaaaggtcaatgtggaaatatgggcatgtttgcccctatgctgtgtggtctctagatttctatatttgctttgcttttgtctgctctagtaatctccctccttttgatctgtggcctgggaaaatgtggggtctttgtatttcaaataaaagtaaaatagttttttgagtggttcactcaagaa

SEQ ID NO: 238575 - DNA, 498 bp, Homo Sapiens
ttttcagtagagacgggggtttccccatgttggttaggctcgtctagaacctctgacctcaggtgatccacccgcctcggcctcccaaagtgctgggattacaggcgtgagccacggcgcccagcctgtgcttattttcttaaaataatttttgtattaaaaacttcacattaaataagtgctaatgttttattgcatagtagggtgactagagttaacaataacctattgcatatattttgaaatagctagaagagaggattttgaaagttctcaacacaaagaaatgacacatatttgaggtgatggatatgctaattaccctggttcggttattacgcaatgtatacatgtatcaaaacatcacactgtaccacataaatatgtatatttattatttgtcaattaaaagcaaaataaaacaaaaaaccttcatctaatactttggatcattgtgaaaaaataaatttccgtaagtataaagaaaaaaaaaaaaaa

SEQ ID NO: 238576 - DNA, 512 bp, Homo Sapiens
  misc_feature (498)..(498): n is a, c, g, or t
tttttttttttttttataatttcattatacagtgtttaattttagggtttggcactttcacgtataacttttatacaattatcatcatatacaacttacgattattttaaatgactagagtttagtttttgatctgggttagcgttcatagtgcaaagttctctcgttccactcagttaaccccattttttggagggctctatgtcattttattttacttacgaatctttaattttaacctttattatagattaaagggtacacatacaggtttgttacatgggtagattttggaaggctgaggcttgctgtcccaatgacctcatcactcaaacagtaagcatggtacccaacaggtggtttttcagcccaggtgcccctcctgtctcacctgtctagtgatctccagtgcctctggttcatgtgaattcaatgtgtagctgccactttccaatgggaacatgcagtatgtagttttctgttcttgcattaggttgncttaggataatagc

SEQ ID NO: 238577 - DNA, 624 bp, Homo Sapiens
  misc_feature (567)..(567): n is a, c, g, or t
  misc_feature (605)..(605): n is a, c, g, or t
  misc_feature (613)..(613): n is a, c, g, or t
  misc_feature (624)..(624): n is a, c, g, or t
tttttttttttttttcatttttataaaaatgtgttttattgttttaaaacaagtctataaaagtagaaatcacatacaaaaatacagattactctgacatgttggcaaaatagcttatggctggacttgagtttggaagttctgtatgtttgagggcatccgatgtcagagtccaaccggatcctaaccccagctcttgtcactaatctgtaaacaataatttcaagtagtatttagcactttttaactattaagaaattgaagcatcatcatttcctgtgcaacccaactttaaaatcttccttaggtctaagcagataaaggcacttcatagtatgtttctaacattaacaatttttgatttaaaaaaaaaaagttaatataaatgactggtgttagctttttttgttgttacattttgaacatacgaacaagtcatcaatttaaactagtttttgtgatttttaagaagtagaatttggctgggcgcagttgctcatgcctgtaatcccagcactttgggaggccaagacgggcggatcatgaggtcaggagattgagaccatnccggctaacatggtgaaaccccgcctcatgccgaattnctgggccncgagggccaan

SEQ ID NO: 238578 - DNA, 557 bp, Homo Sapiens
aatgttcctccctccaactgtccctggagccagaacactcacagagacacccctgagagggtggccacagcccaagatgaagtcatcaagacagaaaagcaaaaccgagaaaaacgacgggcacctggaaccagtcacggcttgggaggtgcaggtgccccgtgttaggcgcctttgtcggggacttgcaaggcctcacctgtttggccatgattgatgacgtgactgcttccattttgcagatgaggaaactaaggctcagagaggccacgccacccttgagccacccatggacccctctccatctcctgcctgcgcctttaagtccctgatttattctttccattcattccatctgggaggaacccccccaactcctgccagcttcccctagctggggtctctggtactcttcacacctgcaggggcgtctacactgttcgtctacctggtggcagggtctgagcgggaggaggagggaaagagtgtgttctgagctggacccagcctcttgttcgagaataaaaactcttcttctcttgcaaaaaaaaaaaaaa

SEQ ID NO: 238579 - DNA, 545 bp, Homo Sapiens
  misc_feature (526)..(526): n is a, c, g, or t
tctgtttggttgaaagtttgcctttgatccagattctttcggatgtcagggatattcacattgacatgtctttttagtgttccaggagattttagtttgaatagtacaattttttcttcttacaacaaaacttagaacggcttctaacttatttcttcatggccaagaaactaccctaacttatctcgataaatatttagttctgtcttatttctaatgtgtaaaacaggttttaaaaataatatatagattttgcatttataaaaaaagatttaatttatagaaccaaacttgaacatatgtttaatttagcctaatcagaaggttacagaaaaagttgctgtaaagatagaataaaagtattgtactggtctgtttttactgaagttccagaatgtgaggttattagagtcttggcttattgtgtcatgttttcctgaatgcttcctttgaagatgagcacacaccaaagcatcctttgatattatgtatggattaaattaacactgctttccaaatgggtccncatagaaaaaaaaaaaaaa

SEQ ID NO: 238580 - DNA, 546 bp, Homo Sapiens
ggccgctgcaggagctgtgccgccagcgcatcgtggccaccgtgggccgcgagaacctggctcgcatccccctcaaccccgtcctccgcgactacctgagctccttccccttccagatttgaccggcagcgcccgccgtgcacgcagcattaactgggatgccgtgttattttgttattacttgcctggaaccatgtgggtaccctccccggcctgggttggagggagcggatgggtgtaggggcgaggcgcctcccgccctcggctggagacgaggccgcagaccccttctcacctcttgagggggtcctccccctcctggtgctccctctgggtccccctggttgttgtagcagcttaactgtatctggagccaggacctgaactcgcacctcctacctcttcatgtttacatatacccagtatctttgcacaaaccaggggttgggggagggtctctggctttatttttctgctgtgcagaatcctattttatattttttaaagtcagtttaggtaataaactttattatgaaagtttttttt

SEQ ID NO: 238581 - DNA, 748 bp, Homo Sapiens
tttttttttttttttagaaccaaagatttttttttttaattataattttacagctaaataatggggactaatttcctacagagattaccatctttatacttttctgcatttttcagttttttgttattttataaaaacactcaaagtttttgaccttcaaaaattagaatattctggatcatggtaaacgctgaccaccaaacacatctggtacaaatatcaaagcaggcactggcctggtggttaactggactcagtatcatgtttacgtagttaactatgagcacaaatgaactgttcatcactcatatcacttcctttctatatatacaacgtataattatcctatgaataaccagtactatgacgttaagccttagggttttttgtacttattaatagtggggtacagatggttttttttagtgtactgtacattaattattaattatctctggtctctgaaatcctgtcataaaccttcccccttccccttatataacaatgcgtatgaagcatgatttgtctgcactgactacaaataagctgtttggcagaacaagtctgttaacgtggagaaggaaagaaattacatactgttttttaaagtaaccccagctggctaatttagaaagcaatctggtaaacagtcccaatggaacatcaatcagattctttaaactggtgatgtggtttacaatgcctgttctcttgtgtgctactatgagatctcctcttccgcttgtga

SEQ ID NO: 238582 - DNA, 578 bp, Homo Sapiens
  misc_feature (70)..(70): n is a, c, g, or t
ccagatgggttgcataagaatcaggtccttaaatacctccccaatctgatgaaacgatagaataaagtancatttcccagaatggaggaatacattattttatcgtatatttttgtccaagcgatgagctgacggtggtattgcttctctgcatgttatcagtgtgtacatctggtgcttttcatgtgtcatttgtgagccacaaatgcaaagttgccatttgaattcagtcaggctacagggtggtgtcagtcaaggtctttcaggtgggggagaaattggttagggctcccactgccaaatgcaagcagatagcataacctgactgttatgtgccctcaggcagcatgcttagggacaactctgtggcctgggggacatctgtgtcacagtataggattgccattcaggtgttttgtacctatttctttcctgacgttgtcccctttttttgtactgatccaactgggagaacctcagccaatgctggaagtatgattgaagtacctctcttttgtgactcttgtacagcttaatgtgcaataaaggaaaagttatatctgtaaaaaaaaaaaaaa

SEQ ID NO: 238583 - DNA, 655 bp, Homo Sapiens
  misc_feature (1)..(1): n is a, c, g, or t
  misc_feature (3)..(3): n is a, c, g, or t
  misc_feature (6)..(6): n is a, c, g, or t
ncnccnctttgaattcaaaatggaaaaacccattcccctggaattagactgcttcattgcaaaagaatgatgttgtttctttgtatgtccttgcttcttttttcattgatgtaaatttttttaacttaatatgaaaactctccaagtcttgatcatcagccaggattttgccacagcaatttcattctcttatcggaacttgtatgtgtcaaagtatacttcagagtgcaaacattaagcaagtaatatattttacctacagatacttatgaagacattctttcgctatcgtgagtaaaagtatataaagctgtttctaactgaaaatgcttgaaataagcctgtaatagaaatattttttcattttttaaaaaagggcctaaattgtttatattgtagtttgtaactcacaaagtaatatttgatattgtatttttattactgtatcgttgtcgttatgtattgtgtaatactcaggtttgaaggctttctgaattctgataaatgttcagctgatgctccacgtggaatttctcttgcaaactgcataagagtactcccgagaatgagttatgacattgtggatcagactgtacctgatgttcagatgtttttctttcacaaataaacttatttaaattaaaaaaaaaaaaaa

SEQ ID NO: 238584 - DNA, 660 bp, Homo Sapiens
tgctggaccacctggtcggggaggagaccatggctgactacctgctgtacaccctcaacaaacaccagcgctttgggtacgtgcagcactacggcctgggcagtgcctgtgacaacgtagagcgcgtgctgaagagtgtggctgtgaagctggggaagacgcagaaggtgaaggtgctcacgggcacgggtaacgtgaacgttattcagcctaactatcctgcggcagcccgtgacttcctgcagactttccgccgtgggctgctgggttccgtgatgctggacctcgacgtcctgcggggccaccccccggctgagactttgccctgaacttgtccgggtagggagggccggaggcatgtggcctcccagacctcctgacctgggtggttgaggctcaagacagctcacccggtccagaagctccatgctggtcactagggtgctgtgctctctggcgccccacagcctggccagctccagggaccccagttgcagggcccaagcaggtgggagtggacaccaggcttcccagtggacgtccctgagcagctccgcatgcttggttctcccggagcttcctgctcaggcctcttgagaaatggatgctgtctcagaaggagttaaagctataacctgtaacctttaaaaaaaaaaaaaa

SEQ ID NO: 238585 - DNA, 697 bp, Homo Sapiens
tttttttttttttttcccccaaattaaatgatagcttttctatttggctaaaatcctagactagaaaacaagtgtttcaatagaaaataaaaactgaaataaaacaagttattcccaggggaaattcatatgaattttttcaaaaacaaagtataaacaatgttttcctaggtgacaaaactcaaatatgatggcaaccttgacagttgtttattgtgtgtatagtttttactaagagaataaagtaggtagaattttacttcagtgcccagttaatctgttcaattatttaatctcaaaatcaaggctggttggtaagctcatgttgttacagagaatctaataaaactaagcataacaacagtgggcacctcagacctactgaggcagagcacgcacatcacgacctccaacgctctcccttcctctgctcccagctgccagccaagacccgcacttcccttctgtctgcccggccagccctcggatcccacgaacatccaaacacaatgctggggatgaggtttcagacaagatcctacttctcttccagccaaccccatagagaagatcaggatttagaagcaagcaccctcctatccgagccctttccaggggtggggacacttgaccctcccgagtctcaaactaggggcatttaaaatgcaaagatagctgtacacagttgttcaaaaat

SEQ ID NO: 238586 - DNA, 522 bp, Homo Sapiens
  misc_feature (42)..(42): n is a, c, g, or t
  misc_feature (505)..(505): n is a, c, g, or t
ggaggggggtggggctacttcctctgtaacatgtttttaaanctatgattatggtttttggttgttttttgttttgtttgtttccttttagtctgtttttaatatccttccccttaactcttaaggaaagtcttctttcctacagggctgtgaattaaggaatgggtagcgtttacatttaagtacaccaatgtctgcccaatttcctaatgtatacatttgttttattttaaattattttttgttcttaaaaatactagaagaaaacatagatgtttctagtgcctttgaacttatactgtagtctgactaatttaatgaataacttcagtagcattactataatactgtatgctggccaaaattacaaattacagtttgttgcatcagtttcaaaagccatgctttcattgtattttatgtataaattgtatttgttcaagttgtatatattggtattgtatgtatacatgcagcatggttaaataagaataaaaatcttttncctaaaaaaaaaaaaaa

SEQ ID NO: 238587 - DNA, 470 bp, Homo Sapiens
cagcaggtagctgaatgagggatctagcatctcactgtaatcacgtgcaggaaaaaaaggaattatggaggagctaggaagagggttggttcgacaggcagcaggtgtgtctcattgggtgcagtgatccaatccataaagcctcagctccctggtgtcatacaggaggcctgaccgtcagtttcctgaggatgatctacaaagccagttcagctggctcttcagcactgtattaaaaatactcttagttcagcaaaggatccaaaccaagaggaaatccctgatttacctctcccctcctctcctcttttctcctctcttccatatgaggacacagttaagtgaaaaggcagtcatctggttttaacatcatatcaaggaaaggggcgctgaagatggaaaagaaatcagtcttgaattgctgataccacccattccccttccccaagtagtgactacatggagagaag

SEQ ID NO: 238588 - DNA, 727 bp, Homo Sapiens
tatggccaatattgtgttttagttttatgttaacatgataaagtcatgtgcactgtaggaccatctgtccctgtccacccttcacagctgcccagatgcagagggtcgcgcggctgtgtgtgaggagtgagcctccctgctgcccccaggggctcctccgggttgtctcaggattctctgcaatccaaatgtatccattctggctgaagcccagccagaatcccgagtggaagaaacgggggaaaattcatattttccttctgtttaaacttcaattccaaaggtgcacagatgtattcataaaggaagacattagatccagacattgtggccaccaggctctgtggacccatctcagtggagaattcgttttggacccgtggctccgtgcagctgtggactcgagtgccatccactggtgtgagtcttgcggggaggccacaggaaaacgttctgtgccaagtgccgcctcgctgtgtccggcatgggactgcgctggagggtccggcgtggaaggcagacctcctgtacctctatcgttcccatttgtggcatccaaaggcggaaggctcatggcttccccactagaggcggcgtcttgggctttcccattggattgtgaaaggcattaagactgtttggagatgttggctgtatttcctgtcacatcaggttgtatgatgacgaataaaaggtgctgtgacccgtgttttcaaaaaaaaaaaaa

SEQ ID NO: 238589 - DNA, 442 bp, Homo Sapiens
aactcctgggctcaagagatcttcctgcctcagcctcacagactgctgggattacaggcatgagccaccacacccagcctgggtgacagagcgagactgtctcaaaaaaaaaaaacaaaaatattcaactatgagctggggaaaaaagcttcagcggtcactgaaagtgcttacaggtacagctagtatggggatggaatatgccccattagccaggccaacagatctcatataggagaatctgttttatgtttgttggacagtgggtgagttatcgcagagttatgccttttttttctgtcactattttatgtcccttatcactgtgcctttaacctactgaaatgcagttgaggccgggtgcggtggctcacaccaagatggcgccactacactccagcctgggcaacagagggagactccatctcaaaaaaaaaaaaaa

SEQ ID NO: 238590 - DNA, 743 bp, Homo Sapiens
cacacctggccaagtttaatttgttcatggctgagaacagttagctcggaatacttacattgttttttgaataaggaattccttattctgagtgagtcacgaatgagagctgatagatgctttcttgaaaagggcaatacagtcatcccttggtatccatgggggattggttccaggaacccaacttgatatcagaatccatgggtgctcaagtcccattatagagaatgggttatatggtatttgcatataacctacatacatcctcctgtgtactttaaatcatctgaagatgattacttatacctaataaaatacctacacatcacttcatttgcatggattcaacatagtgcttggtgttcagtaaattcaagttttgcttttttggaactttgtggaatttttctttttctgaatatttttgattggcagttggttgaagccatggatgcagaacccatggatatggagggctgactgtacttacttacatatctatctatctttgagtaacaaactctttgggggaaaagagggaagtgtattgagcaagagaaggcaaaaaacattacataatattttgattctgttacgtgtgtctatagattgtttcattctaatcaagacctaagaaggtatgattctgtgactgatttagaattctggggtggaaatatcctggaaccatgttttttaataaattctgtctcttggaaagagttaacaacagccaaaaaaaa

SEQ ID NO: 238591 - DNA, 400 bp, Homo Sapiens
tacagattcagttccattatgatttcttcagcagagatcctacacacagcagagagtctcaggtggtggaggagatacaaagatatgcaaaacaatcttcaaggatcttacacataagggggaatacaaagccataaaatacttgcaaaccacaagttatagagtttccaaagagaaagagatatcttccagccaaggtctaaaggaaaaccttcagagagaagctggcatttcagatgggccctgaagaactaaaatgaatttcacaagtaggggaacagtaaaatgagggggctgagatctcaacttcgcccatgctcctgtttccatctttgaaatctcttttagatatgacaacccatgcagtcaacttcccagctatgttgccagccccttaatt

SEQ ID NO: 238592 - DNA, 469 bp, Homo Sapiens
  misc_feature (455)..(455): n is a, c, g, or t
gcaattctgtgccatacaagggcacctctgttatttataatctgaaaaccctttctcctcagctcttgagaaggaccaaacaggacctttacctgctttttaagaactcagttttccactaacactgaagccttttgtttgttattttcaccgagtatgagattggagagggctttagggatcaaattttgtcctctttcagtgccctgcaacatcttaggatttattagaacttctatttagagactggttgtatagttattcaactttcttaactctgtaagtaaaataagaactttaaaaaaacaaaaacaaacaaaatcctgggccagactttcaaaggaacaaaaactcttcgtcatttggaagaaaatggctcacctacgacacattttaatccattaaaatcaaggaaaactagcacacttgagaaatatgtccctttacaaataaanatttaaaaaaaaaa

SEQ ID NO: 238593 - DNA, 433 bp, Homo Sapiens
  misc_feature (2)..(2): n is a, c, g, or t
  misc_feature (7)..(7): n is a, c, g, or t
  misc_feature (10)..(10): n is a, c, g, or t
  misc_feature (12)..(12): n is a, c, g, or t
  misc_feature (15)..(16): n is a, c, g, or t
  misc_feature (18)..(18): n is a, c, g, or t
  misc_feature (24)..(24): n is a, c, g, or t
  misc_feature (44)..(45): n is a, c, g, or t
tncattncantncanncngggtancagagtgagaccctgtctcnnccaaaaagaaagaggttaaggaggagaagactctagaccaaaagaagtaactgatattattgaaattatttgatagcaatcgcaattatttggataactattttcacatatgtaagcaaaccaaatagggtctcaaaagtttcagaccaaatgattcatgttctctacttcagcctaaaaaaaagttaaagaattctacaattacaaaaagaacagttattctatagttacaaaaagacttgaaactttcacctgaatgcatctctttgttacaaaaccattaaaggaggtagggggaacttcatgattcatcaatgctgcctgctttttttaaacccaggaaattcctttacaccccctcctggctctggccagcaagaactgtagg

SEQ ID NO: 238594 - DNA, 452 bp, Homo Sapiens
atgcactgtattatagtttcttcgtgtgcatgtattgcattgttgtcctttgaatatagtatttggagtcagcttaaatcaaggatttgtttgtatttaggtatgaaatcatgtgtgatataaaagattgattgtcccctaatttgtttttccaaatcattttttgaaacttaagtgttctgtttttatcaggactatttttaaaaatgcttcacattataaaattgacattagcctatattattaactaacaatgttagtataatagtcctaataagtgatttcaagtatattatttattggaatcctgtgggaataaactggcactgttgatattttataatatgtttagctttaattttttttcttatcaagtaagaaaactgtaattttaaaattggagagatgaataaaagataatatgcaaaaaaaaaaaaaaactctccagcgct

SEQ ID NO: 238595 - DNA, 464 bp, Homo Sapiens
tgggcatcagcaactggcctgtggtgatgcaaagctgctttgctctgtatctggctggactgatctgtctcacaagaagccatgaggccatagggagaagctccctctccccttcatcttctgctccaaaggtggtagcaagaggagtacccagttaggggttggagcccccatataacatcttcctgtcagaagactgatggatctttttcattccaaccatctccctttcccccgatgaatgcaataaaactctgtgacaccagcaaccattgctctttagaaatgggttttctgatcatatggctgatgtgttatgggcagtatggatgtcttcatttgttgcttctgtttttcatcttttttgttttattaataaaaatttatgtatttgctcctgttactataataatacagggaataaattattcaatccaaaaaaaaaaaaaaaactctccagcgct

SEQ ID NO: 238596 - DNA, 721 bp, Homo Sapiens
  misc_feature (23)..(23): n is a, c, g, or t
ttatttttttagtttctgaaatncaaatcaaaatacatttttgttacatgtcattttaacaagcttgacattcttttcaatacaggatgacacaaaataggtactttaaaacttccttttaagaaaaccatacattttatttcagagtaaacaacccatcaaaaacaaatacataggtatatgggctattgtttttcagtattttagagcacaccatccaacttaaaatgtggtccactaaaatatgtaaatatccctcctatcacaaaaataaattaaacctcatggttaaaaaaaacagaaacgtttggcgtaggcctgagtgagcttgaaaaacaagttaggatgttttaactgtatggaggaacattacagaatccacatagaaacatctggcagaacaactagcttgttgctattggagctgttctgtttcagagagggatataaggtacatgggagggtgctgaagactcacaacagccacagaattagttactccaaattaaccagaattcaatatagaagaatatacgacaacagtagaacaatctcaacagttattcgatgcctggaaaacaagctgtaagcttcgaacaagtaactcagcaggaacaagagtcaacatgtttataagactttgaaggtgagaaaacttcatcattcatagatgatgtcttgtgcacaaatacattagtttgtaggacactggggacaacaa

SEQ ID NO: 238597 - DNA, 611 bp, Homo Sapiens
  misc_feature (5)..(5): n is a, c, g, or t
  misc_feature (142)..(142): n is a, c, g, or t
  misc_feature (291)..(291): n is a, c, g, or t
atganctggtttatcacaaatctgatggatcagaattgtatactcaagagtacccagaagaaggacagtatgaaggccacgaagctgagttgacagaagaccaaatagaatatgtggaagagccagaggaggagcagctttncactgatgaagtgttagacatcgagatcaatgaacctttagatgaatttacaggaggtatggaaacattggaacttcaaaaggacatcaaagaagaatcagatgaagaagaagaagatgatgaagaatctggacgattacgtttcaaanctgaaaggaaagaaggaacaattattaggctctcagatgtaactagagagagaaggaacattccagaaactttgggtaacttttttgcctgtctcccatcctcctttactctcatttcaacttcctccatagtattgctgtaattaatcaaagtaggcaaagaaggttgactaggtaattgcggctgccgtccggagagtggccggactttggagtgagtgctgtttatggtactgtaaaactcattctttaaaatcattgctgtttatggatttaaaatgcttgaataaaatgtttaagataattaaaaaaaaaaaaaa

SEQ ID NO: 238598 - DNA, 608 bp, Homo Sapiens
ttctcccactgaactcccaggctcaagtgatcctcccagctcagccttcaattgtagctgggaatataggtgcgtgacaccatgccagctaatgttttaattactttactttctatagggatagggtctatgttgcccaggccagtcttgaactcctcgcctcaggtgatcctcacgccttggcctcccaaagtgttgagattacaggaatgagccattgtgcctagacctaaattagctaacttaatattggaaaattggagccttcagataagagatttgttaggggttcagtccttcctcacaaatatgcatttgggatgaaattaaaatggaagaggcctggttcctaccgctaagcattatgttaacatcccctccccaggaaggcattccttctacaaaaaacatatttactgggtgctgaactaaaaagtatagtgctaaacactttactttttagctcagagtctattcaattctataaggcaggatacgctggtattatcttcatgttacagatgagaagactaaggctcaagagaagttaattaacttgttcaaactcacgcactagaagtaccaaacagataagaactcatgtcagg

SEQ ID NO: 238599 - DNA, 774 bp, Homo Sapiens
tttttttttttttttaatgttaccattgagagtcattacggctaaagctttgccttcatcacatagctaaaaagaaggttgagctggaacttaggatactttaaagcatttcctgtttaggtattaggctgatagagaatcatgtgtaactggggtcagcattcctataattttttgagccaaagacagaatacacactttaccctgacaggtttcttccagaatttaggacagctgatgaaatgaaaagacacacacccaagccaagagtgcaaaaggatgtagtagcatgattccgccaaccaaatgcctcataccctcagacgtcccaaatccagtggtgagcaggtaaatttttaacaacaatctttctttgtgaggaaaaaagttcctgatttccataatgtaaatactttcactgactggtttgaagccatcaacacgtcaactaacaattggttcctgcatgtctataagctggctttagcacaccactgcaaacctacttattacttatattttcagatacattacagcacttatcaattctaacattgtgaaaaactgctgtgctttaggcatcttgtccaaacttgctccttcagctaaatttgactcatgtttaacatggaattgcacttcttgaataatatgttctttggactttgggccagtctggtaaaacataagacaacaataacatcattatggttatatacatttacaaataactcactaagtgctgttgtaaacattttacagagattaaagcct

SEQ ID NO: 238600 - DNA, 692 bp, Homo Sapiens
  misc_feature (9)..(9): n is a, c, g, or t
ctgctgagncagcctcccaaagtgctaggattacaggcgtgaaccactgcacctgaccagattttttacaaaatcttttataccatattgttattgttgtagtatcttttctgtgtttagatgtttgaataaacagacacttgccattgtgttacaattgcctacatgattcagaacagcaacatgctgtagcctaggagcaataggctatatacatgtcctacatgtgtagcaggctacactatctaggtttgtgtaagtacactctatgatgttcccacaacgatgaaataacctaattagacatttctcagagtgcatctccatcattaagtgaggtatgactgtacatgtgaagtcacagttcatgtctgattattcccactaatagaagagtacaaaggtacagtgaaaccaaaaaaaagagcagataacttaaaaaccataacttgtgcatatgttttcattttatacttgtgtccaaatgtttagatgagaactgatacaaattcacaggtttttaaaaatgctgcctgaataatcaaaactctttttacttttcttgccctactatagatagcatcagtaatgtttatacagagtagcaccatcggacaaactactttcccttctcccatcatagagtataaggctgtctgtattatggcttaaaacattagcaatgacttaat

SEQ ID NO: 238601 - DNA, 658 bp, Homo Sapiens
tttttttttttttttctattaccaggtttattgatgtgaggttcgccagtggacccagctgaccagcagtatttagtgaataaatgatagagcagtgactctcaaccaggggtgattttgccccctaggagacatttggcaatgtccgcagacatttgggttttacagctggggaggggagaagagtgtcactggcacttagtgtgtagaagccagggatgctgctcaacatcctacaatgcacaaacagcccatacaagagatgattatccagcccaacatgtttacagtgctagggctgagaaatcctacaccagaggaacaggaactaggaggcaaagagagtcaacagctatgagcatggagatgttttaggcaattaagggaaacaaaggaagagcatgctttgcttgcttgtttggaaaagggggtaatgagtagagagctctggattctgacaaacttgagaacagcatgtttatgaggagagaatgcagggcggcctgctcagctactgctgccatttggagagcaaagttggcttgtacttccactggactggtggcaaggaactctgcctctgcgatcaactcttggatgaggagtgtgccaaaagcagtgataaggatcaagtggtcctgcgactgggagctcaagg

SEQ ID NO: 238602 - DNA, 405 bp, Homo Sapiens
tttttttttttttttgagacagggtcttggcctgttgcccaggctggagaatgcagtggatgacacagcgagactccatcttaaaaaataaaatagaataaaataaaaataaatggccgggcatggtggcttgcacctgtaatcccagggcactttgggaggccaaagcaggcggatcacttgagaaatggaaaaaacaagtcacttacaaatgaggctgagacaaaggatcggcggaaagagccacagaacaccaaaaacagaagcagagcgtgacaaaataagcaaaaccttacagttttgtagtttctgcttttatctaacacaatgacttcgctgtacttcatataccttttgaattatacctgcttatacatacctttacctacctactacttataccta

SEQ ID NO: 238603 - DNA, 508 bp, Homo Sapiens
atttaatacgtgttcaggtagaagtaggtacaatgacagaaaataaggtagaggaatgtgctagacaccacagatacgtaatgatggacaataaatgacatgatgtggagagttcacccacacatgcagacttcttatgttcacataaacatttatctgcatgcatcacccagtagagacaaactgcacttacactgtgaagtcaacgaggagataaagtaaaaatcaaatacttatggagagagtcagtctctccatttagtgggaaacccttcagaacacgcacacagcatctcccctcccttctgaataccatccatagcctgcagcagtagatggcaaatcacagcctgggccacccttcccagaatgtcaaaaacatggacatgcagaccacagaattcaccagatacccaagctgggtggtgcgaggctctgaaagacatgcttcaaataagagggactagaaaactccgcaagggagcaacagggatcagggattccagga

SEQ ID NO: 238604 - DNA, 619 bp, Homo Sapiens
  misc_feature (5)..(5): n is a, c, g, or t
  misc_feature (26)..(26): n is a, c, g, or t
  misc_feature (593)..(593): n is a, c, g, or t
gaacngcagctcaggcccgggctcgnacgcctccgaggtccgcgcctggctgcaggccaagggctttagctccgggaccgtggacgcgctgggtgtgctgaccggggcgcagcttttctcgctgcagaaggaggagctgcgggcggtgagccccgaggagggggcacgtgtgtacagccaggtcaccgtgcagcgctcgctgctggaggacaaagagaaagtgtcagagctggaggcagtgatggagaagcaaaagaagaaggtggaaggcgaggtggaaatggaggtcatttgacctgccaggcgcccttcgcaaagagtgacgaggccccgtgggagaacggactcctcagactctccccaatagcggaagtcgatcttctgaaggatggccaatctgctccggccctggtcttcccccatcccggtggacagacttaacgatccttgctgcagtccctccggagaggatctggactggctgggagtggggagggcgtggagacagtctacggaaagcgctagcagacccccgagagggtgcagtggagccctgagcattgtaatatgcggcccagcctataaacagcctnccgtgcttagcaaaacggcacgaggc

SEQ ID NO: 238605 - DNA, 788 bp, Homo Sapiens
  misc_feature (67)..(67): n is a, c, g, or t
aacccattattcacatggtcctagaataaaaagtcaatttatattgtgaataaatttatcaaaaaancatgtcatccaattcccacaaatgagacattttaaatacagaatacactctgttcatgaatataaaatccccaggtgaaagtcccttaaaacactattatggttatgtttcctagaataattttataactttttcagagaattcctttaaacttgttaaaataccttgttgctagtgctcagaacatctaggttcagtctttatttttaagacagtatctatcctaggcaaatgagagcttgtttttatgtatttaagagtttcctcttgtcatttcaatgtcaaattgatttgactcaatttcatgatttcatctcgctcaaggccatcaaccggtcagagccagagcccttcaaaggctgtatgtgagtatatgagggaaaactttccacataattttacatcatttctatctcatagcagttttagttttctcatagctatctcatagcagttttagttttctcaaattctatgctgtttttgtactactgcagctgaccaatccaaagccagtttacactcagcatgtgttattctactttaaaatataaccttagtgaaagcacccttcaaatcaacagcaatctcacagtgagtttcctctgggtagtcaggatttgtccagaactacatccttttcagatgttcagagttttgcttgccattagggaggcaagggaaggatgagcaataaatcaggtttctcgttcgtatctta

SEQ ID NO: 238606 - DNA, 502 bp, Homo Sapiens
tttttttttttttttattatcagcagaatatattcattctttagaatagatcagtggtggtgtattcatacaatggactattccacagagatgaaaaatatatatgcaaaaacataaattgcataaaccatattgagcaaaagacagacgccaatactctatttacataaagtgttacatacacagagatagattaatacatgtaaatgatacagatatgatagctaggtcagtccacggggatctgtggacttctgaagagtcgtgatccgtgtgacttctgaagagatgagggggcatgggaggctttagcggagcttccgctattctggcaaggtttcatttttgcccggggagctatcagccagcggagagatactgcagttgggacattttgccggtttcgtgggcgcgcactggtggaaccagcaggtgaggtcagccggcagctgcccccgaggagcccttcgggatctacagtcccgacgttcagccggcctgc

SEQ ID NO: 238607 - DNA, 467 bp, Homo Sapiens
aaatttatagatttgtgttgggctgcattcaaagctgttccatgggccaacagttggacaagtttgccctagatcatggggtctttgtgctctgagaatgggcgagtttgggatggactcagctttctgttggttggccctggatctggatctggtgctgccccctttctctggagcacacaaagggaacaagaaggcctggacttgggcaaggaagccatccacagggctccccagaagccagggccaccaggagctcactgctgtgcagaggcaactcggcttggttatttcttgcctgaggcagggaacagggaatgcagggaagccaggcagcagcaggaggctccaaacgctggtgtcagcaagccagaacccccacctgacttcactcctgtctgcccagctcacagtcgcctgtcactgggaggtccttggggcctggacctgcctgacctgtggcccca

SEQ ID NO: 238608 - DNA, 470 bp, Homo Sapiens
gcctgcaacctccgcctcccgggttcaagtgattctcttgcctcagcctggcgagtagctaggtttggccaaaatatgaactagaaaggcaggaacctggccaaaggtggggagcttgaatgttattaccttattcctgcttgacctttactgccaacgccaacacaaatggtcagaggtcccttatatgaaaatcttcatgatcttgtgggaaaaccctgatttttgtaaaggctgcaaaacaggctcaaaaataaataaataaataaaattacatttaaaagagccagttgcagtggctcacgaggttttttttttttaaataaaatgtttcacatatttattaccgaacctagccaaccaatgcgttcggtaacagagtcagagataaaaaatatattcccaataaaacatgtccaactctccagataggggtgacattttcagcttgatatggttgcgtgattgtg

SEQ ID NO: 238609 - DNA, 680 bp, Homo Sapiens
  misc_feature (95)..(95): n is a, c, g, or t
tttttttttttttttagttatttctgtttactgagaaaaatattgtaacaaacagtgtaatcaaaggaatatgactaatcagttcaaattttccncttgtttttaagactagggatactttctgtattggtaatttactaaaaccagtgaggtgagtgtatcacctgttgtttataagctttctacttgtttttaggaatttccagcttgtagatgaggcgtcacttaagaaatctctgcccttctgttcttcagatatccctgaaccaaacactttccactccccatctctagtatctctcatgggttcagaaaatttaataatgtctccttcactattgagttagcaacacttgtgtaagaaaccaaggtcaatattgatgttacatattcttttagtaaccatgttttagaagatatggttaattacacatcctctactcttttaataatagttatattagtaacatgtcttcaactgaaattaaaattgttggattatgcagtataggtgtaaactattttagacttaattttaaactttagtcaacttaaattaccaaagtttggtgaatatattttccagcactcaattttacttcagttgttttatgagttattggaagatgttctgaaatggtcagaggagaaattgaaaatttattcatcaagaaaataat

SEQ ID NO: 238610 - DNA, 497 bp, Homo Sapiens
  misc_feature (483)..(483): n is a, c, g, or t
cagttttggtgtcccgtgtagatccggattcccgaaaaaacacaataaatgaaataataaagcgaacaacatcaggaggagaatggccccagatactagttttcccagaaggtacttgtacataatcgttcctgtatgattacttttaaaccaggagccttcattccaggagttccagtgcagccagtcctcctcagatacccaaacgaggctgaaactggtgacctgggccatggcaagaatatacattcattcagctttgtatgcttactttctgccagctcttcacaaaggtagaagttgagatgtttctgttcttttgggaaggaagcagcaagcattgtttaaaaatatcttccttcttttgcattttttctcttcgaagatttaaaagaagaattacacaaagaactagaactgcacatttgttaagattgtccttttaaaattcctctctgttgcaaggaaaaaataaaagttagntaatagtgtcaaaa

SEQ ID NO: 238611 - DNA, 587 bp, Homo Sapiens
tgctaagtgttactcagaatatagttacaaatatggtacttaaatatctagctgaaatttgtttgtcccatgagcttctcacatgagtctactgggcaattttatgtgagttttggtcaaaattggtaatctcttttatcttagttttgcataatttattgttgccattttatcaaatgagtaggaagtagtgaagtatttcaagaagattgctcagtggggtttgatacaagaactgcccagtagctgggcgacattcagagctctctctctgaggtatataagaagagccctgggagctcctcactgagcctcctgtaagtcaggacatagccttgcagtctgccactgaagcagcctcaccaaagcaaagattccctgctttggaagggtggtgggcaagataaagtcctccaaagtagttatagattattctttttctggagtaaaacttacctgctcagagttgttacacagctgtataaagtccttaatgcttttaattctcaggtggttttgagggaaggagaagagcctgtgattttccttctgtgtatctttttagtgcttagaaattacttgccaaa

SEQ ID NO: 238612 - DNA, 548 bp, Homo Sapiens
cctgctgttttccacctaccacgttgtctgatttcataaaagggctgtgggggtgggaagggcagtgggttcggtggtgtgggaaagaaagacgaatggcaggcttcttccccagattctgcccgggtccacacaccctggcccaccttctccatatccccctcttgcagcagaagccaggaagacttggacaagcaacaagcaacagtggctatcgtatttattcagtgtcttcgctgagccacagcctcagcacaatcaagagggactttcatgaaaggcaggaatgcagataaaacaaagatatcagaaatttgcacctatgtttctaggtacaagagaaggattatttccaacaatctttgcaaaaaaaaaaaaaagtgtcaggatatattcttgtggaagagaaaaagaaaaagaaatggagggtggggggaacaataaaaagttcttgaggcttttttaattcaaaattttatagaggggcaaaagtgacgtttaccagatagaatgctgatttttttaatatatttacaacagtatttgtg

SEQ ID NO: 238613 - DNA, 711 bp, Homo Sapiens
  misc_feature (35)..(35): n is a, c, g, or t
  misc_feature (122)..(122): n is a, c, g, or t
gtgtcagagcattctcaagtagcaggtgacaagcnccgaccctctttgccatccactacagctcaaaaaatctcagctctggaggggctgctcaagccccagacgccagggctacacacacncaccaggcgtgcacaggcagagagcactggactatggctcacagtctgggagggaaggccaaggatttcacatcctgatcccgaccatcctgggccttttcctgctggcacttctggggctggtggtgaaaagggccgttgaaaggaggaaagccctctccaggcgggcccgccgactggccgtgaggatgcgcgccctggagagctcccagaggccccgcgggtcgccgcgaccgcgctcccaaaacaacatctacagcgcctgcccgcggcgcgctcgtggagcggacgctgcaggcacaggggaggcccccgttcccggccccggagcgccgttgccccccgccccgctgcaggtgtttgaatctccctggctccatgccccatctctgaagaccagctgtgaatacgtgagcctctaccaccagcctgccgccatgatggaggacagtgattcagatgactacatcaatgttcctgcctgacaactccccagctatcccccaaccccaggctcggactgtggtgccaaggagtctcatctatctgctgatgtccaatacctgcttcatgtgttctcagaaaaaaa

SEQ ID NO: 238614 - DNA, 378 bp, Homo Sapiens
cttaacatcatttttgactgctttaacaaggactgttgcaccgtaactttcaatgttagcatgtaatgcttcaagtcattttttaacaactgctgcaccatgttccatagtttcagtatatcatggtttagccatttcccaaattgatagcagtttaagttttaactttaaaacagcttttttgctggtggtggttctctgatgagatgaaatttcggtgataggagcacagatctacgctaattatcgagattcggcatttatgatgaagttctcttttggttaagaaattgatatgtggaagcagccacccctcccctatggtagttctgactctagcagttagaagttgtgtgaccttggggaggacattgaatc

SEQ ID NO: 238615 - DNA, 521 bp, Homo Sapiens
ggttaatcagagttcataatcagttcagtctggtgtctgatgaagactacttaaatcctccagtaattgatagaatggatgtgcagctaacaaagcttacactttataggacagtgatccagccaggcatctaccatcctgatattcagctgttgcacccaattaacttggaatttcttgtaaatcggaatctagctgcatcttggtaccacaaggtgcctgttgtggaaattaaaggacatcttgattcaatgaatgttagtctaaatcaagaagatcttaatcttttatttaggatactaacagaaaatctctgtgagggtactgaagacttggataaagtgaaaccaagagtacaagagacaggtgaaattaaagagccccttgaaatctctatatcacaagatgtacatgattcaaaaaatactttaacaactggagtggaagaaattaggtctgtagacatcattaatatgctgctgaattttgaaattaaagaggttgtggttactttgatgaaa

SEQ ID NO: 238616 - DNA, 525 bp, Homo Sapiens
ctgagctccagagccagccaatcacttagctcctcatatcaagtctaactggctctggaaagctgaaagggctgcactggaacaacacagatgagatattctacacattaatctacttatctggaatcactttgcctctaaaggccagagaaaaatcacagcttccttgtcggaggggaaaaggacaggtgatctggggaaaacgcagctacacctggagcaaggtctcttcccggcttggcaatctcagctgtgccggcgctacgggacccgagccgtcccagaaaccaaagggcaggcacggcagcaaacgcctgagtgctgctgccttcggtgactatatgagaatggaaacttctaaggaagccaggttgttagaattgttaccccctttactcagagataacatagattatccaggctgagatggaaaacaagccctttattgaattttcaacacagactccctgcttctcatctccttaataaaatttcattaaaatccccttgaaaaaaaaaaaaaaa

SEQ ID NO: 238617 - DNA, 644 bp, Homo Sapiens
cttctatgtctacatgaagtgccatttagaaataatcaactcttaatcagcctgggatagtcagtactaaaagcaccttcatgagctgtgaaaaatttaatgcatttatttacatatttagttttaaattttagtatattgttagttgaggtatagtttccaaacaaagagccgtgaaatgtttagtaactgtctctgtacctctggatgaggacagctcagccgggaatggagggggactgggtgaggagaccagaatgtcagtgtggccacgcagcacacttttgttttgtcttctgtccttgagcactggcttgttcctggataaactaggcataataatacctatcctgctgtgtgggtggaagggttaaatgtgataatgatgtgtgtgagatgcctgcacagtgcctggaggtattgaagaattatttgctgccttttctttttctacctaccacttacccgctacccccgggtgctacatgttagaaaacactgtgtaaagtgtggatgcttctgaaaaatctccctgccagcagttagtgccaatagcgtgcagaaaataagatgcaatgatttggcttcttttctgtttggcaataagaagcttatttgcacatagccaaaaatctttcaatctg

SEQ ID NO: 238618 - DNA, 600 bp, Homo Sapiens
ggagagggtgggtgtcctgagagactcaactgggacatgggaggaggcgcagagggtccctgtcccttgcttgcttgctttcccgaaaagtccccacaagtgtgaaacagaaggaggtgcttgccaggcctcccatggccccctcctttctcggggtctcctcccacgccatggctgtgagtgtctaacataagggacgctgtttttgcaggttttgtggttgtgattcctttgaaccatatccagcccatcttacatcacagtgccatgcttgacttggtctccaatacatcggcacccattggcatttggagaacttgctccgtagttatttgacagtttttagttgtctgtgataatgtattctctatgtttccaatcgtcagtatgggaatctctcccccaacctttcaatttctgggtttgattttttgtatcatatttggtttttttgctttttaaagttgtgattcctttggttattagcccctcccagtggctgcttgtttatgcattatgtttgtgacttcttttgactgtcagtgttgagccagtcttgccaagaaacaatatcaagtatttcctattaatctacttctt

SEQ ID NO: 238619 - DNA, 495 bp, Homo Sapiens
ggcaccgacgcgcaactgccccagccgcgcggatggcacggaccgaccgccctgccacccccagcccgagacgccccgccgcgccgctcctgtagctgagagccgagcagctctcagccccagtccgtccgctccgtacctcgcccgcgtctccgccggcgtccaaaccaccgctcgcccgcttcgcccgggtaggtctgggctccgcggccagctcccgcctcacacccaccctcctgctcgccccgcccccggcaccgccagcaaacgccgattacgcacggcgcgtaaacgtcacttccggggcctttgactctggacgggaggaagtgcgagcggatccaaagggtcgagcggagtggggtaccgccctgacgcccaagagcaaatggaagagggcggcctccggggtaaaggtggggcgctggggagccccggagaaaccggcgtttcctagtctgtcgctcagtccctgcttccggcttccgacgcgca

SEQ ID NO: 238620 - DNA, 345 bp, Homo Sapiens
acctgtcattagccacagatagtttgaggagcaatgagctagcagaagccagctagttagttatatcctcactctgagagccggtaaggccgtcctgctgtcaagaaatagaagataacccttgatgcccagggcaacattcaccttcacattggcctttggggttggcttcaaaggctctcccctcatcccaggagacaagttctccatcaccttatttccctgtggcctctcaaagaagtgctggtctacctcttggtgattctggaatgcatttcatcaggttgggaagggcaggtaggagacccagtactgatttccttaagggtgcttccatttcacttt

SEQ ID NO: 238621 - DNA, 415 bp, Homo Sapiens
  misc_feature (21)..(21): n is a, c, g, or t
atctgaacgtccgacggtganctccaaaaagcctcaggcgcatgtcacccacagtaagcaattaaacatgtggtaggaacctgtgtggaccattgcttgaatgggcggccactgatccatcatgcgaagcctcatcttctctaccattcctttcatttctgtaccctttttttgtatccaaagtactgcctagaagaggatgagagatgaaagcctgactgtggaggtggatcattttccaaagtgtggggtagggaaggctgaatattcagatccctgttccctctggtgtgactaaggaaagactagacagcttgactttaggaatctcctagtacagcagctcccacttacccatggtttccctttctgtggtttcaactacctgtgtggtcaactgcagtccaaaaatatc

SEQ ID NO: 238622 - DNA, 582 bp, Homo Sapiens
atgaagctattctttaaatagttgcattcatgtctaaagtacatttggctttctaaaaagaaaaggtacattcttgcatctggtgaacattttcttgacattacagcaaatagctaatggtgatagcaccaattctcatagctcgtaaaccttatatttgttacacaatgtaataacaaagttataaatttataacaaaataatagtgttgaacatgtttcccttgaaagttctaacttacaaaataaagcccccaaagattagtctgaattaatgtatcattcaaagtgtagcaggattaatggctcagaattaagcaaattaattagaaacattgcataggacggagaacttccctgtatggaaaccaatctacagattgtttcttgtcctctaaaaagtaagttgagaggtactaatgatggcaaataatccatttatattttacaaaataaaacatttcactaatatatggctcatcctacctctgtggcaatacaaaatgccatttcaaattttttttaaaaagattgtgtgaatacttcgggtgagaataaaatataaaatactatctatataaag

SEQ ID NO: 238623 - DNA, 583 bp, Homo Sapiens
  misc_feature (3)..(3): n is a, c, g, or t
aanagcccaggtaagtgaaaaagccgctttcggtcaacgacttaagtctttacggctgtgagcgctatgggccgcggtagctttccgttaacttcagatccgattgtcgccccactgccaaagttaccttccaacatcgttactgttgcactttacgcagtcaagtgtccaactcctcagatgagcaagtggtcggccctaaaaagggcctttgggatcgaaacgtgcaaagctggagcggcggcctagcctccgaagccgtacagggtgcgcccctggcgcttgagcgcgtacaccacatccatggctgtgacggtcttgcgcttggcgtgctcggtgtaggtgactgcgtcccgaatcacattctccaggaacaccttcagcacaccgcgggtctcctcgtaaatgaggccagagatccgcttaacgccgccacgccgagctagacgccgaatggcaggcttggtgatgccctgaatgttgtctctcaagaccttgcggtggcgcttagcgccccctttgcctaagccttttccgccctttcctctgccggacatgaccgctggagcccgatagacagctt

SEQ ID NO: 238624 - DNA, 609 bp, Homo Sapiens
atgggaagacagaccacgaattttaaggttaccagttaattaaatggtaaatcacgaatgtgatctaaagcaatgtgcattgattaacatcgggtgagttaagatcagaccattgagcataattcgccgtaatcttcccagtcctgagattagccacctacccccagcatttgagttctatgctcttagaagtactggttaaaacaaagatatggaataatatgccggttacctacagctcagactgtccaagctctaaggttaaagtggtggatatttgtgcaaaatcgtgctgctcccccgtctcctttgtagtgctgtcagcttcagaactcctggaaaaggtgtggctgatctgaaggaactcagtacatgtccctgtagatctcctgcagtagcgggtgcagcgcagcatccgactccgtcttcttgatgatctgcaccagctgcgcatgctccgtcaccagctgccggaggtctgccattttttgaagaagttttgggaagagacagatatcgtacgggtggttgctctgcaaatgaagtctgagcacatgtacaataccctcctgcattttttcaatgtgtccgacgtgtagaaggccagga

SEQ ID NO: 238625 - DNA, 600 bp, Homo Sapiens
tacataatataaaacactgtaatgtgtatttaaaataaaccttgcaagtttgcaggtcgaccctctttggcccatggtctagtagatctagacgatctagaagtatctatagccgatcgctgcatctagatgttttcttcaatctaacgacgatcaaactgacagccaaatgagccaggtgaggcttgattgacgcaagaagatttttctagttgggaatgtggtcaatctggtgttcctctttctaaaccggaggggggccccaattgtaagccaaatttactgttacggcgatcaccgtctcaaattttctgccctttaaagaataaggtgaagctaggtgtagatgactcgaggggatctggcctcttatgctgatcacctcaaggtctaggaggatcttaattgtcggatttgcaaggcgcctcagcatgatatcataaggctcgtgacattctgaatcaaggcgactgactcaaacgaagaaacctgaaaggttttgaccaggttgattattaatatagtaacatttttttaattaaacaaaaattgtaaaatacacctgtacaattaacattcaagtttatagaaaaacactag

SEQ ID NO: 238626 - DNA, 583 bp, Homo Sapiens
  misc_feature (51)..(51): n is a, c, g, or t
tgcttggtcacttttttggcggaggagaatgcagttaaaaaggacatgtcnccggggattcgaatacacttctcaaagtgtactgctggccctctgtatccatgggttctgcatctgtagattcgatcaactcaactcctggctcaatactgatggaagtaatctgcttaacaatctcagaaggactgtgcaagtcaatgagtcgcttgtgaattctcatctggaaacgatcccacgtcttagaaccttcaccacaaggagtttttctcgtagtgattctcaaagtcttggtaggcattcgaactggtcctttcactttgagattcttttcttttgcgcctcttatcaagtcagcacacaccttttccaaggattttacgttgcggcttgttagggtgattcgaattcggtgaattgccacctccggctccacgggtgtttttccggtatcccttaaaagccatggctgttgcgcgcgggcttcctgaccgacttgttcctcggcgagagcgaacagcggtgagtcaggagcaggagcgtgcggaccaaaaatcctcagcccttacgaccgcgtcttcctcaa

SEQ ID NO: 238627 - DNA, 582 bp, Homo Sapiens
gaaaaatggcctgtgcttatactacaaggatctcatatgaatgcagtcctgattgttcgacacagcaagaaaattcactttcacagtcaacaagtcatcttactcagtagaacacaaagtaaatggtttataactccaatatttgcaaggaaaatacagtacaaattactaaaaaatactaaaatatagaattgtgttcaggcatctccactacatcaatcgcagcagtaacctgaaatttgaaacttttaataaaaagttcttaaatataaattatatggcaaatgtacagtacattgctttttttcagtctctttttccagtgttttgcagtagaacagggttcctaccatcacctcccttaggtttaaaaaacccaaaacacaagtctgctgtgagtccttcagcatcatgagtgtgagtgatctgagtctggaataccactgtctctgtagcttcggttactactgctttcactgtgattgtttttgtacagattcattccattaggaggaaatatggtgtgtattacaaactcctccttcgagatgggttcattgcttattggtaacatctgaaaag

SEQ ID NO: 238628 - DNA, 581 bp, Homo Sapiens
acagttttgaacgcaaatagaaaaggctcctaagaatgttctttataggccactgcttgctttcagtaaaaataacattttctcaaaacttttcaatctgatttttaatagcttgtactttttagctattggcaaagctttttttttttaattccttcttaagcatttgctcaagtgttaaactagcttagtttaccatagtaacaactttttgtctgtggtatacttcaaaaatcagtcaccctacgatgtagtgtgttcaaattaaacagatgtatacagttaaaataattagtgtagtctctataaacaatttctgttccaggatttatatgtagagctaacgtttacttcagaataaaacattgacaaacagggaaggaagagaatcagaactttcacagagctgtacttgaccatatcttatagacaaagcagaattacaatgcatgtaacaaaaacgttaaaagttttaaaagttgatagttacaaatatggtacgtaacaattttctactttatttcagtacaattttcaacatacagtctactatttctcaagatattgaagacttaaaacaa

SEQ ID NO: 238629 - DNA, 584 bp, Homo Sapiens
  misc_feature (28)..(28): n is a, c, g, or t
  misc_feature (34)..(34): n is a, c, g, or t
ttgaaaacacttattttactgtcttcancaacancaacaaacagataggcaggggaagtccagaggactcagaattgaagcagctctatacaataatgaaggtggtacaatgatgtgactgcaaagaaaatgactaaaacaaaactttacaaacatcttcatgtttgtaatgtattaatgcacaaaatatcaaaaatagaaagtctgagtttcttccccgcaggtttatgataaactatcaaccttctatttaatgcatttcctttttttttatttatagagatggagtctcgctatgttgcccaggctggtcttgaactcatgagctcaagcaatcctcccacctcggcctcccaaagtgctgggattaccggtgtgagccactgcacttggccttaatgcatttacttttataagccttctctgtttagaagtacacactacacaagtacatacatgctggcattttaccatgaaaattttagttttcatctcaaactagtgacttgcctttttacccatacttatacacatgtaatacctttctagtggtacattttaatcaatataattttttaaatctt

SEQ ID NO: 238630 - DNA, 582 bp, Homo Sapiens
ttacattccttattccctcaccaacagtaatcctcatttttatagaaggtaagagagaagaagtacgcagaggttacagacttgggtccaaagaaaattacagagtccaaactgaggccaagcctgccaatactctcagcagcagttttctcctctaacactcttcctctatctgccatgatgcccaggcatacaaagggagtttttcattgtttccttaaggttaactgctctggatgctctcagttcaaataagatggttttaaaattcccctcctccttgccttacagcaaagaagaggaaaggagaaattcaaatgaaaataaatcatatacacaaatatcaaggttcaaaagctggaggatttaattcaatcaatttagcaaggcccaaaatgaaacctggtaatgaaaatgaagacacagcaatattttcctcaagaaaatagacatttgggagaagaaatgttttcttaaaaaatgtttatttggaaaagtcagcctcttacacaaggttttgtatctatacttttactctgtcaattacagtggtattttaaatgcattgaatataattcattg

SEQ ID NO: 238631 - DNA, 581 bp, Homo Sapiens
gggcacttatgtgcatcaagtgatggagacagagtaaagagaatttatggatatatatgcatatcttgctaataagtttggtttatcatcacatcaagataaattgcctttagcatagaacttgagataagtagacgttcactagcaagtgctaacatttggatcagggcaaaggcgtttccaggagtgtttttataccagacccctgcttagtccatggggctgaggcatgtcacataactcagagcaagagccttctatttgtgtaagacccaaccctgggaaggatgcccgagacaatagctatgcctctgccccagcctgatgccatgtgatctagagcctgggcagcaacaaccctgtggtcaaagacatggaagaaacactctgcaaatcccacagtctgttcgacggcttggaaaggaagcaagtggcattgggacaattgctctacatgcctacagcttacctgtcaactacagggggctgccaaggtgtgcaagacgacctgggggcagagccatgctcagggcacagatagatggggatgggagtcgagatggggcatgggaagtgatgag

SEQ ID NO: 238632 - DNA, 583 bp, Homo Sapiens
tctttattgaatcacaaacaactcagggcatcaggccccagcagctgcattagaacccatctgggattgtgaggggactggagagggaggggggagaagacccgctctccctagcttttcactatatagagtaaaaacatcagaaatcaccccaagagaaaggacataccaaatgcccaccagaagggccagggactgcaagccaccctgagcgcaggagggtgtggtgaagggtggtatggccccgaaatttgtgtgtgtcccccattccccctgcaaattcacattggaattctcacccccaaggtgacagtattaggaggtggggcctttggagctgattgggtcatgggggcggaaccctcatgaacagggttggagtccttataaaagaggcaggaaggagcttgcttgtttgtgcttctaccattgaggatacagcgagaaggcaccatctatggatcgggaaacagccctcagcggagtccgaatctgctggcctcttgatcttgggcgtcccagccccccaggactgtgagcaatacgtttctgttgtttgtaagccacccggcctacggcattt

SEQ ID NO: 238633 - DNA, 583 bp, Homo Sapiens
gtggtgcaatctcggctcactgcagccttgaccccccaggctcaagagatcctcccacctcagccccccaagtatctgggacttcaggcacactctaccacacttggctaatttttatgctttttgtagagatggggttttatcacattgcccaggctgatctcaaacttctggactcaagtgatcctcctgcctcgacctcccgaagtgcgtgggccaccatgcctggcaggaaaatattttttctcttcctcctttttcacttgacttggttttgggctaaacaaagttatggtgcttcccccacacctaagtaagttacttctatgctgacacagcgaatattggatattccaccctctcaagagaaaacagtcagcagttttttaaaaaccaagtttaaacgcattcttgccaggctcatttttcttttcacattgtcttccttaatattatcttccctagttacccaggttcagctgacaacaaacaaagctgcagtaaaaccgttttgatctcagaaatggcagaagccctccctgctgctagctctcctttgtgggaggtggagaagagagaacat

SEQ ID NO: 238634 - DNA, 580 bp, Homo Sapiens
aagggtaacttttggataatgtatgatactaagaagggcatgcaactaagtaatcagactgcttttagtaagaaaataagttttttttttttttttttttaatttctcgagacagggtctctgtcacccaagctggagtgcagtgacacaatcaaggctcactgtagcctcaatcttcagggctccagggatcctcccatctcagtctccttgggagctgggagtaggcatgtgccaccatgcctggctaattttttaattttttttgtagagatggggtcttgtcatgttgcccatgtcggtctcaaactcctgggctcaagcgatactcccaccttggcttcccagtattgggattacaggtgtgagccaccatgtctggcttgcttctctttttgtattctaaaattcaaaggcctaagtatcaaatccctaaatctccaaatactgtcacagataaagactcaataataaactccctccgaaagtttagacaggctcaggtgagagacttgtttcaaggggttataaaaagaaacaccagtgctctgcagaagaatcagtttttaatttttttaac

SEQ ID NO: 238635 - DNA, 580 bp, Homo Sapiens
agagagatttgaaactatgtagtcaacagaggacaaaaaaaaatctctcaagcaagagaatttctgatcaaatctgtcatatcactgctgcggaaaaggaccattaaaggcaatacacatcagtgcctttcttaaatgtatagactcaaaataggtgttttttgaggcactaagaaaaaagattcctctaagcaatcaaaaatcagcatttgagatttaatcactaaatccaaaatgagatcagcaaaaccagatactagtaaggtcactaggctcacaaaattgaactttggagaagagagatgccaaagagtaataatagcatcagaatgtgtgaaatctgtaaaactttaatcctcattatggatcaaagttctctgcgttccccactaaacattttatgtaggaaacagcagttaaaacgttgaatcagaaatggttaagtcacttgggtgagagatcatccatcaagatgaacgaagagcatgaattggagcatgctactggagactctgcggtagcgctgcctttagccagcgggtctgaggataagccactgctgctactactgccatccaaa

SEQ ID NO: 238636 - DNA, 582 bp, Homo Sapiens
  misc_feature (572)..(572): n is a, c, g, or t
ctatcacctggaatattgaaagaaattcagtaaaacaagatgtgtctcatagttaaggagagacataaaaataaaaatgtcatttaacagtttgaatttaggatttactgttaatcagaaacaccgaggaggcttagctcaccttttaattgagaatgtgggaaggaaagagagtaaacacattaactttagtagcagaagtgctgctaaaagaaatacgtgaaaggaaatgtaacagacaaattggcttttatcctttttgataccaatatatgtgtatacaagtcataacactgtaagtagtgtcttaagggcaaaaatgtagcttcttgtttataaaacctaatgagcacttgaaaaaatttacactctgaaattaaataagaccttaataatgaggctgtgtatgactggtgatatggaggagcactgtgctggctccagaggggtgttgcttgtctagaatctaatatgctgcagaactggttggaaaacgggtcacaactggaaaagccaaagaaaagtttccattaacttcaagaaatactagggttcttgttcttggaaatctnctcagcttcc

SEQ ID NO: 238637 - DNA, 583 bp, Homo Sapiens
ttttgagacggagtctcgctctgtcgcccaggcttgagtgcagcggcgtgatctcggctcactgcaagctccgcctcccgggttcacgccattctcctgcctcagcctctcgcatagctgggactacaggcgcccgccaccacgcccggctaattttttgtattttttagtagagaaggggtttcactgtgttagccaggatggtctccatctcctgacctcgtgatccgcccgcctcggcctcccaaagtagtgggattacaggtgtgatagtatgaattttcttatggttagtaaggattgaagactggttaaaggctttgccacatttttcacatttgtagggtttctctccagtgtgaattatcttatgtttagtaagagctgaggactctttaaaggctttgccacattctccacatttgtagggtttctctccggtgtgcaacctcttatgtctagttagggttgaagattggctaaatgctttgccacattcttcacatttgtagggtttctctctagtatgaattctcttatgtccatttagggttgaggatgatataaatgctttgccacattt

SEQ ID NO: 238638 - DNA, 532 bp, Homo Sapiens
agtcgaagaggctaattctggccctcttataaaaaaaaagaaagaaaagccttgttttctctagatcagagagatggcttctggattcatctttccctgcaatccagcttctcctcctggggccctcatactggagactgggatcatcatccaggcttttgcactgggccaggaatttgggagtcatcctggatccgtctgcccctgtcaacctttcgctgtcaacggatatttattgggcgtcctcaacagccaggcccctgttcatggtactgaagaacagcttgtataaaacaaccctgccctcacagggcgatcaccagtgaccagtggtgtggagtctccttttacctatgtctcctccttcccactgtcaccatccttggtcctcctctgtcacctggaatactccacttggtaaccagcatgatcttataacgctagttttacccttgtcagcactttgccaaaaacctcaaataaagactttttttaaaatgtgcaatggaaaaataaagatataaattataaa

SEQ ID NO: 238639 - DNA, 497 bp, Homo Sapiens
aattggtcccaattctaacaggtttaatccttcttgaagccaataagttttatcttttataatctgtcaggatgaaccactccttagcttttatccaatattaaactgcaagtgttagcactgaaatattgtcattgatagggaaaatatctattctttgagtcattgttactgaggcagttgagtgtaaggagctggctgcagtttattctacttaaccctttaaggctgaattgtcaaatgtacattgttccatgtcgttagatggaacatggaagccattgtctaatcaactctatcattagtgacttgatgtctcataccttaattttgtaatgatttttattctctgttacaaagacttgaaatacgtattaaatgcacgttaatgttttgctttgcattttaggttcagattatgacttgattgaaataaatgtgcctatacattcatttgctttgtactataaaaataaaaatgatttcttaagttaaaa

SEQ ID NO: 238640 - DNA, 311 bp, Homo Sapiens
  misc_feature (33)..(33): n is a, c, g, or t
aaatatgtgtccaggaaagaaaaaagcccagancaaagaggtgaagaaaaagactttagagtcaaagaaagtatctgcatctaccttaaaaagagatgcagatgcttcaaaagctgttgaaattgttacttcaacttctgctggactgctccctacaggcgggggcaacaattacccacagattgtgttggctccaggcctttgtcattaaatctgtactaaataaatacaagcagctccagcttattggggctgcgttctctcttcggcgtctctaaggccgagcagtttcctagctgcgctcacgcaaa

SEQ ID NO: 238641 - DNA, 525 bp, Homo Sapiens
cagagctgttcttataattgtgaacaaaatgtggtctatatctggaaaagttattctctttgactagcagtttcttttcctggtaagctaacagtctcttcaattctgtcaccatcctttccaggagtctgtagataaccttgcctctttttacaagaaatctttctaatgccatcaagcttggtttcctggattctctatcttaattgttggtaccaccatccaccaacccggaaatagaggattgaccctctaccccttgtttacatgaatccctccctgatccccagacagagtctgtcactcttgcctctgtaccactgtgcttcttcttggtgtgtgcttacagtgtttgccaattagttgtaaactaggatataaactctttgagatagaggtccatattttttctttacctaacagcacctggcagaaatgtctggttatgttatgttctcagtaagtgttgctttttaatatgtctaagcccaggccaataaatgcacagttgaaaatttgactcca

SEQ ID NO: 238642 - DNA, 509 bp, Homo Sapiens
cagagaaaaaccctgtgaacaactgtcttgctggtttgatgaatatttaatgtgctcctactggtttaggatgctaggttcatctaaatgtgcataactacttttagggtcttaaatgcccccttgctttctggagacaattaaaattttaaatcctgtaaacagttttgttacatgcaaagaatacttgtgtagatcacctgaaactgtttcccaccaattgttgtttgggaaagactgttgtattttgaaatactagaacaggtgagtgaggtagaacatagtacagattctctctagcatgaggttatgtggggctcaacggaatggtagagcatggggtctgaggctgtagaaagagtaaggtattttagaatgaaaatctttgtgggtatggctgggcacagtggctcacgcctgtaatatcagcactttgggaggcttaggcgagtggatcacctgaggtcaggagaccagcctggttaacacggtttaaccccatgattact

SEQ ID NO: 238643 - DNA, 521 bp, Homo Sapiens
ctgaaccggcagctgcgcggggtcagcaaggaggaggtgatccggctgaagcagaagaggcggaccctgaaaaaccgcggctatgcccagtcctgccgcttcaagagggtgcagcagagacacgtcctggagtcggagaagaaccagctgctgcagcaagtcgaccacctcaagcaggagatctccaggctggtgcgcgagagggacgcgtacaaggagaaatacgagaagttggtgagcagcggcttccgagaaacgggctcgagcagcgacaacccgtcctctcccgagtttttcataactgagcccactcgcaagttggagccatcagtgggatacgccacattttggaagccccagcatcgtgtacttaccagtgtgttcacaaaatgaaatttgtgtgagagctgtacattaaaaaaaatcatcattattattattatttgcagtcatggagaaccacctacccctgacttctgtttagtctcctttttaaataaaaattacaatgttagagaaaa

SEQ ID NO: 238644 - DNA, 469 bp, Homo Sapiens
aaattatatcctttgtataaattttgaatactagtagggcaatcagaaacatttgaaatttgatattttaaaagtattttgattggaaaggagcttaaaggcagcagcacactattttattctgagtattacctgtggacaagaagattaattctgctaagagcatgctttcaaaactggaaaacccttcaggacaagtcacattttgtgacagtgagacgccaacaaccctgagaggtagtacagaaagaaaaagatggaggcagggtttgggaagttctggtgttgagaagtttattttcatttctcatggtttccagggagggacagcaagttgtagaatacctcattggtgagctctgagtgtttgagggactttatattctcgtgcatcacaaaatttataggcatgtgcagagaattttagaaccaggaacctcaggaattttgttgagactgtcgttgcaaa

SEQ ID NO: 238645 - DNA, 575 bp, Homo Sapiens
agggactccaatctggtaatggtgtcccaaaggtaagtctgagacccatcagcggcgcgccctgcagagggaccagagcttggagagtcttgggcctggcccgcgtctagcttagtttcagagaccttaatttatattctccttcctgtgccgtaaggattgcatcggactaaactatctgtatttattatttggagcgagtcatttcgttccctgattatttatccttgtctgaatgtatttatgtgtatatttgtagatttatccagccgagcttaggaattcgcttccaggccgtgggggccacatttcacctccttagtccccctggtctgaactagttgagagagtagttttgaacagtcgtaaccgtggctggtgtttgtagttgacataaaggattaagaccgcaaattgtccttcatgggtagagtcaggaagcccggtggcgtggcacaacacactttggtcatttctcaaaaaccacagtcctcaccacagtttattgatttcaaattgtctggtactattggaacaaatatttagaataaaaaaatttcccagtcaaaaaaaaa

SEQ ID NO: 238646 - DNA, 588 bp, Homo Sapiens
cagattttggtaaatcccatctttcagaagtgaagagggggctagaaggactctgagaagttggtagaagaaaactcccacttgtgaatatttttgtgagacataaattcttttattacgatttacctctaatttattacacttagtaaattcttccagatttttctatttgtttgacacttccttaaagtaaggaatacacattgcttgcgagaactggttatgagacattggaatacttcttgctgctacatgtcatcttaattttggatggcatgggttttgtaaaacttattctgccccagccaaactttttttgaaaccttaaatagtctaccttaattcagcctagaagagtacattgatttactgatcttttttcatattcataatactaaatgttttagttttgttcaaatatatgcttaaaatcacgttatttaaaaaacacatcagctctgtctcaagaagtaattttgttgaaactccatgttaaaatatccatcttcaacagtagtgtcttcataataactagtcattttttcagtcataaacagatgcaaataaaaaggaaaaaacacttttaaa

SEQ ID NO: 238647 - DNA, 638 bp, Homo Sapiens
cggctcgttacccgtgagcgaccttctcgacagacgggtcacactgtgttaagacagacttccgaagtgtgtttctgcatttgcaaatcctgaaggaggatatgtattttctggtgtgcatgatgagacttgtcaagtgattggatgtgaaaaagagtaaatagaccctacgagcttgagggcttctattgatggctgtattaagaagctacctgtccatcatttctgcacacaaaggcctgagataaaatatgtccttaacttccttgaagtgcatgataaggggccctccgtggatatgtctgtgcaatcaaggtggagaaattctgctgtgcggtgtttgccaaagtgcctagttcctggcaggagaaggacaaccgtgtgagacaattgcccacaagagaatggactgcttggatgatggaagctgacccagaccctttccaggtgtcctgagatggttctccagttgagtttgtcatctgccacgccccgcagcaagcctgtgtgcattcataagaattcggaatgtctgaaagagcagcagaaacgctacctttccagtattttcagacagagtggtatatactccagaaagcctctaacaaggactcttctcacaacataaagtcgtctca

SEQ ID NO: 238648 - DNA, 402 bp, Homo Sapiens
  misc_feature (400)..(400): n is a, c, g, or t
ctcataatagttacaatcggcatcaaccaaccacacctagcattcctgcacatctgtacccacgccttcttcaaagccatactatttatgtgctccggatccatcatccacaaccttaacaatgaacaagatattcgaaaaataggaggactactcaaaaccatacctctcacttcaacctccctcaccattggcagcctagcattagcaggaatacctttcctcacaggtttctactccaaagaccacatcatcgaaaccgcaaacatatcatacacaaacgcctgagccctatctattactctcatcgctacctccctgacaagcgcctatagcactcgaataattcttctcaccctaacaggtcaacctcgcttccccacccttactaactataacnac

SEQ ID NO: 238649 - DNA, 537 bp, Homo Sapiens
ttagccaggcatggtggcacatgcctgtaatcccagccatttgggaggctgaggcaggagaatcgtttgaacgcgggagacaggttgtggtgagccgagatcgcgccattgcactccagcctggaccacaagagtgaaactccatctcaaaataaaaaaataaaaaaagagaaaagaaaagatttttgttttaggaagctcatattttaagaaactaaaatatattctcatggttgaggacataagacattgttatagaaactaggtcaacttctcgatacctttatcaaagcacctgcagttcccatttcattgcaagtgaagtaaatctcattgaaataaagtagctggtgtatattcagtacacttttaaaatagcctattttaaaagagaaattggtgccactctgatttatttcctgctttgttggaatgggggaagttctgtaacctcattgctgttctgctctctattgactactttgttaactggggcacgatgcctcttggatgtctaccgtgctgaaggtcccccga

SEQ ID NO: 238650 - DNA, 615 bp, Homo Sapiens
gccccttcacgtctggtgccagaggttgccaagcacccctctgacaccggccgcttctgctcacatgacgaggactacccccatcgcaatcatataccaaatctctccctcactaaacgtaagccttcgcctcactctctcaatcttatccatcatagcaggcagttgaggtggattaaaccaaacccagctacgcaaaatcttagcatactcctcaattacccacataggatgaataatagcagttctaccgtacaaccctaacataaccattcttaatttaactatttatattatcctaactactaccgcattcctactactcaacttaaactccagcaccacgaccctactactatctcgcacctgaaacaagctaacatgactaacacccttaattccatccaccctcctctccctaggaggcctgcccccgctaaccggctttttgcccaaatgggccattatcgaagaattcacaaaaaacaatagcctcatcatccccaccatcatagccaccatcaccctccttaacctctacttctacctacgcctaatctactccacctcaatcacactactccccatatctaacaacgtaaaaataaaatgaca

SEQ ID NO: 238651 - DNA, 481 bp, Homo Sapiens
agtttcacaagaaatgccagtaaaagtttaataaggaacatcttccatattcagcaggaacaaggaacaagactacaacacaagcactgaatgaaacagaaaagcatgctcacggcagatgcttattccattcatgttaacatttaacacatctgttaaacagggtgctctaagccctatttttgacagtgactaaaaatgatgtattctaactaggataagtagaaatcaagggaaaagaggttgaatctgaatacacaaatttatatagctcattcctagaacactacactgtcctgtgttttcgataaattaactatacatatgcattttacttcaagatagggaaaagcagaagtttaatgatttttttttttacaattgttgtcaaagctgtttggatttttaaatgtaaatactgaggactaagaaatcttgttaagaagcagggtcgacgcggccgcgaatttagtagtagtag

SEQ ID NO: 238652 - DNA, 351 bp, Homo Sapiens
cgcggccgcgtcgacaaaacaagaaagaactcttgaacccagctatgcatacaagaaaaataaattgtttgaagtgagacatgaggtaatcgagactcctcaatggggaaagtcagtgctcatctggcccctagtgtgcctgttgagctgaaatattttattgatgtgagtgcttaacaaatcaccaaatgctcagtgaatacctattatgtgtcatgagctctatgaggtagctttttttcatacagtcgtattttggcaaataaataaataatacgaggcataattgacagtgaaaataccaaaaaaaaaaaaaaaaagtcgacgcggccgcgaatttagtagtagtag

SEQ ID NO: 238653 - DNA, 487 bp, Homo Sapiens
ttcttttttcacagtatgacttaccctccatcccatgccctcctccagagttctctactccctctcagatggcagctcttcaaatctttgtttatgtactgatgggacaaggctcaagcacccacttcttctctttcagctgttacatttgaacagctttctagatcatatttctctaggacttctatgtttaatagtgggcatttcaaggtttagttttgaatcaggttgacagggcagtggttttgttcttaataacaaaatcactttaggataattagaaccgtatagcaatttaaccttcaaatcacactacttttggctggtcgcagtggctcatgcctgttatcttagcactttgggaagctgaggtgggaggatcactcaagcccaggagtttgagaccagcttggtcaacacagcaagaccctgtttctttaaaaaaaaaaaaaaaaagtcgacgcggccgcgaatttagtagtagtag

SEQ ID NO: 238654 - DNA, 442 bp, Homo Sapiens
ggacctgagtacagtctgggagaaacataatgtagcaggaggtcttatgaaagagagttaggcattccagttgactgagttcactgtgggatgtgacaagccacttcccaaatcagtgctgggaacatggcactgtgcttcacctgccaatcagaatgcccctggagaattgtattctcctcagggcattgctttaagagcactacgtgttcaggaaacaaccagagaaaaccaccgtcaatgagcactgactgtaaagactgacgttaataaaccagaaaaaactcaggaaagtgggtgagggtgtgaccattgccttcaaattcctgaggggctgtcaccttgaggagacattattttggaaggctccagtaagcactatggaaagaagatacataaaggacaaattttggctttgtgcatgaactgtctaacaaccaaa

SEQ ID NO: 238655 - DNA, 561 bp, Homo Sapiens
  misc_feature (560)..(560): n is a, c, g, or t
cgttaataaatcttagggtacaccttggtgaattttgtatatgtctatacccaccacggtctccatcaaaatattttatcgtcccagaaatttcccttgggccccacctcatcctcaaaggttatcactattctgatgtctatcaccatagatttgtttttcctgttcatgtaaatggaaccataaacagccctcttgtgtctgttttcttcacttaatatagtgtcattgagatttatctatgttgtattatcagtagtttatgctttttaattgctgtgtaatagtccatagtctgaatataccacaatttaaaaattctattctgtttacaaacatttgagttctgtcctccaggttcatccatgttatcacaaatgacagaatttccttcctcatcaaggctgaatagtattccattgtgtagatataccacattttctttatccattcatccaccgatggacagttaggttgattccatatcttggctattgtgaataatcctgcaggttttattgttatgaataaagctgctgtgaatgttcttgttggagggna

SEQ ID NO: 238656 - DNA, 453 bp, Homo Sapiens
ctatctaaatggatggatctggattcctgtagaaaagatttagaaacataggccaggtcattgtatagggagtaagatgaaggtgaatttgcagctagttgaataattagcaaatgtccaagtgaaagggatacccagagggcattatcctttacccatccttctcaacgtctttatccgtgatgtagatggagatacagaaggcatcctcatcaaattaatggagtcatcaagcaagaaggaatggtcaaactgtgggaagtcagagttaggttgcgaactatctacgcaggtttaataatggtccgaaaacaaaaggggaaattttacaaggatctgatgcatttggagtctacatctaagtaaaacaaaaagaataaagaaaaagaaaagaaaatcaacagcatggttacagagtaaagaagacaggaatttttagccattcatgtgaaa

SEQ ID NO: 238657 - DNA, 553 bp, Homo Sapiens
tctttttggaggctctaggggagcgtctttctttgcccttccagcttctagaagctgcccaaattctgtggtttggggcctcctttcaaaaccagcaatggccaatcagtcttacatcactcaaacacttgagtgttctgtctccctcttccatgtttgaggacccttgtgattacactgtgaaaacccagataagccaggataatctccctatcttattatgaggcaagtatgttaagattttattctataatcagagaatcttatgctatgattgttatatgtgagcattatagatgctcttgaaatgttaaaatcacatcagcactggaaaataactcctaaatgtccaaaaagaacatgagatttatggtgcttgaaatgttgctaacgtaaatttgtatctattctgaaattatataaattaacctacctggccaggcacagtggctcacacctgtaatctcagcactttgggaggccaaggcaggaagatcacttgagcccgcaagtttgagaccaccctgggcaacatagcgagactacctctaca

SEQ ID NO: 238658 - DNA, 473 bp, Homo Sapiens
  misc_feature (47)..(47): n is a, c, g, or t
agactggcctgggtaacattgtgagaccctgtctctattaaaaaaanaattagctgagcatggtggcacatgactgtagtcccagatactcaggaggctgaggtgggaggatctcttgagcctggaaggtcaaggctgcagtgagccatgatcatgatcagcctgggtcacagagcaagaccctatttaaaaaaaaaaaaaagtattaatgataagattcctttcagcaaagagctcctcttataccttaaagatatgattcagttggtcaacttttagttcatatagaacttttcatgtatgatcttgttattcaaaattaatcacacctgtatgatgctacaggaaactcctagatacaatgtgtgtgggaagagtatgggaagctcccctctccaggcctctgtctacattcagtgtcctaatggattttcaaccttttggtcaaaacacactcctaaaaaaacaaacaa

SEQ ID NO: 238659 - DNA, 434 bp, Homo Sapiens
agtaaattttgttcctaagtctgccatttttatgttaatctagcctatatcaagttggcaaattcacatgctaagaggggtgggcagatagtacaattaagtgaaactgtctgagtactgacccggaggtgacaaagagagtgtagctgtaaagaaactacagattttgtgccttgctgtaggcaacagtaaggtgctagggaagatacttgagggaagcagcctgactaccttggttgtaactggtagggagtatttaggaaggattgaagccggatagagatttaaagacagagagaagaggttgcagtttcctaagtaagggttatgtcattggaaaatgaggggttggattagaaaggaaaaaaatgggtaggacttggacagaaataactgaagcctggtccattgtcactttggaaagtttgtaaaaa

SEQ ID NO: 238660 - DNA, 514 bp, Homo Sapiens
acagttacatttctttatggatcaagaagtttgtgtacacataatctcattttgagatatataactatttttgtctttcagaagtgaatcaaaatatttcaaaatgctgtcttatgaaactacaatattctcacagattagtaaagtttttctgtaaaagtcagatagtaaatattttaggttttgcagtgtcttttgcaactactcaactttcctactgtagcacaagagtagctgtggtactgtgcaaataaattgcttgtgttccaataaagcttcatttacaaaaacatgccatgggccatatttggcctgtacactgttgtttgccaagtcctaatatagttgcttagcaagtattgtgagctatttgaggaagacatgaaagttcattgggttgctaaaaagtatgtagaaattcaaaggaaaattaaaatttaggctaagttataatacactgttttaacaattgtaaaatgtaagagaaatttacaaataaaaatcccaaataaaa

SEQ ID NO: 238661 - DNA, 492 bp, Homo Sapiens
  misc_feature (8)..(8): n is a, c, g, or t
  misc_feature (14)..(14): n is a, c, g, or t
atggctcnctgttntgaggttattttgatggagtatgaatttacttctttgtcatttggagaaggtgcacagtattattatgaacagagaagagctgtatgaaaactgatcttccagcatctatcatctccttttagtctaatgagatactgccattatctcctgatgaaatattgttctagaaaaccttaccccatcatacgatttctgcagatcttacaggagcaatctgagctcaagcaatattaattactgtttcatttgtccatttgtctgtgtataatcatgtattttaatgatcttctattttctatggtttgtgtagatttggagactaattcaaaagagttgaagttttttggacatgtttagttgaatgtgcagttctcttttgaagaatcctgtctccaaatcctgttttgaaaagagtgttgatgagtagcacagcacctgtcatattgtgagtgtgcaataaaatcatgccttttcagc

SEQ ID NO: 238662 - DNA, 477 bp, Homo Sapiens
ctgaccagagtggcccttcagacttctggttctaagcctttcctaaccatctggttcatcctgaatgccttgtacttttgttaaaaagctgccagaatggcatatctactgctcttgtatctcttagaaaatgtatctttctggtgcctctaaagatccccattcctagcaagtgactagactagctgatctgaatagctcaggtctctagattagtcctcatttggtgtccccactccatccccattcctatcacacatccctggatcccattccttatgggtagttctgaaaaataagagctagtttggggacaagcacctaacaattgttcctaggttgccagtcattaggcaacattatagtaaagaagggcctggcagagactagagctgctatatcgtgacttgagggactggtgttattttcatttgtttcaccctcctgttgacatttaatgttacccaaaatcaactc

SEQ ID NO: 238663 - DNA, 482 bp, Homo Sapiens
cagtgagcaaggctctgtgggcatgggacccactgagccaggcacaggagaaaatctcctggtctgctggttgctaagaccgtgggaaaagtgcagtattagggcagaagtgtcccatttttccaggtacagtcgtcactgcttcccttggctaggaaagggaaatcccccaaccccttgcgcttcccaggtgaggtgatgccccgccttgctttggcttgccctccgtgggctgcacccactgtccaaccagtcccaatgagatgaaccaggtacctcagttggaaatgcggaaatcacctgtcttctgcgtcagtcatgctgggagctgcagatcggagctgttcctatttggccatcttggaacagaaaccccacttgaaagaatttgtgtacatgaaaatttttaaaaatccctccatttcctaatctatgatagaatatatttcaaaaatttggtggtaagccaatttttggaaaaa

SEQ ID NO: 238664 - DNA, 527 bp, Homo Sapiens
ctaatttctggaacatatagatatataagaaatatcaaagaataggtagttatttcaaagtttaataagtaaaacttgttcataaacatttgagcaccatgaaatcaaaataccctataactactttctatagtcatatctaatttatatttttttcatttccagttgtaactagatatgtagtaaagtctgaaaagactttaccatagacaataacatgcagttttatcagcaccaaagaatgttgtccaaaagaaactttttaatacctgtctttctatttataacatctgaatattttcattcttatattaagaattttgataagtagattgaatttagtatgagtactattttcttatatataccacaatggcaaacatgtattataaatcatatttttgtcttaccaattttaatatatgaggggttttagaaatttgttgtaagttatttttatattccttgtcttttgcatattttttggccaaaatcttcaatacatattaaaatttttgagtggtggg

SEQ ID NO: 238665 - DNA, 699 bp, Homo Sapiens
  misc_feature (68)..(68): n is a, c, g, or t
caggtgaggactccaatcaccttctctcagaacaaatcacttcattttattgtcttagtttgtatatnttctgtgacttgaaataaactttgaacacatttttagtacactgcaaattgatacacatgacctttttgcttttaaaaagcttaacactaagggtgaaaccttagatgtgttttctacccttactgcagtattgtactttaacatattgccatagtttggtttttaggtaacccacttattcttcttgatgatatttgagaatttctcagaagcaatgttttctggaacttggtttttgtttagtttgcttccagtaagaattattataaggctttgccctctgaaaatattctagcacttcggagtcttctaggagaaaatatcacatgcttagagctataaaatggtcagaaggctaacagagcaaagagcctagcacagctgtgtgtttagtttagaaaaatccaaatatcaaaatgcatttgtttcaatagcaggtctgaacatgtataattcagagttaagacaaaaattgttttagcactggtttgagtgtgtcagcaacacaagagactgttgacatttacttgtgtgttcttaaacttatcagtctaggcagtcaactttgaaagtttaaaaagccactgatttttcacatgctcaagatgaaataaaaacagaaatcaaatg

SEQ ID NO: 238666 - DNA, 483 bp, Homo Sapiens
acaaaaaaccagctcctttgccttcctagccatgtttcagatgctcagtaactgtgtgtggctgtggaactggacagctcagccgtagagtgtttccctttcttgttaatctttttttagaaatgctaacggtggagactaaggcatacaagtatgactagaattgccagctacacattagaaggtttaggttcaaaactgggagtaaagacttaactcttggagcttgggatagtgctacaactagtcctggcctgagccttttcttcattcatgttttatcctttttttctttatttttggacactgataagaacctgtatgagattgtttccttttttccccccgcgttgtaggtatcttgtcttgctattttgcacaggctgatctctaagtcctggcctcaagtgatcttcctgtttcagtccccaaggtgttgggattctgggcatgaactgctgcacccagccctttatactcaaa

SEQ ID NO: 238667 - DNA, 572 bp, Homo Sapiens
tagtatgagaagaaattatagatctgtctcaggaatacagaagctaaaattttcaacatcgtaggtaaaataaagggggagaaatacatcatgaccaagtagggtgtattcccagaaatttatcggaaaatctatcattgcagtgtacacgtgaaatgattgtagaagaacagcattatattcattttggattcagagaggtatttgagaaatttgaccactcaataacttagtaaagggctatttatcaaacctttggcaaacatagttaagggtgaatatttagcagccttaccattaatggtgggaacattctggggcagacccatgctcagtaattcagaaatgaggcataagaactggaaagaaagcaacgagactgattcaattgtctgtataaagaaaccagagaatgtacaacagattgttagacctaataagagttcaacaatttgaaagttgttcaaacaaaatcaacatactaagataattgtttttctatgccccagtgataaccagttgaagaatgcagtggcggaaaaaagattgatcctattcacaaaagtaaaaaa

SEQ ID NO: 238668 - DNA, 487 bp, Homo Sapiens
agtcagagatttaccacagatctgtctccccctcaacctggactcaagttactgtggtgagaaacctcactgtccatggttaactgaagaaatccctccttcagaaagaacttgagtagtagatgaggtggttagacaggatctttttccctcaagctgtttggacgccacagccaggaccaactctgacagctgcgagagagagagcccctccaatgtggaacctcctacacagccccccttttgggtccctggatatgagcccccagcaggaccaccactctagggggaagtctccctcccatccctcagatccccacattgttcctcctgtaggagaaaagtcagccctgcccctggagcttctccaagatggcactggactcgccgttatcttgaggagccaggagctgaaatggctccggcttagcaacccagtatggccaaagtggaaaggttctctgtcctttgcagtcaccaaaaaaaa

SEQ ID NO: 238669 - DNA, 550 bp, Homo Sapiens
tattcctcacactatatttacattaataaattgattgagaagtttatagtaaagggaaacttacagaacacttttgtatcatttaaaagatgacctgaccaaaaactttacaggattcataaatcagggatcattttgctattgacttcacagtaatcagtagttttataggtaatattatagttaatttgcagcattttagtacttgtattatttatttttggtcagaaatagtaaattaaaatattttttgatagtttataggtaataatcaacccataacttttaaaagaaacaaaacatttctattattgagttaacatttgattatacaaactaggaaaggcagggaaattccccttctccccagtgattctattaagatgacctttatgttaaactttcaaagtactttatgaatttagttaccagttactatttattaattgacaattttctgaaaaatcccgtttcagcagacttaatgaaggtgaaagcaacccttatgtcccctctacttatttgaatgttcctcaagtattttatatta

SEQ ID NO: 238670 - DNA, 580 bp, Homo Sapiens
  misc_feature (1)..(1): n is a, c, g, or t
natagcattaccttcccctcagaaatcacttccacagattgctgtaaccaggaaaatatattttattagtagcataacaatttgtctgggtcttttaacttattgtgaagaacagttctttttccatccaccactgaccagtttttttcagatgagggcctgttaccatgctctcaaagataattatttttctaggtaagtcccattgggaataattcttatgaccttgtagataagcaaagagacttaattgacaagcagacacttaacaatttatgatcactgctcaaaatgctttttgagcataatctttggcaggttcattcattagatgatggcattgctgacaaaaggatattgtggtggtttaggttagagccatttaggttcattcttttcttccacctcagctatacagatgttttctgtgcttcttgggcaatccagtaagagcccatggatgggttggtacagttcagcccacatttggaaaaaaattttaggcagttttaaaatatcttttaaaaaattgcagctcaccccaagagatacattttacattataacataatatatatgc

SEQ ID NO: 238671 - DNA, 309 bp, Homo Sapiens
cacctgttgatgcttttgactttctgtccttgttcctcgtcccatctggagcatttccaattctggttttgcggagcagcaggtctgagcttgtccggcgagggtgggagttggtcccggcggagatccagtgggaagagccggcggctgcccgggcgtctccttgagcctccagaggactcacaacactccggggcatgttgctctttcaaataccaggaatggactctggggaatggggcacccttgaagtctgattatttcttccctgccgagccccaggggctaattaaactcgtgtttatggaa

SEQ ID NO: 238672 - DNA, 557 bp, Homo Sapiens
  misc_feature (12)..(13): n is a, c, g, or t
tcctacagcagnnaggccgccatcgagcagcccgtggctccccggcccaccgccctgagtccagattatctctcctggacagcctcgtccccctacagcacagtgccaccctacagccctgggagctcaggccccgcaaccccaggggtcaacatggccaacagcatcgccagcctccgtctcaaggccaaggagttcagcctgcaccacagccaggtgcctacggtgaactgaagtccagtcccaccaggacccagacgcctccctgggtggacagcaatagaaaagggggcagacgcccaggaagtgaccttctcctggatgagctctcctggcccgtctgtccagcctggactcccgagcccacgaggctgttgaggcccctgcagccgggcccagctcttctgtccttggccaccagagactgcagcccacaacccttggaggggttgggccggaaggtggaagagcctgccaaggacctcatttagtttgtgtattaaaaccaaaaagctttcgtctttaagaaataaaaccatttttttaagccccaaaaa

SEQ ID NO: 238673 - DNA, 492 bp, Homo Sapiens
catgcattttatttactactgttatttccagttttatttattttttccttatggggaagtcccattttatgtccgcaatatattttaaaaacctcccataaatcaaagctcatgtaattcaagggcagttttgcaatagaaattgtttttgagtaaaaccaatatttttctggaagtgcatatatctttagccatttggttttgggggcgttgtattgagcattgtgcatccctgcgattaggcatattttaattgtgcttgctctgttgtaggaaactgctgtgcacttctgtgtagttccagtggtgctttttacttctcagacttatttatttaaaaacacgcttgcttctaaagtttgctgaacagacccagttaacaagtactcccaaggaaaggaaagggaaggattcctttccttttataccaggagtccttgctctctagctgtatccaaaatactgtttcttttagtacatctaggttatctt

SEQ ID NO: 238674 - DNA, 407 bp, Homo Sapiens
cttatcggctgcatttgggggcccgtgctctggcttatggtgagaagaatttgacctttgaaggaccactgcctgagaagatagaactcttggctcacaaggggctgctcaatctcacatattaccagcaaatccaggtgcagaaaaaggacaacaagatatttgagatctcctgttgcagtgaccatcgatgcaagtggcttccagcttctatgaacaccgtctccacccagtccctgaccctggcgatcgattcttgtcatggcactgtggttgctctccgctatgcttggaccacgtggccttgtgaatataagcagtgtcccctataccaccccagtagtgccctgccagcccctcccttcattcccttcattacagaccagggtcctggaaaaaaaaaaaaa

SEQ ID NO: 238675 - DNA, 498 bp, Homo Sapiens
cagtaatattgcccttacgtagttgtttaccattattcaaagctcaaaatagaatttgaagccctctcacaaaatctgtgattaatttgcttaattagagcttctatccctcaagcctacctaccataaaaccagccatattactgatactgttcagtgcatttagccaggagacttacgttttgagtaagtgagatccaagcagacgtgttaaaatcagcactcctggactggaaattaaagattgaaagggtagactacttttcttttttttaactcaaaaagtttagagaatctctgtttctttccattttaaaaacatattttaagataatagcataaagactttaaaaatgttcctcccctccatcttcccacacccagtcaccagcactgtattttctgtcaccaagacaatgatttcttgttattgaggctgttgctttagtgaatcgccgtgattttaattttcaataaacttttgcatttggtttaaaa

SEQ ID NO: 238676 - DNA, 595 bp, Homo Sapiens
tctacctatgatattctctgtagatattagttgaacatagttctcaccaaagttagctatccaaattcaggaaaagcaaaactatttttccttttctttaaaaagaaaactttgattcatttactagattgtaaacttttttttaacttcaaaaataataaaagggtatgcagggaaaaatcttcctctcacctgtcagagctactttttaaatatgaaataagagaaaacaagtagctgcttataaggtgatgtgattacacttataaaagatgaatttagaaaacaacattcattgtctaatttaaatggtcaatagaatctttattttctttctccataagacatccagcttcacagcttcatgtgctacctagaactgatgatgccacaaatccttaaatgtcctaaatggtactgttaagtgaatcgtgcgattagaattttcacccaaacagaagggaaactgattttagatgtgattgggcttcttgaggacatttctgtggtctcgttttattgtttttttttttagctttgttactatcttaaattccttggttatcagcctagcactaaatgacctttaattaaa

SEQ ID NO: 238677 - DNA, 522 bp, Homo Sapiens
ccactgtctctgttttccctcttcactgaacactcagtcggggctcgccatgatgcctctgtgtctgctggcttctcccccattggaacagccttcttggcacgccacactgctagctgctgggcactgtgctttctgcctttaccgttctgccgtgatgttgccaaaatagcagcaacaacaacaacaacaaaggctgggcacctggctcatgcctgtattcccagcagttcgagatcagcctgggcaacatggtgagaccctatctctacaaaaataaaaaatgaaatgagctgggtggggtggcgcatgcatgcctgtggtcccagctacttgggaggctgaggtcggaagatcgctggagcttaaccttgaggtcaaggttgcagtgagccgagattacatcactgcactccagcgtgggagacagagaccctgtattaacaaacaaaaacacaaaccacaaagggcaggtctgaaactcccatttaaaaaaaaatttaataaacttaaaaaaatata

SEQ ID NO: 238678 - DNA, 451 bp, Homo Sapiens
tacatgacaagatgtttagccttattggtatattcgtatcagggaaagcaaactaaaaccacaatgacagggtgatgtcagcgaaaatggtagagtaggacttctgtgggtcatccctctgcagaaacaccaaacaccttgacagaaaagtcagaatttagcttatcaaaactctggaaaggtaatcaaaggtttacagcagccaagcaaatacttcgccagaagaaagggcactgaaacaaggtaagagatctttgtggcattttagcttaccctagcctcacctcccttcctggtatggctgcagtcttgaagatgacagcctgtgttccccatgctggtgcctgattccagagagtggacactcttcctcctgagggattctgtgttctgttttgtcctttctccaaaggactgccaccaggggcaaaaaacaaacaaaaaaaccaaa

SEQ ID NO: 238679 - DNA, 454 bp, Homo Sapiens
aaaattatgaaataaaatttgatacttggaggctcaagctaagaaagctgctctgtctaaaggaaatacagaggacatggaaggtaagaaagaaatgataaaaagaaaaaaaaaactccaaagttaaggaaaatcttaagccttcaagtagaagggttctatcaagtgctttctaggattattgtgggaaaaagatgttacctagacatatcatggtgaggttggtaaactccagtggtaaagagaaattgctaccctctttcagaggaacaaaagaggttaactacaaagcaactgtaagtaggcatcagacttctcatctattatcataaaaagtagggtaaggtctacaaaatactgtaaaggagtattttgaatttagaatttcttatagagctaagctatggctcgctcatacgaaagggcaaaaaatcatccaggctgaaggtttgtc

SEQ ID NO: 238680 - DNA, 542 bp, Homo Sapiens
cagtgaattcacatggagtaatttttaaaagatatcagatacaatttgctattcaaagaaaattatgatttaaagccactttttaaaatacgagaaggaaaataggatggattaaagggttaacttttaaagattattattggttaatgttgacatatttcctctatctcatagatggtaaaagtgttgcttttaaactggcaaatgcactcttcagaaatccttttctatctgatccacatggagaggttaaaggttcaatttcatgacctctatgcaggcagcgctctcattggatgtaagaatattacctgcaaggatagaatgcagttgtgcaacagagacacattcttatttcttttttttcacaattttgttttgtttttaatgacccttttattgaatattggactgaaatataaattttaaaaaacacgttggaaaggatgtacaacagaaggctatgtatgtatatacagtatgtcaaaagccttttatttttatacttcaaatgctctaaattaataaaaagtaataattac

SEQ ID NO: 238681 - DNA, 490 bp, Homo Sapiens
gaactgggcctgccgccccggcctcacctgctgcccgcatgctggggtcccatggaggaaccaggcctggcgccccggcctcgcccagcggctggtgtgggcagctgttccctgcctcgcagtgtcctggaggcagctgtctcgcagactcagcttggtctcccgcaggcttcagaaaaacccaattgcacgtgtgggattcttccccagcccttgggtgcggggtctctgtgcacttgagagctgggggacccacccaccgtctcccactccaagttcatcccagagcgtgggggcccgctgggcacctggcacctggcctgcagatgctgctacgagtgaccagtgctgtgtggaggaggccaagggcggcccctgggaaaccgggcttcaacagtacaaggaaaagaaacttgctctgttttgtaagagcgtgttccttttcctcttttttgtcactttaaagaccaaaaagaataaagaaaaaaaa

SEQ ID NO: 238682 - DNA, 410 bp, Homo Sapiens
tcatatcacgaggatgaaaataagattaaaaaatacttagttcaatgcctggctcatagtaagtggtaagtgctcaccatattttaatttttacatagaacatgtcttactttttcattagaaaaaaagaaaatagagttatttcagtgggaagtagtggttgaggtttagagggcttaatgacatacaccgggactcaaatgaccccgccaaagggggcacatttgtttaaagggaagagtgtgaacttgtaaagtttaggaaataagaatgtagctgggctcggtggctcacgtgtgaaatcccagcacactgggaggccaaggcagggtggatcccttgagctcaggagttcgagactaccctgagcaatatggtgaaaccctgtccctgcaaaaaatacaaaaaaa

SEQ ID NO: 238683 - DNA, 583 bp, Homo Sapiens
tggagggcatctttaagtaatattagtgatctcaggcttataagtagctcaaaataattagcaaattactgagaaatgagtggtttcttatagcatgttttgaattatcgtaggttatacaatctgttttacaattggagagtagtatggactgttttgcaatgtaaatgtgatatacgtgcactggtcagtctgaatgatttcctttaatgacgtatttagaggaatcgtggtgctggacacactgctgtcttagggggactggtagaaagccaatactataatgtcaaggtgacgctgggcagtctgttcacattagccaggtaccctcaagagataccaaccaagaagttcccatacctataagatgaaggctttacggcgaaatgaatagatttcccaaagttaagctccatattgttatcagtgaatttgtaatgattctttcagcctaagttgttgaaggaaagaaggaaaggagggaggaaggaagaaaagaaggcagacacttgtatatatttctaaaggcacctttgctttcatagcaggattattagctatttgagaaaaaaaaaaaaaaaaa

SEQ ID NO: 238684 - DNA, 534 bp, Homo Sapiens
caaagcagaaagaaagccaccttgtaagtagtttcttactacaatacagattctatctagtgaacaagaaacagtttgttttccaaatatgtatgtctgcaaagtattctgacttaagtaaagaatttgataaatggtatgtgatctggttctttaaacaaatttactgaagcaaaagcttcaaagctggaacaaccaaggagtttgattttcctttgaatcttgcaaaacctatcctctgagacaaaaagatctgatcataaagtctataaaaaagtctagaaagtataaaagtatagaactatgaaagtggatatattgatggcaacttttatggcttccatagaaagtgtagagaggatctctggtttgctttatcgaggtagtgtccagggttggaaggtcatcattctttattgtaagtgctacagatgacaaaagcaggttagctagggtgttgttattgcataataatgccactatttctaatggcttatgacctttcattcctaaaaaaaaaaaaaaaaaaaaaaa

SEQ ID NO: 238685 - DNA, 481 bp, Homo Sapiens
  misc_feature (411)..(411): n is a, c, g, or t
  misc_feature (428)..(428): n is a, c, g, or t
  misc_feature (430)..(430): n is a, c, g, or t
  misc_feature (478)..(478): n is a, c, g, or t
ttgttaggtaaatgagaaaatcaggcttgatttaccaaccaccccatgtgcacatacaaacaaacacacactcacaccaaagccaggaaccctgcaacaaagttctatttaccctgaggagatataaaactttgtgactgccactaaattatttttttgaaaaataatacagaaatttgtaagcagacacaacagctctagtttatccaccaaataacaatataaatgggacaagcaaagagaaactgtaatttgaagatttttgagtgtgatacttataaaagtgtgtgtgtttgtgtgtgtagaaatgtattgaatttgagagtaatttatggaaagtgctgtcagcatggtatttcaaatgcttcgcaatttgaatttaaactagtcaatgggatcattaagattatnatgcatgttttccaaanantttgaattcaaatgacaacttaaaagaaaaaaaaaaaaaaaaaaaacngat

SEQ ID NO: 238686 - DNA, 646 bp, Homo Sapiens
  misc_feature (64)..(64): n is a, c, g, or t
  misc_feature (184)..(184): n is a, c, g, or t
aattccaactccttcagaagcagctttctatgatcaccccagttggtctgtttgccatatttcnttcatattttaaatcactatctgaaattaacatttgtgtttcccttcaactctagaatgtaagcatcatgagacaggctttgtcaagtttcccattgccctccagtggtgaatgaatagntccctcaccttctctgtacctggtctggattttgcctaacagcattaacatctaattaatgacaaggaggaaggagttcttagaggcagtagaaaatggtcaagtgttcagaagatggcctttcattatatatctttagttctttctggcagatttggttatactgtcttaatctatcaggttgggtaagtagcccagggtgtcttcaccattctttctgtatgccttatctcagcattaccatcttcctaggcttcaggataggaactcggtcatctttgacttcttttcttcaaagtcagtaagttatcaagtcctcctgattctacctttctgtgaatggtttcctgaattcatcccctgctgcttcagtcagaccctcacaatcctctgcctttagccatctgtttggtttctactttgtctcttctcaccttctcaccgaaaaaaaaaaaaaaaaaa

SEQ ID NO: 238687 - DNA, 583 bp, Homo Sapiens
tgaactttaaatgactttttaccgaggtctttactccacccctacaaaatgcaagtgggactttcagtgacattacaatatgtttataaattatatggaaatgtcatatctgtaatagtgagtttctccaacttcatatgtggtatgcctctccttttatgcaagcagtagagtcactttttttcatatagttcttagtaatagtctattaaatttatcaccataagtttctttgttgttgttatagaaaatgactttgttagctccattaagattttctgttataatccaagatatttgtaaaaccttatctattatgcatctttgtatgaaatttagacatacttgtgaaatgtaaaaatgtaccaagctttattttttaataaccaaaaagattaaatgtttattttaaattttaacttattttataaataaatatttcctcactttctgatagcttggacctatcaactaggtttgaatagagacttttatttaatgagactgaaatgttattaaccatgaaatttatacccattaaaaatattatccaagagggcctgaggggaaaaaaaaaaaaaaa

SEQ ID NO: 238688 - DNA, 743 bp, Homo Sapiens
ggccaacatgggtgaaacactgtctctgcataaaataccaaaaattggctggggcgtggtggcacgttcctgcaatcccagctactccataaggctaaggtgggaggatctattgagccctggaattcgaggatgcaattaattgtggttgtgtcacagttcactgcagcctgggtgacactccagcctgggtgacaaaggagaccccgtcaaaaaaaaaagtacttgtcccaaaagtttttgtttcctagcttagaatttataatcagattaggttttggagataaagtatatgtggtattttttttttttttttgggacagtcttgctctgtcatcaggctggagtgcagtggcgcaatttcggctcactgcaacctccacctcctgggttcaagcaattctcctgcctcagcctcccgagtggctgggactgcaggtgcatgccacgacgcccagctgatttttgtgtttttagtagagacggggtttcaccatgttggccaagatggtctcaatctcttgaccttgtgatccacctgccttggccttccaaggtgttggaattacaggcgtgagccaccgcgcctggtctatatgtgatttcaaattaggtggccttataaatataagcagatggtttctgggcaaaatcaaatgatttctgtctctattttcttgagtaccaattgtaaaaactgaaattaggttgaggaaagtgctttagaaataataaagatgaac

SEQ ID NO: 238689 - DNA, 691 bp, Homo Sapiens
aagtagaaataataaatttactttcccttttctatcaccttatgtcctctaccattttctccttcctcccttcccttattttctccttttcgtaccctgcgtcctccctgattttcctttcgtttcttctttattttatcccattctctgttacttgactcagtgctcccttcctctcctctccttctagtggatgcatgcagcctttttttcaatttttatttaaattgcaaaatttttactcagattttttttcctcttccctaattgctaagatttaaggacgttctttattatgaaactttatcacattcgaaatgtttgtttacagtgggattttaggggggattgtgtttaaatcaaatatatgtattttaaaaataatgacatgctcaaccttcctcatcatggagtaagaaaattctacatgattaaagaatccatgtaagtctaattttaaattcctagtaactagagaaaagacttatttatataaaatgaagtatttatgaactgtgataaagcatcaaatcttgatgaaggattgtagatttttgctttttctttttgtttttaaaacttattccaattgctaaattggtagtttttcagtctttataaatacaggattaaaaatatatatacagttatatgaaatgtttattttctatgtgtgtgcatatagttcaat

SEQ ID NO: 238690 - DNA, 627 bp, Homo Sapiens
cagttgtaggtttgagctgcagccagtcatttcttttattctttaaaagtacatagatttgtctttttagggctttactgaaagtaaaatatcctgacatttaaactgacagatgtaggaggtaaaaaatagagttctgaaacatttgaatttatgtgacagctgaagtcacgagatgagggatgtatgtcccccagggaggatgcagaaagaagaaaagggtactggaaacagcatgtcagtggtgccagctgagggctggaggcagccaggagagttgggagcctgggtgctgggtggagagaggttaacagggaagacatgggaagtattgtgaaggctggtgtgagcaggggactactccagccctgttggaacatagagccatttggcagattgacaatgcagtgacagctgtatataataaatgtgttgaaaggaggaaggtgaggattttcttggtgggagtttatgctgttatttaacatattttgcttccaaaggggttaagatgttttacctaaatggaggtttctaggtcagtgctatacaatatttctaatctgtgttttatagtgtgagctacatatgtaattttaaaattttcaagtagccacataataaagg

SEQ ID NO: 238691 - DNA, 732 bp, Homo Sapiens
ggggtatgcataagcatgcacgtgtgtatgaaatgtgcgtgtgtatgcatgagcacgtatgcatgtgtgatgcgcatgttcttgtgtacttctctgaggggggcacatatgtatgaagtgtatgagtgcatacatatgcatatggtgtacgtgtgtgtactttgtgtgtgggcatgtatgcgtatgagtacttgtgtgtggctggtgtatgggtgagcatgcacatgtgtatggatgcatatgtgagctgtacatgtagagtgtacatgtgtgttgcatgagcatgcatgcgtgcgagtgcctgtgtgtgtacttgcatatatgtggctgtgcaggtacccggcggtggtgggctggcagtgcccggggaagcaggtcctgctcacggcttccctgctgggccccaggccccgggctgagcctccctggcccctcttgcccctcagtggagcagggcctgggtggagggcctgggcagctccagggcaggtccggggaggccaggcttggggagcacagggggtggggttcacctgctgctgtttgttcccgaaactgtactgtgagcccacggcgggggcagattgttctgaggccccagatgtgccaaaacagcccccagggtgggggcgagcgagttctgaggagaggggctgcgggggccgggggtgggtgtgtgcccctcccctgaatggcccccaatgctgctgtttttcaatataaccagagttg

SEQ ID NO: 238692 - DNA, 646 bp, Homo Sapiens
gtgcacaaatgtccacctacagcttggtgactgttcacaaattgaactcatctaactagcctccagaataagaaacaggcctttacacaccccaaccagcctcccaatccccttttcagtcaccttctctgcagtgataaccactattctatattctgacagcatagtttcacttgttttttaacttcacataaatgggatcagacagtattgaatcctttgtgtctgcttccttcactcaatattttcctgagatttttctatattgtttattctaaatgcccattgtacgactgtaacacaatttgtttatccattttactgttcttgggcatttgggtagttctcactgtggatgctaagaagagtgttgctataaacattcaggtcttttggtaagcatatacctggctttctgttggctatttatacctagaaatagagttgctggcttataaggtatgcatatttttagttttagtagacattgcagtttgtaccaatttacccacccaccaatgtgaatatctaatattgcctgcctgtctgtacgtgtgtactggtatagcattgtggttttaatttgcattttccagtgcctaatgaaataaagcaccttttaatatgcaaaaaaaaaaaaaaaagg

SEQ ID NO: 238693 - DNA, 560 bp, Homo Sapiens
aaggcttctggaaccaaactgattaaagttttactcagtggatagttctatagaattaatgatgatgtatgccaaaaacctttcagtgattctaacttcaagcttggaaaaaaagacgaggcttcccagtgtttgtggtggtggatctgcctggttctcaatttgacaccctaagcgatcatactcaagaatagtacagatgtgtggaatacgccaatacctttaactacagacatcatgttctcaagataaaagcctttaaaacaaaaagccatcgtaggtatcaagtcaacatgaaattggaatgcaaaattaatactgctgaggatttccttcatatcccatgctgtttaactatctcttccacagtcctagaatcaatcttttttaattaagagacagggtctgtctttgttacccaggctggagtacagtggtgtcatcaaagctcagtgcagcctccaactcctgggctcaatactcttgcctcagcctcctcttcctgagtagctgcaactacagacacatgccccaatactcagctaatttttaaatttttg

SEQ ID NO: 238694 - DNA, 698 bp, Homo Sapiens
tgatttgtccattatgtgttaggcaaatataacttaagtggagggggaagtttatgaatataatatagctctgtgttttaaacctcagaaacagatttgagtgtttcagtattatagaaacagtgatgactattcatgctctgctagtctatgcctgcaactccaaatgtttgtggttcagtatttcccacctacatttctgtttggtgacattgctcattttaacaaatatgaccgagtctagtttttctttaaaaggatagtttatgagtaatctttaaaaccatttccataccatctgtatataaccatttcggtagagaacacactacactgaaccctgctttagagctgtgtgttgagctaaaaatataattttttaaaaattgactagcaaaatctatggccacactgagaagcctttgaaaatggcaaatacttttcatcaccaattgcccaattcatctttcttctgcttcctcagccttgtagcaaaggctacacagcagcccacagtccacagtctttttgggaaaattggcctgccaccttctttaagctcagtttatttttgacttactttctttgctgtagttatgaaccttggggcattaaaatcccatggcaaggagcataagagatgttctcgtagctctgcgttgtgtgaaatgtccatcttagttttgttaaaaaaaaaa

SEQ ID NO: 238695 - DNA, 572 bp, Homo Sapiens
  misc_feature (476)..(476): n is a, c, g, or t
tctgaagttatctgaaaatgtcgtcatgattaaatccagcctaaacattttgccaggaactctgcagagtccatgctgtagcttcctacctcagtccatctgcaggcagagaaggcccagtgtgtccatccccaatgcggtgatactaggatggtcacttggttaaggaggggtctaggagctctgtcccttgtaaagacatcttatttgtaagtaatttggaaagtggtgtgaaatagtataaatatcctgtattctaatgatcttcttcagaacattttatcaccaattaatcaccccgcctgtgtcagttattacatttatgtttgcacaatgaaaattttctatctcaaaatattaccttatacttgcttttgctggcattcttcgtaaaaaagattattccctgcccaaattttaactttcatccaaaattaattttaatttctttttgctggcattctgttgtgaaaaanaatattctctgccccaattatcactttcatccaaaattaattttagtccatcagttaaaattttaagttttaaatctgtttaattaaaacatttct

SEQ ID NO: 238696 - DNA, 515 bp, Homo Sapiens
  misc_feature (14)..(14): n is a, c, g, or t
tggtacgttatgancaggtcaaaggttcccaaacacaaggctcattgtgtaccctggacaggaaattgaactgatgttgacatgtatgcatgcccaggaggaagactgggaaagatttaatgagttgaagtatgctgagaaacaatgaaatatttgaaaactgtctacataaaagttactgatgcacatgcattaaaaaaaaaaatgttgttgcaaatctaacactaaaaaatttttgactgggtgcagtggctcacacctgtaatcccagcacttttgagggtgaaggcgggtagatcacaaggacaggagttcaagaccagcctggccaacatggtgaaaccccgtctctactaaaaatacaaaaattagccaggcatggttgcgggtgcctataatcccaactaccccggaggctgaggcagggaattgcttgaagcaaggaggggcaggttgcagtgagccaagattgtgccaccacactccagcctgggtaacagcaagactccgtctca

SEQ ID NO: 238697 - DNA, 603 bp, Homo Sapiens
acactacggacccactcctcgccgtctcttcgcattgcccgcttccggttcagggccttccacttcctgaaccgtccccctccgtgtacctgcgttgtaaaatggtggtgtgcagagcgtatgacccctcttcccgctgctaccgaggctgtgtgttgaggtcgaagagggatgtgggctcctaccaggaaaaggtggacgtcgtcctgggtcccatccagctgcagacccccccacgccgagaagaggagcctcggtaggtggtcgctctcagaccccactgtccaccggggcgcagacccctgactcggggacttgggatgttcctcttggtgtcatattccaactcagattgagccctacattgtgctgcacctggtcatacggagttgaatcagacctggttcccgcctcccccaaggctcatggtccttggaggacccgttgcagggcgaggtcaagagagttctgacctggatggcccatagacctgacgtcccagaatccatgcttctcatctgcaaaatgaaaatgtcaatacttacttcttagcactgttgagagggttacttacataaaggaattttggtgaaactgaaaaaa

SEQ ID NO: 238698 - DNA, 596 bp, Homo Sapiens
cagatgacaatttttggggttctgtttaaattctggcctcagttctgtgagtttaggaagaatttaacagatgaaaatattatgagtgttttagagagaagacaagaatataataagcagaaaaaaaaattggcagtcctagaagacgaaaaatctggaaaggatggaatcaaacaatatgcaaatacttcagtgcctgctatcaaaactgctttactcagtgattccttcctaggcctccaaccatatggccgacagccaacctggtgctactcaaagtatatagaagccttagaacaggagagaattcttcttaagatccaagaagaactagaaaaaaagttgtttgcaggcttgcaacctctcacaaattttaaggctagctcttcaactatgtctttgaaaaagaatatgtctgcccacagcagccagaagtgacagcattcttgtgaatgtttacatcctgctgctgataggttcaaggaattctttaaaccagattctgctgacatgagaagctccagtgatttgtttttttgaaggtctgtatcagagcaagcctaacatctaaataaagtttgattctggattttcca

SEQ ID NO: 238699 - DNA, 666 bp, Homo Sapiens
aactctgtcaaaaatatgaaacttccaggagcaatcagaccctgaagaatttaaaaaaaaaaacaactgcacccacccctctttttaatagatatttggccttctctctgagttaagcaaagagaggaagaatggcaaatagtttgagtcttcccaaatctttttagcatttgagaaaaggcttactgtgggaaaagtcatggccctttttccccctttttaatctatttaatttacaaaattgatccagttccataacagatggattattaccctaatatggattgcaaatctgtctagctatgcagtttttacaaaatgggcatttacggcttactaatgttcttatctttaggataaataaccaaaaagaagagtgataagcaaatggcaccatttagctgacactgcttgaaaaaaggttgaagaaaatttgttaacaccaactcaaggtatgcgatgttcacatcaaggccgaggactgattttatcatctcttccagggagaagaggaagatgatataaaaaattttcacttacataatgatccctttttcactaaataccctcagaaaacagctttactaaattataatgtactttaaaacataaaacacagaatcaaaagttaagctctgaaataaagtttggatttagatctccaaa

SEQ ID NO: 238700 - DNA, 638 bp, Homo Sapiens
  misc_feature (47)..(47): n is a, c, g, or t
tattgagcattttcaaatattaattttattttgggggaaaatgcccncaccaataattgcaagatctttctcaatagcttcagtttgctgttggatgcctaccttaactattgttttaaaatatagatatatatatatatatttaaaatagttttccaggtattttcttctaccttttttaaaaataaatttccaaaaatgaaaacagagtttatgtatttttgtcaatgaaggtttttattttgtagtttatagaatttgttccttatcagtttgatacttgatcaacattcttagactttttaatctgtatttactttggggggaaaaaagcactcctatatcttaaatgtccttcttttttcttttcccttttagggtatttgttctcttggattgaaatttatgcccacagatttttcttttcatttgaaaatgaatgtgaagatactgtttacagcttttgttaattgcacttttcatcactctgatcaatttcttgtaaagtgctatgggaattatttttcctgtgaatattaatgattttactactgcctccgaagttttaaaaaaggttctgtagacagaaaacagttgttgcaaccaaaaacaaccaaaaaaaaaaaaaaagggcggcc

SEQ ID NO: 238701 - DNA, 719 bp, Homo Sapiens
gtgtgtgtttgtataaggctcttttgagatgaactggtgcttgtttaatttccagctcaaatcggagcaggaatatggacaaactgctgctactgaaccctgccctgagccgaggtatttccatttggttaactaaacgctagctaccaggaaatgacgcagaagtcacgttcttcttcccactgccatcttgcctttgcattttcagttttacgtgccctttgaactttaatggtaaaacatttcacactttggatggtttgcttgtctctagtttttagaaagctcttatcactccttcctaagaaaaaagaagggcaggtaaatttttttaaccaaaaaaaaatcacacatttcataaaaccctgatgaattttggatatgtgagagggcataaacattcctaaatatggacctgtgaatttagtaaattacccccatgaatatactccttcagtgcagggatttttgtgtttttttttttttttttaatttttttgcaacagccttgctcatattccaggtgtagctagcaaacccctgtttttgaagcaagagccttatttgattcagtgtagatgtttcctgtctatcctttgtgacagggccttttaatgagtgttttttctttttgtatatgttacgtgtttgttgttgtattaaataaagaggaatgtacatacaaaaaaaaaaaaaaaaaaaaaaaaaaaaaaaaaaaa

SEQ ID NO: 238702 - DNA, 611 bp, Homo Sapiens
  misc_feature (12)..(12): n is a, c, g, or t
ggtaaatcctantttatagatttggagaaataaaaccaagaattttaagagctttcgtattagcagttttgccttataaaaactaagatttgtcagattagtttgaggtgtaacctaaatattaaaagtagattaaatttattttttaccttgagtgtctgatacataaaacccttttctaggaaaacattggaagtagtacatatttactctaaatgtctcacctgcatgacagtcttttcaaatgaaagacatggtaattgcaatttttttttaaagattgctattaagggtactttttccagccttcatttgagtaaatcttaattgatttcattttattaacatataccctttacctttaatatttcatttgaagtgttcctttcaaacttactgtcttaaatatgaaagtcagctttaagtaatgtcagactcatatgcattttcattctcattagctaaagtaaaatgtaaaattatctcaaatagttacaagttttggaaatacagtataaaacatgaatgtaaagtctattatgtaatatgcttatttgtaatcctaatatatgagggtgacatttttaagattgtatgtatgtgacaacctc

SEQ ID NO: 238703 - DNA, 535 bp, Homo Sapiens
  misc_feature (11)..(11): n is a, c, g, or t
aagattatacncaaatgagtatgctgcactttacaaaaaataaaggtaagcatttaaatatacaaaaacaactttggataaagatctcttcttaaagtactcctttaacatacacataatttatagcattttacataacttgctgaaacaaaaaaaaatgtggccaatttaaaatttactatactgtagaatatggccataacagtcccaatgggaagaacaggatgaagaataacatacgtgaggtgtttttttttttttccttcaattcttataagtatagcatttcccatttttgaaataccttcttggaggattcaatcattttttttctgtatgtgattctaactacagtgattatttttcaccggctgtattccacacacgtggaattttctttttttttttttttaaagagggtttgctttgtccgtcagcttcttcctcaggtgaacacatataacttgcttctcatatttagagctcatatccccaagagtgagatattgacagtaccttttaacccacgcgtccg

SEQ ID NO: 238704 - DNA, 582 bp, Homo Sapiens
  misc_feature (23)..(23): n is a, c, g, or t
aattctaatagagaacacggganaaagagaaacagaatacggcaggagaatgatatggttgattcagcgcctcagtgggaagctgtattaaggagacaaaaggaaaaaaaccaagccgaccccaacagcaggcgatccagacacagatctcgttcgagaagccccgatatccaagcaaaagaagagttatggaagcacattcaaaaagaacttgtggatccatccggattgtccgaagaacaattaaaagagattccatacactaaaatagagacacaaggtgacccaatccgcatcaggcattctcattcgccacgaagttaccgccagtatcgcaggtcccagtgttcagatggggagcgatcagttctctcggaagtgaattcaaaaacagatcttgtaccaccacttccggtgacccattcttcggatgctcagggttctggggatgctacagttcatcagagaagaaatgggtctaaagatagcctgatggaagaaaaacctcagacatctacaaacaacctggctggaaaacacacagcaaaaacaataaaaactatacaagcttcccgcctcaaa

SEQ ID NO: 238705 - DNA, 454 bp, Homo Sapiens
gccagatcccagacatccgagtagatcccgtgaaaagcttctacttggtttcttcgtacattctggatccacccctttcatgcatattccagaccacatttccactggagcagttgaaatgagagagatgggaatgggactcacccgaaccagaggaatttttattacagacccattaacagaggtgtcaaagtcacaggaacaaggatgtgcacctcagaaacacagagctcagtggaaaatcagtttgcttctatttgtttaaaaaatgggggacttatgcataaatctaagaccttcttgaatctaacattctaagacctgtatgccacagaaaggagggtctcagaacgccggaggatagtatttaaatcttaaatatctatattgttctccacagttactgggtcaccacatagcaggcattcaataaaaacgtgtttgtttactaaaa

SEQ ID NO: 238706 - DNA, 755 bp, Homo Sapiens
  misc_feature (124)..(124): n is a, c, g, or t
gacagctactacatggccgcttcagcagggaagtgcccgctcaagtggtacgcacccgaatgcatcaactccgcaaagtctcccagcgcaagcgatgtctgaagctatggggtcaccatgtggnaggccttgtcctacggccagaagccctacaagaagatgaaagggccggaggtcatggccttcatcgagcagggcaagcggatggagtgcccaccagagtgtccacccgaactgtacgcactcatgagtgactgctggatctacaagtggaaggatcgccccgacttcctgaccgtggagcagcgcatgcgagcctgttactacagcctggccagcaaggtggaagggcccccaggcagcacacagaaggctgaggctgcctgtgcctgagctcccgctgcccaggggagccctccacgccggctcttccccaccctcagccccaccccaggtcctgcagtctggctgagccctgcttggttgtctccacacacagctgggctgtggtagggggtgtctcaggccacaccggccttgcattgcctgcctggccccctgtcctctctggctggggagcagggaggtccgggagggtgcggctgtgcagcctgtcctgggctggtggctcccggagggccctgagctgagggcattgcttacacggatgccttcccctgggccctgacattggagcctgggcatcctcaggtggtcaggcgtagatcaccagaataaacccagcatccctcttg

SEQ ID NO: 238707 - DNA, 407 bp, Homo Sapiens
agagatcagtggtaataagttgtttgaattttcgacaccagattaaggtctctgaggtggtttaaaggctatgaggccaggtgcagtggctcacgcctgtggtctcagcaacttgggaggccgaggcgggcagatcacttgaggtcagaagtttgagaccagcctggccaacatggcggaaccctgcctttactaaaaatacaaaaattaaccaagtgtggtggcacacgcctgtcatgccagctacacaggaggatgaggcaggaaaatcacttgaacctgggaggtggaggttgcggtgagccgagattgtgccattgcactccagcccgggcaacagagcctgggcgacagagtgaggctctgtctcaaaaaattaaactaaattaaagctatgagaagaaaat

SEQ ID NO: 238708 - DNA, 539 bp, Homo Sapiens
  misc_feature (50)..(50): n is a, c, g, or t
  misc_feature (67)..(67): n is a, c, g, or t
tatctctgttgctcaggatttcagttataaaaatagccaaatcaagacanagacaattacagcttanaacgaaaagctacaccttcttcattaaaggtgagcatcttgtcacactgtgcatatggagagagaacaagtacaaggcacgggagaactaccatgtcaagggacagagctttttcaaaatattttatcctcagaagtaaaccccactaccatagaaagaaaaaaatataattagatattttaaatcacagcatttttgacttcctagggaaaaggagtttttggttttagggttttttttttcttttctggtaaggcaaaatagatctttagatatcatttgttacaaacatgagtttttcttaagaatgaaataaaaattctatttaacttctatcatatatttattcaactaagttgaatactatgtttagaaaattaaagttttaaatcatggtttatatatagataatgatacatttaatctatgaatttactttaaaaccacttttattttgaaatacttaagactc

SEQ ID NO: 238709 - DNA, 530 bp, Homo Sapiens
agttagccaccaggactcagccatttccacctgaaaccagttttgcacctattgttttgattttgaactgtctttcgaggggaggagggagcccggcgtactggggagaatatgtggtgggaggtgggatgtgaggaggagctggctgggcttggtctcggcctcaggatgccccctgttaacccctgtaggataggggaaagaggtgcagcgagttgcaccttccctaaagggccagagattcgtttatagcttgcgaatctctgctttttcagcctcggtaaaggggtatcatttgtggttggtttggttcgtcccttaacaacattcttggtgaggaatccccaggtgaatctgccacggagtgaagcagcccacttgagctgttggctacccccggcccccgcaacgcccgttggcttttgtgacacgttacacgttagtgttggtagagcctagccgtcagaggtacctgtaccataagcatctctacgaaaggtgtgaattcctaaattagcttattctgttct

SEQ ID NO: 238710 - DNA, 281 bp, Homo Sapiens
tcgatacgactttttttttttttttttttttttttcaatgagaatacccattatggtggactggacaagtatagaattcctgttgggaagccagtattgcaaaggggagacatgatagactcccatttagaaattgactgtttaatcctaaatatactttgaatttattgtttgttacctgttcaaagtttgtcactacccattcttaatttggagagctccagcaccaaataacccttctgtcgtcttctcgcagccgtatagtagtagtagacgaccgc

SEQ ID NO: 238711 - DNA, 446 bp, Homo Sapiens
caaaatcaggagtccttcgggggcagattattctgtaataccactttcattatcagagaactctcgatacaaagtgttctacaaaactacaagaagaatcaggctagccttttaaggacatcatcaaaaatcaggcctacccaataaaggcagaggcagagctctataaaatttggtgaatccaggaccacttaaacaagtcagacatatagatgatggaagacatgggacgtgaatttcttctgctggctttctcattcctcctattctatcacttaaagcatttacctgccagcccccaacatcccagatctctctccactacccttggagagctcatttcttctcctggctccaaatcttgcccctgtagacacctatcccttatctctgtctgccacttagatatagcaccatcaccttcaacttagtaggttgagaattga

SEQ ID NO: 238712 - DNA, 346 bp, Homo Sapiens
ccgcgtcgacttttttttttttttttagagatggggtctcgctcagtcacccaggctagagtgcaatgacacgacatagctcactgtagcctcggactcctgggctcaagcaatcctcccacctcagcctctggagtagctgggaccacaggtgcaagctactatgcctgtctctattataccttacatacattttcacagttgtctatttccttattatcatttgtctcttcttactgtgttcactgtacccacttgttttaaatatatttattcctcgccttattccaaagtctttatcggttttatagattgcatttaaaatctgatattttgacgtcgacgc

SEQ ID NO: 238713 - DNA, 531 bp, Homo Sapiens
aactcttagaatccaagtgactcatctgtgtgcttgaatcctttccactgtctcatctccctcatccaagtttctagtaccttctctttgttgtgaaggataatcaaactgaacaacaaaaagtttactctcctcatttggaacctaaaaactctcttcttcctgggtctgagggctccaagaatccttgaatcagttctcagatcattgtggacaccagatcaggaacctcaggcacgtgggaaaggccagataattaggagggatgctgaagagaaagcccgatgaccacagcacggtgatggtttaaaggccttgaaatttggttaccatcattccccaacccaccaaccgcccatgggctgcattcaccagcacgcactggcagccgcagccacccgttctctttccttgcattgctgagcaagtttcccatatcattcagttaggctcagctctcacacatattgaggaatgatccctaccactgcgtcgacgcggccgcgaatttagtagtagtaggcggccgct

SEQ ID NO: 238714 - DNA, 521 bp, Homo Sapiens
gctaaggcaagagaattgcttgaatctgggaggcagaggttacagtgagccaagatcgcaccattgcactccagcctggtgacaaagcgagactctgtctcaaaaaaaaaaatttatgctcacctaaaacacttgtgcctagatggagtgacaaatttgttacatatagtcagtaaaaatttcaaaacatacaggacaataaacacttaaaatgaacatttcaggctgggcgcggtggcttatgcctgtaatctcagcactttgggaggctgaggcaggaggattgcctgagcccaggagttcaaaaccagccttagcaacatggtgagactctgtctctataaaaaaataaaaataaataaaaactagtcaggcattgtggcatatgcctgtggtcccagctacctgggaggctgaggcaagaggatcacttgagcccgggaggttgaggctgcagtgagcagtcatcataccactgcactccagcctgggcagagaaagaccctctcaaaaaaaaaaaa

SEQ ID NO: 238715 - DNA, 490 bp, Homo Sapiens
gggactgaacagtggtttcagagtttagattctgtgatagcaggtgcctcccttctcagcctcaccccaaccctgggcctctgagccctggcttcttgggaggaagcgcacacagggtgccacagcactctaccgggtctcctctagggtagccaggacagaaggcctgcatggtggaagactcccactctatacttgcttttattttccagctcctcccccagttccaaaggagtggtggcttctcaattgcatggttgtgagcaaggaaatttcttgcaggatcagggatgtgaagaggctagcaggggaggggaggtttccaggctgccttgggaagtgtggtttggaatatgaattccggggaaggagggaagaagaagatgggaagagatgggaaacaacctcatctttggggctctggaaatctgagacactgggcagataatccacttcctaaagcctagccccaaacactaatttgagagag

SEQ ID NO: 238716 - DNA, 497 bp, Homo Sapiens
aatctcagaaattaccactaaagaatttactcgtgtaaccaaataccacgtattccccagaagcctgtggaaataaaaaattaaaaaaattgcaaatgtaaataagacagtaacaaagatggcaaagaacaaagatgaaaaagtatgctgtattacctgaaagtgcttttatggatatcttagcttatccttcgtccatttaaatattgttagttttagccgggaacatgcctgtagtcccagcaccttgggaggctgaggcgggcagaccacttgagaccaggagtttgagaccagccaggccaacatggtgaaacccgtctctactgaaaatataaaaattggccgggcgttggggcgcatgcctgtggtcccagctatttaggaggctgaggcgggacaatcgcttgaacctgggaggcggaggttgcagtgagacgagattgtgccactgaactccagcatgggtgacagagtgggaccctgtatccaaaaaa

SEQ ID NO: 238717 - DNA, 531 bp, Homo Sapiens
agatgatgattctgtgatctctctaagtaccttaactgacattctttctataagtagcaccataattttgctaatttttcttatctttatgttgaccagtttgttccactttttgaagtaacttcattgaactttctgctaacgtatcctttccatattcccctctctcatccctgttctccttcagtctgctaggtcaaagtataaggattctcaaaaatgcagagtaattatgaaaattctgtttaaaaagcttcagaatagaatgtttatatagcattgatttggagctaagggctatattctggtaacataacaaggtgctatctagtgaatgtgtgattgtgtagtcatggagctgatgtccctgccatagaattacagaattatctaaaaagggaaatctataataatggccttcaatgctcccacacttggactagccattgccataggcagaaaggcaatctcatctttactgtgtgtgcaaacagtactttaatgtaatgtgtgcttaatataagctttctt

SEQ ID NO: 238718 - DNA, 459 bp, Homo Sapiens
aacatgattcagcacactttatgtcttctgaagtatttctatttccttcttttataaaacctactatttctatcttatttttaaagatcaattgcctgcatgttttcagagccctttcagaaatatctttggttattactcatctgtgaaaaggaaatttaaacaaagtttgagaactgttcatttctcaaaaaagacagtggaattgagtatctgtttcctgggatgttaagtcagcgtcaagaccaaattcatgagattgttttccaaagagaagacaggagtaatacgaaagaatgactgaggtttcatgaactgtatcagcttcctggcatgagagcactcgactttatatagtcggatactgtgagtcagttgacattgttcttaagaaaacttgtttttgttagcatctcagaatttgccagagccatattacatttaagtcttgatcgacgc

SEQ ID NO: 238719 - DNA, 550 bp, Homo Sapiens
atgggaggtttactgtttgaataacatattagtatacttaacattttgaatctagtttaaaggaatatggcatactttgtttaaaatcagcaaatacttgcaattcatacacagaactttacttattcactaacagctatagtttttcatctctaagccctcaaagactcgttttgttcctctgcttcatcctccatccacatttgcatcctccatccactgcgtaatccgtctttgggaatagcttgtaaatgccctgggtattgtgaacctctgaagttgaaatctcacaatgcatctctaggtgctaagtgcatttctagggtaaaattgcacaatgcaagatgcactgtgataaatgtaagacagtgacattcaatttgaactgcatgaaataaatcatttggcaaagtcctgaaaggcataatatgtcatttctgttggttgatgtaattagaatttgtagcttaatccaaaataaccaaaagttaatagattagaatagaaaaaaaaaaaagtcgaagcggccgcgaatttagtagtagtaggc

SEQ ID NO: 238720 - DNA, 413 bp, Homo Sapiens
cggcggcgtccaagcgggcgcggacggcgtacacgagcgcgcagctggtggagctggagaaggagttccattttagccgctacctgtgccggcctcgccgtgtagagatggccaacctgctgaacctcagcgagcggcagatcaagatctctcctctcaccacgcgcctcctcctcagggtagaatccaagaagcgcccaaattaacacaccttacatctttgtaggtaattccccccaaatcttgattttttttttcctcaatcatcggtttcttccacgaaacctaaacttctcaatcctcttccggagccacaaagaaggtgtcacgtgacccgaagcccaaccaccattgggtctttttcaaagagtggaagcctccttcgactccctcttcctccaacgcggagatcc

SEQ ID NO: 238721 - DNA, 465 bp, Homo Sapiens
aactattttatatgactgttctgtacaaacaaaaagtatgtaatacccattttaaaaaaccatttgaaagtagacaacttattccaaaatagcaaatgcagaatctctgctcagtgagcttggatgagtggcttaacttctctgggcctttgttcctatctgtaaatgagaaagtttgtagatattgccaagatttcccaggctcaatacagtgtaattattttatgttttaaagatatgaaatctgtttactcaaccaattttttaaatgtcatattgtgataatgctctgcttttgcaaattgtgtttgcatgtcattagttatatcaaatagttttgtggcatggggtagtggagcttccctccccacccccatatgtatcagtgaagcctttgaaattacttaaggcagtctttcatggaatgttttgattgagcaatgaaataaacagtcctccattttg

SEQ ID NO: 238722 - DNA, 606 bp, Homo Sapiens
aagtacccgtgtcttcaggtgtttgtgaacctcagccatccaggtcagaaagctctcctacattataatgaagaggctgtccagataaatcccaagtgcttttacacacctaagtgccaccaagatagaaatgatttgctcaacagtgctctggacataaaagaattcttcgatcacaaaaatggaacccccttttcatgcttctacagtccagccagccaatctgaagatgtcattcttataaaaaagtatgaccaaatggctatcttccactgtttattttggccttcactgactctgctaggtggtgccctgattgttggcatggtgagattaacacaacacctgtccttactgtgtgaaaaatatagcactgtagtcagagatgaggtaggtggaaaagtaccttatatagaacagcatcagttcaaactgtgcattatgaggaggagcaaaggaagagcagagaaatcttaagacggtggccaaattaaagtgctggccttcagatgtctgtgatttctgcaactgaggacctaattatgcctgtctgcaaactaataatgtaaaaggtaataattaaagtatcatattttcatgtgggaa

SEQ ID NO: 238723 - DNA, 390 bp, Homo Sapiens
ggagagtccgtccgggaggaccgtgtgaccctcgcagaccggggacccaaggagaggcctcggagagaggggaagccgcggaaggagaagccgcggaaggaggagagacctaagaaagagaggccgcggaaagaggagaggccacgggccgccagggagccccgggaagccctaccccagcgctgggagtcacgcgaagggggccaccggccgtgggcacgggactccagggacgccgagcccaggaagaagcaggcctgggtgtccccgaggcgtcccgacgaggagcagcggcctgggagtcgccagaagctccgcgcaggcaaggggcgggactgagccggccccgcgccggagtccaggggccccttctgcacgccccgcgactct

SEQ ID NO: 238724 - DNA, 464 bp, Homo Sapiens
ttggagaaaatcagatatacaaagaaggagtggatgggaatgatgagaaaaaggaaataagaggggaaaattaaggatcttgcggaaatgaaagaaaaacaagacaaccagcctccctcatctccctctatccattaaagaaacttcagaagagggcactttgaagctatttgtgatattactaggaatagaagagaacagaccacatccatataaaactactttacaaaacagaaaatgcaaatcagctcatttcaggtaatgaaaatatttcccagaaaatcagtcacaaagcagaagaaaattgtaacataacattccaaactgaatcagatatcctcaaacagttaaggaggatatgaaaaaaccatgtttaatcagaaatactaaaatcaagaacagagatggaccaaaaaaccccacaaagaaatgaaaccaaaactgacttagctcaggatagaagt

SEQ ID NO: 238725 - DNA, 519 bp, Homo Sapiens
tgaagtctccacccaggagagacctgtgaggtgtgggaattccatgtttgcacagctcccatctccctggaaagaggaactgatgtttgaggggacagatgtgggtcactttccctggcagtgccctctagccttgctgccttggctttctgaccccttccaggcttcaggggcctgggagatctcatgcctcagcccaggaaacatttaatagggaaagcagagacatgtcatgtcagccccacagacaagaatttctagagcacttgtcctgttgttccttgccccgacattactcagtctgggccatggaatccatccaataaacacagcaacaccctatgctactgaccaagcaaagcttgcccctggtaccaaagagctaaatcatgaccaaagtgtgacatgaatgtaactgaaatgcgggttagttgctcaatgtatgcaaagtcccacggacaagagtaaagtctgataccaataaagtgaatgtattccaaaaaaaaaaaaaaaaaaaaa

SEQ ID NO: 238726 - DNA, 623 bp, Homo Sapiens
ctttttttttttttttttttttttttgagacagactctcgctctgtcatccaggctggagtacagtggcatgatctcagctcgctgcaacctctgcctccaagtagctgagattacaggcgtgtgccacaacactcggctcacttttgtatttttagtagagacaaggtttctccatgttagccaggctggtctcgaactcctcacctcaagcgatccggccacctcagcctaccaaagtgctgggattacaggcgtgagccaccatgcctggccaaagctcccccttctttctgggagagaaaaggattaagtacggtggagcatattctccagtccaagtcttgggcctcaggctgtgcccagcttcctggaacaaaagcacgcacccccagggtgctcagaggcctactttatctgactgttaactagcaaaactaaaccaactacatttgcaaaatgccatatggatgttccaaactgcatgtttcaagctggacatggtaacttttttttttttttttttttttcttcaaacagggtctctgttgcccaggctggagtgcagtggcctgatttttgcccacgcgtccggcgagcggccgcccgcgatctagaactagt

SEQ ID NO: 238727 - DNA, 617 bp, Homo Sapiens
gcctcccgagtagctggtattacaggcgtgccacaccacgcctggctaatttttgtattttttttttttttttttttttagtagagatggggtttcaccatgttggccaggctggtctcgaactcttgacttcaggtgatccacctgcctcggtctcccaaagtgctaagattacaggcatgagccactgcacccaggctgctatttctaattttttaactgctcaaaataatccataggctaaagtggcatatattggggtggcacatcctgatcccctttacatcccagactaactctgatagagattctagccctccctgggctcattagaaaagaagctctaggcacattagaaacatctcagtcatttaaaattctctagcctaggaaggttcaagttaagccttccaaacaattggagttcactgcggcctaccatctgcaactttttcatgccatacactcatttctgatgggcacatctaattctgtcttaaaatacaagacaatactgaagacacacaaacctatacatccaacttagactctgatgctccatggttggattccttcttattcactgaacagctcttttggaagccctcagacagctc

SEQ ID NO: 238728 - DNA, 624 bp, Homo Sapiens
caagaggcacaaattcccagatgaattttaattttgtttcctctcagacaagccattcagaaataaaagggaaatgaggttcatttaagtacacaatttgtaaatgtggaaacagtagtaattgtcatgattattttatattctctcttaacagtggctctaaaaacagcccaatgattcacacaactagcaaagcaaaccaaactctataaatgtatgagaaattaagttgctagcactgaaacactgggtttggatatggacaaggatgttgtctctgacttgtatcttttgggtaccttggtttttgatattttgatgttcaagcagaaagcgcgtgactttgttttatgcaataaggtgatgtaagtgtagaaaatgtgtagggatgaaggaaattccaagttacatgtgtatacataaatggctttataaaatacatatatatagccattaagatagttacatagggacaatgcaatttaaaacatttatactcctgcttacagattgccaagtctaatcatcccttaagtctttttcaataatgacataatttatttgcttaaaggttcctacatcgatgttggtatagtatcattaatatactacactgtattaagg

SEQ ID NO: 238729 - DNA, 344 bp, Homo Sapiens
ctgaagactctgtgggaggaccattccttacctcttcctagcttctggtattcccatccgaacaaccttggacaactcaacaactgttcaatatgcaggccttcttcatcacctgacaatgaaagccaaaagcacagttcgtgatattgatcctcagaacgacctgacttttcttaggatcagatcaaagaaacatgaaatcatggtagctccagataaggaatatcttctgatcgtcattcagaatccatgtgaatagacctgcgatggccaaggctgtttaagcgacactgggttggaaacacttggctctctcatgagtattaaaattctatttcaatcta

SEQ ID NO: 238730 - DNA, 577 bp, Homo Sapiens
tttttttttaatctgcaaagtcctttgcacaagtctcccaactggtttggagttttcccttctgaggtttttcaccctattcttcgtagaccctggggagaaaaaacacatgtgtaagtggctcaggacatgaggcaggccgttcacaagatgctggctaagcggcttcattcacgtctggtctgcagggaatgcccctgtcccagaactgcaggaacccccaggagaagtgggagggatccttctgaggatgtggtcccggggaccatgaaaactcacaccagtgtggctttgtcttttctaaccatctgcaatctcacttctgcaatctcattttgtcctcagaggcctatggaacaaacccgctttgcatatgaggaaactgaggcaccacagacttaagatttgcccagtggccaccgactgttagtggcaggaatgtagtctttctctagcatggcgggctgctcccacacctccttgtttctttccgcgtctgtactcagcctctctatttagagaaaatagcaagggtgggaggcattcccttacttgacttaggcttgtatatttcttt

SEQ ID NO: 238731 - DNA, 584 bp, Homo Sapiens
gcatatattgcttgatttaatccaagactcctggtccttcaagatgcaactcaaaagatatactggtcaaatacacttgaggaatacagcaaattacagatggccttttcagtgatctacagtgacataaagctttgagacttcctatattaactgtttaactcagtatttcccaaacccatctaaccatttttttcctcttatgacttacaagcatcccagagaactaatgcttcatggaacacatctgaattgtctgaatgccaatgaccccagttcacagacaaccagacatccccacccaccccaaactgagcagtgttccctgtttactgtctccacttgatgcgtcttctaatttccctgggttaccatcacttgtaatgatgtgtttttcatgtgtacaggtttcacagcactgtcacacctgttagttatctcagttagattttgatcctcacaaccaccctgtgaagtactggacaggtaaggcaagcattattattctgattttaaagacgaggaaacaggtttgaatcaagaagtgaccaggcccagtagtgtgctggtaaatgttgaacaac

SEQ ID NO: 238732 - DNA, 627 bp, Homo Sapiens
tctacctaccagtgcttgcctgggtctttgtgcttccattgctgtgatgccaccattcctaggagaggcagagaccagcctctaaagcacaagccaaaaactgtgtgaacggtgaactttggagtgaagatcaatcttgcacttggtgaagagtgcacattggacctcaaggcgaaagccagtggtttgcttggataaaatgttcccgcatgaggccacaggactgaggatgggaatttggcagggcctgagaagatggtctgacttccaggcttcctggtcaaagagagctacgtttgggcagttctgcagagaggatcctggcaactagtcccacctgactaggcctttagctgaaaggatttcttgacctccttgactgcctcagaggctgccaggtcaaaccctcttgtttatgtgattagctcagagcatctctatgaaatctaacccttcccctcatgagaaagcagttttccccaccaacagcatagtcaatgagaaaggcaactgtacgaagaaaacttccagtggaactaatatgaaatctatttgcaaattatggggggaaataaagcttttaaattataaaaaaaaaaaaaaaaaaaaaaaaaaaaaaggaggggg

SEQ ID NO: 238733 - DNA, 604 bp, Homo Sapiens
gttttgtttttttattttccttttttattttttccctccactatattttggaagcacttgttcttatgtagaaattacagttatatagttagtgctgaggacaaaattattttaaacactactgatcacctaagaattctatctttgggcctgtctactatgattttagaaatttccaccaaatgatacttgctagttaaatgcaagtatctgtgattctggtaggtcaagtggtaaacttgtctttgtgacacagaatttatcattttacactaaaaaatttataagaatatttctcccatggcctataagcatacctgttaacactttttagatttaaaatatataaaatgactcttcaggcatctttttccatactttgaaaacacactagtaatggtaaaaggagtagctgttgctatcttgattctcctataatacccattccatctgatctgtatttctacccttgctgcagagggttaattaaaaagatatgcatcaaaacatttgcttaaaagagacatagccctttgtttggtgagcaagaattacttataatattaatacttcctgcctggtaaaatactatattttaaaaaat

SEQ ID NO: 238734 - DNA, 604 bp, Homo Sapiens
gagagaacccattatccagatgtgtttgcccgagaaagactagcagccaaaatagatctacctgaagcaagaatacaggtatggttttctaatcgaagggccaaatggagaagagaagaaaaactgaggaatcagagaagacaggccagcaacacacctagtcatattcctatcagcagtagtttcagcaccagtgtctaccaaccaattccacaacccaccacaccggtttcctccttcacatctggctccatgttgggccgaacagacacagccctcacaaacacctacagcgctctgccgcctatgcccagcttcaccatggcaaataacctgcctatgcaacccccagtccccagccagacctcctcatactcctgcatgctgcccaccagcccttcggtgaatgggcggagttatgatacctacacccccccacatatgcagacacacatgaacagtcagccaatgggcacctcgggcaccacttcaacaggactcatttcccctggtgtgtcagttccagttcaagttcccggaagtgaacctgatatgtctcaatactggccaagattacagtaaaaaaaaaaaaaaaaaaaaaaaa

SEQ ID NO: 238735 - DNA, 541 bp, Homo Sapiens
tttttttttttttttttttttttttttttttttttttttttgagatggagtctcactgtcacccaggctggagtgtagtgctgcgatcctgactcgctgcaacctccacctctggagttcaggtgattctcctgcctcagccttccgagtacctgggaatacaggaatgcaccaccatgcccggcgaatttttctattttcagtagagacggagttttgccatgttggccaggctggtctcgaactcctgaactcaggtgatccacccgcctcagtctcccaatagattacatatattattaatgaattgcttcctttaacaccctattcattgaattttccagtaaaccacaattactaattactcctgaaatcagaaaagaggttaaaaagattttataacagtatcctatgaaatctactactttcaagtaatagtagttgaattaccaaaacccgtcactcaagccaatgactacaattaagatatgagtaacatttcctagataaataaagtcaattaattatatttgcatctggg

SEQ ID NO: 238736 - DNA, 619 bp, Homo Sapiens
actttttgtagacatagggctctgtatgttgcccaggctggtctcaaactcctgatctcaagcgatcctcctgccttggcttcccaaggtgctgggattacaggtgtacgcacctggccttacatatattaccttaatggaagattttaaataaggtagtatttctctatagcagtggtcttacctgggggttacttttgtctccttttccctaaccaggagacacttgacaatgtctgcagacatttttggttgtgggattgtggttttggtggtggggtactacttgcatgtaggggtagaggccagggatgctactaaacatcttacaatgcacaggacagtctcccacaataaacaattaccagccccaaacaccaacagtgctgaggttgtgaaacttcattattctgcagggtaacttatcttcctaaaagatttaaagtattaatatattgcaatgcttaatatttttaaaaggttagtaatttaacattataacattcatgtattcattactcaattgctactgtaatagatgcagtagtaataataataacagtaaagatgttaacattttttgaggcattactatgcaagttgtggctttgggctaaag

SEQ ID NO: 238737 - DNA, 546 bp, Homo Sapiens
cttttttttttttttttttaaccattaaaagggaattgctttgtggttataatatgtttcttgcaacttagtaagccttaacatgaaagtgtctgctgaacgacctgaatggtaaatatatatatataaatgagttaatgcatatgaagcatttagcactgttcctggcaaataagaggccttaaataaaagacagcaactctaagactcaggtaagatcacctccttcaaataaccccagaaacaccttccttacagataccctcttttaatttcagcccatggcttatgctactacatttacagattgtgagttcttagggaccagaaacctggtgagatgggaagggtggtaaaagacaaggtcagaaaaggcagggccagatcgtataaggctttagtccaagaaaaaagactggattttattctgcatggaatggaaagccattgaaaggttctaagcaagaaagtaaagtgttctgatttatatttttaaaagattaagctggtttctgtgtagaaagctgttttgcttggtttgggttg

SEQ ID NO: 238738 - DNA, 597 bp, Homo Sapiens
ctttttttttttttttatttcacattttttaatataaagattgtacacaagtgcactatttcccatttgcataattcaaagttgcatcagacactcccgtgtagactataaatatgcacagaagggacagactcctcagaatgaaaaggaaggcattttggaggttcccctttgtcttttggaatgactctctaagtagtgtagtctctgtggcaggggctccggaatccctacccttcgggttcagggcttcagggagggagttgggccacagtagttccgggatgacagtggccacgtgagagaagaaaacagcccgaggagaagggaaggcacgggtgtgtcccccctcactgtgtacacacatgtcctggctgcacagctgcttcattcctctagtgcctcccaagatcagggcaggccgtgttgccctctggacttccaagggggaagtgagttactggcccaagtcactcactcatcaagaacactgaagccaggtctgctgactccagggagagccttgtagattgtgaggaccgaatgcatataaagtccttagtcaacaccagcacatggtaggtgctaacacatgtt

SEQ ID NO: 238739 - DNA, 603 bp, Homo Sapiens
cttccttagacagtaggaagtattgttctccctcagagatgggacaaacaggggaagtctgggaaagacccttgggtggaatagggtggggccaggctcacttggagaggaatacaagagcctacctgcatggtgagaagattttttatttgaaatatagtctgagcaacatgagtgtagccaagaggagtaggggctggcctgcctggggcagcagcctctcaaatggcacgagagcagtacaaatattccaatgtctgtgtgccccaaccccacctgtcaggaaaggcagaacagcagaacaaagacccacccacagcgccttctcaaggggtctggttcttggtgcctgcctgcctttgccttacctcctgctctgcccaggttccaaacagaggtgtgcagcagaggtttctcccaccccacccacagagacatgatgagccagtgtgacaattagttctcaggactattttgagggaaaagaatcagagaagacagggaggaggggcaaggtgatcaagggccctcgccaaaccagactaggcagagctctcccagagggactgtgtcagcacccctcatttccctccttctcaggat

SEQ ID NO: 238740 - DNA, 542 bp, Homo Sapiens
agcacttggactacaggtgtgagccactgtgcctggcccctaaagtatttttaattaaggtatatacattgtgttttagacacttcgcagcctacagtacagtgtaaatcctttttttttttttgagacgaagtcttgctctgtggcccaggatggagtatggtggtgcaatcatagttcactgcaacctccgcctcccaggttcaagcaattctcctgcctcagcctcttgagtagctgggactacaggtgtgcaaccccacacccggctaatttttgtatttttactagagacggggtttcaacatgttggccaggctggtcttgaattcctgaccttgtgatccgcccaccttggcctcccaaagtgctgggattacaggcgtgagccaccgcaaccggccctaattttttttttttttttcaattttggctcactgcaacccccacctcccggttcaagtgattatcgtgcctcagcctagcaagtagctgagattacagggacctgccaacgtgcccggctaagttttgttattttt

SEQ ID NO: 238741 - DNA, 622 bp, Homo Sapiens
gcgttgctctctgaagggacccacatgtgggtgtccacacccgtgtgtttctgaccaggctggcgcagcaggtcaccacccgacatgtccctggcgtgtacccctgccacccaggtgctggccctttgcctgtgatgtggtgtccctctttctctctcttgtccccccagctcagggccctacccccagcactcacctgaggcccgacctccaagcaggcctgggagggaagggctgtataccgttgccatggataccagcacccagaaggggtggggctgtttgttaccaggagcctccagggagaccccagaccaggcccctaggtgagttctgggccagcccagcctggaggaggtgtgagaggctgagccactgctcagcttagcggggggaccacttagtgaccaacaccctgagggaggccccagcatcccctacctagcctggcagcagcagcgggataaataggggggcactgctgcctgtgagccagcccagcatagccatgggtgtgtgggggaagcagacaggtaacagtgacaagctggggactgtgctgaacgctaactggcaatagtacactcctgcccacagcctgtttttaaattaataattaatt

SEQ ID NO: 238742 - DNA, 539 bp, Homo Sapiens
agtttgatttagaattgttttatttgtgttcctcatgctacaacacaaccttcaaagtcagcgaagtttataacattaatatgcttcctcaaaacatcaatttaggcaacccatagccagagcttctaaacttctacaatgcaacttcaacattcacaagagcacaatatgcttcaaatcccatctcaatgcaaatttaagaaaagcaaagcaaattgtattatcagtctaccaaaactcagtaagattctgtaatttaatatacctacttctcaactctctaaatttgtttctcaacactggggagtttttaaagatatcaatgcctgaattctactccaagccaattaaatcagaacaattaaaatcagaatctctgtggggcatctttttttttttttaaagcttccccagcaacgtcagcaagagttgcaaatcactgctcaacagaacctcttacgaagcaaaaacataaagaaaaataagccgggcagagtggctcacgcctgtaatcccagcactttggaaggcagaggcgg

SEQ ID NO: 238743 - DNA, 578 bp, Homo Sapiens
tgatagttaaaatgtatatatatcctagtcccctaaccaaatcctgacctattgggatacttataaaaatttaagtaagtgggatacacaaagaataataactattaacttttcattattagcaaaaacctaagggatttaaactaattgaaactgtatttgattggacttaattttttatgtttatttagaagataaagatttaaagaagacctttacaataaagagaagaaatatcgaagtcattaaaataaggagacttacttttatgacattctaatactaaaaaatatagaaatatttccttaattctagagaaactagttttactaattttttacaacttcaataataccatcactgacacttacctttattaattagcttctagaaaatagctgctaattaggttaatgaacattttaccttagtgaaaaaaaattaattaaatatgattacaaagttgcacagcataactactgagaggaaagtgattgatctgtttgtaattacttgttaaaattggcgtgtataaaatacaaaatttacattaaactctaaatcattaaaaaaaaaaa

SEQ ID NO: 238744 - DNA, 570 bp, Homo Sapiens
gtcagaggatggaggtccctgtctcctagctgactgtcaaatctgatcctttagaggttgctccgtggtccttgcacgtggtcccttccaccttcaaagcttgccagggtgcatcaaattatttttatactttgactctacttctaccagccagagaaaactgcttttaaagggctcttgtgactagtttaagcacacccagattgttaaggtcaactgattagtagctttaattacatctgccaagtccctctgccctgcaatgtaacatcacccatggaagtaacatgaggggcagagttcatgggggccatcttagaattctgcctaccacaaatattcgtagttatacttttatatacatttttaaatttttcttatttttggtccatatgtttgtaccgtttgtctttttagttaactagtttgtgaaagcattttgtatgttgtacaatatatgttcagattttcttatcttggatgcaaacatttttttccaactcttgtaagttgtctgttgaccacattcaaaagtactttttccaaataaaactttgccttttgaatttc

SEQ ID NO: 238745 - DNA, 622 bp, Homo Sapiens
  misc_feature (31)..(31): n is a, c, g, or t
cacactcactcagccacaggtacgggccagnggggtctttctgcacctcatcccttaatatgtcacagtttgtgtgatcagcgtcatttccacctatggggcaactgtgagccattaaacctgaaccagaagatcgagagcctaactttgcaaccattggtctgcaggacatcactttagatgatggtaagttcatctctgatatgttcttgaagtagtgaagattcagggactttattctcccaagtgtcatgaaaaagtttctatggattgcttattggcatatggttgggcttttaaataagttgttattagaaatatatgttaatatataactttgccaggtaccacggctcacgcctgtatcccagcactttggaaggctgaggcgggtggatcacaaggtcaggagttcaagaccagcctggccaacatggtgtaacgctgtctctactaaaaatacaaaaaattagccaggcatggtggtgtgtgactataatcccagctactcgggaggctgagacaggagaatcacttgaacccgggaggtggcagttgcagggagctaagatcgcgccattgcactccagcctgggcggcagagcaagactccgtctcggga

SEQ ID NO: 238746 - DNA, 478 bp, Homo Sapiens
  misc_feature (6)..(6): n is a, c, g, or t
  misc_feature (12)..(12): n is a, c, g, or t
ccttanaatganaagcaaagaaacttcattgcggagattgtcttgtttttctcaaaatgggataattttgcttaacataagtagtatcccttccttcctttccatactttgagaattaataaggactagctttttgatcacacagcttgataaaattttcaagggtccaaattactgtctaaaccatttgccactctttgtgtatatttgtcaaaatctgcttttctatatcaaaacttttctctcaagacctgagggaattaattaataaggaatccttggaacactggaaattctaaaataagagtcagatacaaaacactggtcactaaaattcttacctttatgtattagaatggcaatcaatgaacaaactgaaaatgtctttggatattatttctgtttattttttgcctcaaaattattaaatgacatgaaataagtgctcaagaagaaaaataaacaattcttcatttcc

SEQ ID NO: 238747 - DNA, 558 bp, Homo Sapiens
gcacttctgtgcggtttgaacaacaaaaagcaaaaccacagaagaacacatcatatgcaactaatgatctcattatttaagagtcccctgttacttctttagtcatttcctttgactctgctacagataggattataggatgatgcttcaaaggggaccttgaacctattcaccattatttgtctctttaagctggcaaacccatcattaaatagcacataaaatagcaatcatatgggataagtagtacagcttcagtaatcaatgggcagtggcactagaaaaatcttgagcacagtgaatgacctatcctgcaaacatctaatggatctctaaagggtaacaaaccctataaattctggcttactgcacatatttagtgtgttttaagataggatcctaactgtatatatttataactaatgtaaggaccctactttattgccaaaacctatttttatccattgtctcatatatataaacatgtcatatatataaacatatatatataaacatatatgtatatagtaaacattcaataaattgcaacatattaaa

SEQ ID NO: 238748 - DNA, 481 bp, Homo Sapiens
agcttataacatcagtatttcccacacgaatttactttgccacgtagatagttccagagtgttaagtgcccagtggaaatgaaaatacttagcactgccctccgggaccttatagatcaagcatagaactcataaaaatggtggctgggttgaaaattctcattaatacacagtcaaaggattattttggttttgcttttttaaggtgaaggccttttttgggtcaacgtgatgttttataaatgagtaatgttaggccaggtacaatggctcacgcttgtaatcccagcactttgcgatgccaaggtggtagatcacttgaactcaggagttcaagaccagcctaggcaacatagagaaacctcatctctactaaaactacaaaaattagccgggcgtggtgaggaggcgggaggattgcttgagccaaggaggtggaggttgcagtaagctgggatggtgccattgcactccagcctgg

SEQ ID NO: 238749 - DNA, 632 bp, Homo Sapiens
ccaagtgggccccgctgcagctgtgtgtccatctccatctacacggctgggggcgagcactgtgagcacctgagcatgaaactcgacgcgttcttcggcatcttctttggggccctgggcggcctcttgctgctgggggtcgggacgttcgtggtcctgcgcttctggggttgctccggggccaggttctcctatttcctgaactcagctgaggccttgccttgaaggggcagctgtggcctaggctacctcaagactcacctcatccttaccgcacatttaaggcgccattgcttttgggagactggaaaagggaaggtgactgaaggctgtcaggattcttcaaggagaatgaatactgggaatcaagacaagactataccttatccataggcgcaggtgcacagggggaggccataaagatcaaacatgcatggatgggtcctcacgcagacacacccacagaaggacactagcctgtgcacgcgcgcgtgcacacacacacacacacacacgagttcataatgtggtgatggccctaagttaagcaaaatgcttctgcacacaaaactctctggtttacttcaaattaactctatttaaataaagtctctctgactttttgtgtcttc

SEQ ID NO: 238750 - DNA, 553 bp, Homo Sapiens
ttcaagtgattctcctgcctcagcctcctgagcagctgggactacagatgtgtaccaccatgcccgactaatttttgtatttttagtagagatggggtttcaccatgttggtcaggctggcctggaactcctggccttaagtgatccacctgtctcggcctcccatagtgctgggattataggtgtgtgccaccctgctgggccgagaatgtgcttttgactgagggtggaaagtcagcagctgcagcccaagaagttagagccaggggcagtgcctttgatgggaagcttgggggtctaaagaaatcagaaaggggagaaaataatcctgcgtgtgctcagccctcactcagatcaacagcccctcgggtcccagctagatgtactttgtagaaggctttttttctccccctcaccctcaaaactccaggattaatgtgctattcccttttttttactgttttctgtctccccccaacccatcagcagtttgagaaatgctatggtggaaaaaaaaaaccaacagccctataaccagtacaaacaaaaagcc

SEQ ID NO: 238751 - DNA, 463 bp, Homo Sapiens
agggatgtgaagcatcttgcccaggcttctgctgctggtgaccagtgtagccaggactcaacccaggttttcctgactcagaagactgagctttttcctggatgttattaatagctaattgtgtccaagcaaccaagggccttgagtctgcttggttctgcttatggcctcacatcaagaaatggagctagtccatgtctgtagtcccaatgctttgggaagccatgatgggaaggttgtcggaggccaaaagttcaagaccaggctgggcaatatcacaagactccatctctacggaaaagtaaaaaattagccagtcatggtggtgtacacttatggtcctagttactcaggagacttaggcaggaggattgcttgatcctaggaattcgaggctgcagtgagctatgattgcacctctgcaccccaccctcggcgacacagcgagaccctctctcttaaa

SEQ ID NO: 238752 - DNA, 738 bp, Homo Sapiens
  misc_feature (13)..(13): n is a, c, g, or t
  misc_feature (105)..(105): n is a, c, g, or t
  misc_feature (292)..(292): n is a, c, g, or t
gccagtcaagagnaggagccattgtggcagtgccctgtgcgcttgtgacattaatggtgttggcccgcgacccacacactttggccttcatcgctgactagggcngtcagagctttcagtgcgcagccttctggtgcagcccccatgcagggggactctctgaagctgtgcaggctgcctgtatggttcagtaccagaagtgtcttgtggcctctgcagctcgaggcaaggcctggggtgcccaggcccgtgcccgcctgcggctcaagcggaccagctccatggattcccnaggaggtcccctgcccctccccctgctcaaaggaggggttggcggtgcaggggcaacccctcgaaagcggggtgtcttctcttttcttgatgccttccggctgaaaccctctctgctccatatgccctaaacttatctgggaaggctggggaagtaggctctgggtccatgcctaactctgtaccgttttattcctcaaggcctatagcctgtcactccttgaagccttctctgcctgtccctccgatccttgtccacggtctatttattgcccaatttattgtttatacggatgactgggaggcactgcaccacaacgtaggaccctggctcccctttccttgggtccttgtgttccttgcccctgtccaaccctggacagttggctctacctcagtaacactttatagcaaaatcagtgcaaataaaaatccctcagtgacctc

SEQ ID NO: 238753 - DNA, 467 bp, Homo Sapiens
ggcacgaggaggatttccgcagtctggcccttttgggggcaggcgttgccatgggatttttctacctctattttcgagatcctggaagagaaatcacgtggaagcactttgtacagtattacctggccagaggtggaccggctggaagtcgtgaacaaacaatctgtgcgtgttattcctgcccctgggacctcttctgaagtgaggggtgaatttaaggctgagtattgcagacataagtttatttcgtgtaaaaatgtagttttctatttttttcagtaaaatactcccttagtatccatcagctactcgttaatgtgtttttttctcattggcatgtatcaataacaaagccttccaaggaggacaggagcccttataagactgactagggttcagatttgccaagcagtgtctgagaacaactcatcaaggattgtggggagagaagagaaggagacaaagat

SEQ ID NO: 238754 - DNA, 468 bp, Homo Sapiens
  misc_feature (66)..(66): n is a, c, g, or t
agacatacaccgcatagtccatttcatttcagctcctgatggcatctgaccgccgtggacacttcncagtggtctggcttttggagggagagtagagcgggggatgatctgtgccagttggtcactccttggatattggagttatttccactggtcttgctgctcctctgttttgattttcattaactcatttcacctcagtgaattctggagcctggctgtttttgtgcctcctctttgccagtggatcatcagaacaaccccttttgtagcagtttcccaggttttttcagaagtggtgaatccatgccttggcattcctggattattccatgtcatgtcagatcattcatcaaataaatattgacacatgtcatgtgatgcattctatgctgagcaccatcaggaatacaaaaaggtaaccacacgttgtttctgctcctgaggagcttccaagtgttaaaaaaa

SEQ ID NO: 238755 - DNA, 504 bp, Homo Sapiens
gacacagaaggagccggcatttcagggcagaatcccgcaaggaggaaactgcagaaaagagctccagaaatctgcacagggttctcttgagtctgtactgaggaccagcctgtacatgtatagaagaaaactccacaaagccaggcaaagaggagaaaggagcatgtaaggtgaacaacttccagacctcgcacacggtcatgacatactgaagctccagccagggggatgggtccccagtgatcactgtggacattcagtggagactcaggaggagccacaccgtgggaacagggctgatgctgtctgcagtgaaggctcgtctagaacctgcctgagaaactgcagctacagaaatccaaggcctggcatggcggctcacgcctgtagtcccagaactttgggaagccgaggtgggcagatcacctgaggccaggagttcacaaccagcctggtcaacttggtgagaccccgtctctactaaaaatacaaaaattagtcagg

SEQ ID NO: 238756 - DNA, 450 bp, Homo Sapiens
gaatcgctggtccaaagaaatcacgacaggcgctaagtttggggcaatccatttaatgctactaagttgtgggatggtttgtttgagcagccccagataacaaacattccttgaggtcacacgctaaccaagctgtgattcgaacactgcctctcaaattcacgagcaaaagagggggaattctgtttgaaatgccaaaaagaactctttcttgcttttattatttttaatttatgtataataattgtatgtttatataataattgtaataatttacgggatacaggtgatatttcaatatatgtatgcaatgtgtaatgatcacatcagggtgattagcggattcatttcctcagttatcatttctttgtgttgggaacattcaaaatctgctcttctacctatttgaatatagaaaataaattgttttgttttgtttttgaaaaaaaa

SEQ ID NO: 238757 - DNA, 430 bp, Homo Sapiens
cctgaatcagaatctctagggacacggcctggaagtttgatttttttttttttttttgtttttgagacagagctagactccatctcaaagaaaaaagaagaagaagaagaaagctaactcagtacactaagagtgatttacatgcctgcaaataatttgtgtctggggtcttgaccctccccaaatgccttgttatttatatctctgcttttagaaaacagatggtcatgtgtctatgggcttgtaccggcagaggcaacagcaggtccttaagactccccaggtgccatgatgaaaagacccttagaaaatattgaaataagctcaaaacttaaaaaaaaaaataccagaaataaaagctagtaaaggtgagaggtgtggggcttttggaacatagagcataataaatcagaataaaaaaaaaaaaaaa

SEQ ID NO: 238758 - DNA, 568 bp, Homo Sapiens
caggagtgggtgagggataagactacacataaggtggagttcatacacatgagggataagactacacataaagtagagttcatactgctcacatgacaggtgcaccaaaatctcagaaatcaccactgaagaacttattcatgtaaccaaaaaccacctgttccccaaaaactattgaaataaaaaaagaacctcatgaatattttttaaaagcctatgggaaaaaaattacaatctaagttatgactattaccaccctttcaccatttctgaaagctcagctgattctatatgaacttctacaacatcactacccagtagaactttgtattacgcaaaccaattattactaggccgctctccccataactcaattctgcctatggactcacttggagtggagtggaacagttgattaaactgcttataggattttctcagatgttcatatatgtaattcacacactcaaaactctgaacaagtaataccttcctatgtacaattaactatatttgtatttttggattggcaggcaaatgaataaaagaacatcttttatttacccgt

SEQ ID NO: 238759 - DNA, 424 bp, Homo Sapiens
tctggatttcagattgagtctcttgccctaattgatgcaatttacactccatgcatctccttccctggaccttctccagttcttggggactacagatgaacttacttttaatgcattttatggcatttggaggccctccagtggacaaatactatacctgaaaaaaatccttttgctgtgctaaagtgttcaggtgtgaagtgtactcatgtttgcaaatcccttttgaaatatataaacaaaaatgaattaatggatgaatagagtgatgcacagatcattagacatgtgataaaaataactgttaattgtagaatctagatgatgagtatattatatgatatggcccactgtataattctttcaacttttctgtttgaatgtttgataataaaatattgaataaaaatctttttgctaaaaa

SEQ ID NO: 238760 - DNA, 479 bp, Homo Sapiens
tgcgtcacacctcaggaccctggaaacaatacacaatttgcccattcattaatttattaattcactcaacaaacttgtacatctgccataagtctgacaccatcctagttatcagggatgtagatagtcaaaagaagatgtaaacctaacctcatgcatctgtgaatctccccatctaaaaagacacagccttgtaaagaagcttgtgtgaaagtgctaacgacagacatgccaagtgttaaggggatgcaggagaggcgtggtaaaatgggttgggaggcagctcagatgtctaaaggggtcaggcagacaatgcagataagtgaaagagggccagttgatgcagagtggggacatctggaaagcacccgccccatctaaaggaggcagcctctgagagtctggggatcagggatagaagggagatgtacttttcactgtacatccttttgtattttttaaattttgttacttaattc

SEQ ID NO: 238761 - DNA, 485 bp, Homo Sapiens
  misc_feature (34)..(34): n is a, c, g, or t
tgagcatgctctcaaaatgtgttataccctaaanaatgtttttaaggtagtgtgttgatataacagttgttaagaccatgatgctagaggcaagatcgtgagatccatagagaaggtagttgaagggtagggccttttattcacatatatgctgccttctccaccaactgatgtgatatccttttatattcgtgactccagtgaacccacgcctctgaggatttacacccttgtatttgtactcctcttgagtctgggctggcctgtgactttaatcagtgcaatgcagaagtggttcagtgccagttctaagactacaaagagaaagaaaagttcaaccttccaatatcccagcagacatcaggccccagctgtgtcaccagcttcacgcccacgagtgaccacaacaaacccagcagaaccaaccagcgcatcccagccctggttgcagaatcatgagtaaataaaatggttgctgttctaaa

SEQ ID NO: 238762 - DNA, 517 bp, Homo Sapiens
aagatctgctgataattgaggaagagcatctttaaaaagacactcaactacatttcagaaacataaagatctaagtgttggctctacaagggaagaaataaagagaaagaactttttttcctcctacaacaggtctagacaacgtcatacaaggagttgcacgcatatccaaaacaaaagcaaggcaaaaacaagcaaaaaagcaacaaatgcattccaaaatgatgtccatttatcagcccagaaatgtactggatactggtttagttcagcctgtaggtgctgggaagaaattccgacaaatccaagtcagttgcaaaaagggaaaactccagacatatcacccaatgaacttgtaagaaagcatatgagcttccctgaacagattttactccaggtttgcagcccgcaagatttaagatggggccatgaggttaaatcttgtaaactcagaagtgttcacgctactgcatccctaaactctgtaactctctacatactctttaaagcaaaaaaa

SEQ ID NO: 238763 - DNA, 442 bp, Homo Sapiens
  misc_feature (40)..(40): n is a, c, g, or t
cagatcttattctttgaaactatacaagcaatttttaaanaattaaaataagatttcctaattacatatttctgagaggtttaaggcaatgattctctgacgaggattaactcttacatctgggttgcactcatagggtaggtaaagaaaagaaaaagtgtactgttgagagttgatccataaagcagatggggaaatatgaaaaggcagcagaggctgggtgtaatcccagcactctgggaggccgaggggggtcatcacaaggtcagaggttcgagaccagtccggccaacatggcaaaaccccgtctccactaaaaacacaaaaattagccgggcgtggtggcgcacgcctacaatcccagccaccttggaggctgcactccagcctgcgcaacaggagcgagacacgatctcaaaaactaaaaaaaaaaaaaaaagaa

SEQ ID NO: 238764 - DNA, 586 bp, Homo Sapiens
  misc_feature (91)..(91): n is a, c, g, or t
cagttccaatacggggaccccggccggcccaagaacgccacccgcgagagcaccagcacgctcaaggcctggctcaacgagcaccgcaagnatccctaccccaccaagggcgagaagatcatgctggccatcatcaccaagatgaccctcacgcaggtctccacctggttcgccaacgcgcgccggcgcctcaagaaggagaacaaggtgacatggggagcgcgcagcaaggaccaggaagatggagcgctcttcggcagcgacaccgagggcgacccggagaaggccgaggaattaagacaaatatttcagactggtgtaaaggacaaatatgacaacgacgtcaaggactcgcatccgtcgctttctgcagaaaggggcttcttcggtcccgagctcgcgtccaggtggccaggcctctgccggcggctccagtggctgcgattatcgggttcggtaaatgcccccacgtgcttgtgtctctttccccccttttctgtatatagagtggtttcagattgtaaatagcgcgtcagcgaacttgtctaaatcatatatttttgtctaataaactaaatgaaatgac

SEQ ID NO: 238765 - DNA, 506 bp, Homo Sapiens
acacatgttagtctaggcctgtggagggttaggatcgtcattatcactggctttcccctccccatgccgtcccactgaaaggtcttcgtggacaataaaccactaacatattcatttgttatcattttcaagtattatgtatttcatgtattgtatgtgcaatacttttatacaactggctgtgcaggtttgtttacaccagcatcactacaaacgtgagtaatgcttccactgtgacattactaggtgatagaaatttttcagctttgtgttattaatgttatgggactactgttgtatatgtggtctcttattgaccaaaacgtcattatgtggcacatgactgtacctgttcccctcactttcccattcttagagtcacataccttaaaaagaatgtctcatcttggggaaaacaccattgcgatgacagaggggtctgttatatctaggcttagaactaagaatgaaagttattacaggattgtataggccattcctgggag

SEQ ID NO: 238766 - DNA, 495 bp, Homo Sapiens
tgcccatcccagcctgaccaatgtccacagccagggagcagccaatcttcagcacacgggcgcacgtgttccaaattgacccagccaccaagcgaaactggatcccagcgggcaagcacgcactcactgtctcctatttctacgatgccacccgcaatgtgtaccgcatcatcagcatcggaggcgccaaggccatcatcaacagcactgtcactcccaacatgaccttcaccaaaacttcccagaagttcgggcagtgggccgacagtcgcgccaacacagtctatggcctgggctttgcctctgaacagcatctgacacagtttgccgagaagttccaggaagtgaaggaagcagccaggctggccagggagaaatctcaggatggctggggtgggccccagtcggctctggttgttggcagctttggggctgtttttgagcttctcattgtgtagaatttctagatcccccgattacatttctaagcgtgaa

SEQ ID NO: 238767 - DNA, 576 bp, Homo Sapiens
  misc_feature (65)..(65): n is a, c, g, or t
cagaaaacagttgagagccctgcagaaacctggctgttgagcggcactgcaaatgaggtgagttntcatgtgtgtgtgctgaagccctcagaaatctcccagatccttattcctacaggagctgccactcctggagtaaccttgtataggttgttttcagtgtccttgtgccactcccccactccttaaagtggccacagcatgagtcccaatgaggaatcgggtgacctagtttcttgaccactaattctcccagtgatgtgtcccttcttctggccccagcctggtaggagaccatggcagagaaagctgatcccatctgcttcggggggacaatgctgccacaggtcccctccagcctctgaagacattgggtgcttttgtaaacagatgattagggtatgctctgatggggctttttaagcagcaaacccctttctttcatgcagcttcccatatgaagtaagcatgtcccacaagtggggacctggccatgggactctggtttgccattattaggacaaataggatcttagcgtgaccagagcagacactgttcaagcacgtcaaaacatt

SEQ ID NO: 238768 - DNA, 542 bp, Homo Sapiens
tcttagttatattaaccagcaaggtacatattacattattattactagaccatgcctccaagtgtgtcaaattataaaaatgtgttcagcatacataaaatatacattaaagatttctctcatcataggcacaatctaatacaaaaatatatttgacatttataagttagaagatccattgagagcctccaaaataggacaggggaaggaatgagtgatgacaacataaaaaaagaagcacacatagatgcaaatagttccacttatatgattattttcttcatcagcaaagggttaagagcagtttacaccaaaccaagttaccaagcagatcacaatcagttcacaggttggataagtcacggcacgcaggccagaaaatgtactcagacttcagtcaacctaatgggacagtgtactcacactgtggttttgttgttttggagtctagaagctccatctacccattctccatggtctaccaccatgttaacacagatttaccacaggcgccatctgtaccaagcctaggataaaatctt

SEQ ID NO: 238769 - DNA, 385 bp, Homo Sapiens
ccacgcgtccgctctgtcagtctcgtctggatcttggtcctcagcaactgtctggatcctgacagtgcagtaagagcttgcctggcctgtgtgcagagctgcctcatcctgaaattctgggagttgaaagccccagggcaacccttaaccaatgggggaaaagcattggtgtgtaaatcccccagcttccctgggtgggctgcagctgagccatattctacatgacacttccgaggatccccagtgggcatgacctcaatcgcccacattggatgccacaacctgcactggcttttctcccttccctgtgggtctctctctgcacttcctcccttgtgcattctaggttcaccttccaaataaatgatgtgcactcagaaaaaaa

SEQ ID NO: 238770 - DNA, 457 bp, Homo Sapiens
  misc_feature (35)..(35): n is a, c, g, or t
agttctgtaatttcaaacactactcctattacatnttctatgtgtaaataaaactgcttagcattgtacagaaacttttattaaaattgtttaatgtttaaagagttttctattgtttgagttttaaaaaagactttatgtacagtgcccagtttttgttcatttttgaaatctgattatatatattttatatatacttatgtatgtatatataatatatatagaaatctggatatatatgtataaatctttagaacttaaatttttctcgttttaagtttcacatctatggtagatttttgaggtgtctactgtaaagtattgcttacaaaaagtatgattatttttaaagaaatatatatggtatgtatcctcaagacctaaaatgtcagactggtttattgttaagttgcaattactgcaatgacagaccaataaacaattgctgccaaaatgt

SEQ ID NO: 238771 - DNA, 457 bp, Homo Sapiens
  misc_feature (20)..(20): n is a, c, g, or t
  misc_feature (69)..(69): n is a, c, g, or t
taatgagggtgaatggaagntaagagtgcatcccacagctcaggcagttccagacttgagcttgacggnttctgccagggccacataccaggttcttttccttgatctctgcccacgtgtcagcttgggccacttgggctgcggtctgggtaccatccactccctcattaagcaggagccccacccacaaggctcactgcccagattgccccacaccctggcacctggggaaggcagtgttgccgagggcctgattggtgccaggcactgttctaggccctcagggatctggcactgatcaaagtttgcaaaacgccgggtgcagtggttcacacctgtaatcccagcattttgggaggccaaggtgggaggattgctttagtccaggagttcaagaccagcctgggtaacatagagagacccagtctctatttcaaatatatttatattaaaaaaa

SEQ ID NO: 238772 - DNA, 867 bp, Homo Sapiens
  misc_feature (160)..(160): n is a, c, g, or t
  misc_feature (843)..(843): n is a, c, g, or t
tatctgctccagagagtcgactggctgttctgtgacagcagatcagtgcctgcgttccaggctttcagatgagacacacattccttatcatagatctgctgtgtagataagatctgcattagcctgacaagatgcataattcaggtgagtcgtgagctcntgaaggccggcacaatatgttgacagctgccagctgaccgcagacctcgacggctcctttccctacagccatggtgactggatctgcttccgtcagaggctggaacacttcgctgcaaactgtgaagaagccatcattttcctacagaattcattctgctccctgaacacccacagaaccccaagaacagcccaggaagtcgccgagttaattgaccagcatgagacgatgatgaagcttgtcctggaagacccactgcttgtgtctctcaggctggaggggggcaccgtcctggcgcggctgaggagagaagagcttggcacagaagacagccgggacaccctggaggccgccacaagcctgtacgaccgagtggatgaggaggtgcacaggctggtcctcacctcgaacaatcgtctccagcagctggagcacctccgggagctggcgtcactcctggaagggaatgaccaggtcagagctgcaggaggaaggcggcccggtcagcatcccctccaggccaggctggccaaggcaaccctctcaccttcacactgtgtctttagggccttgatctgatttccatttggaatgaaattatgtcaggatagggcatgccttgctgcttgtgtaaaaagaaataaattttatttttacggaaaaaaaaatcccggaattccggncgaaactgtcatagtccaactgaa

SEQ ID NO: 238773 - DNA, 834 bp, Homo Sapiens
ggaaaggaagcacaatgcgtatcagatttaaacaccaatagagtttgcctggtaaaatgagtaagggagggtcgcccacatccacctttgggccaggagggatccctagttagcattcgccaagggaccagatgagaaccccctctcaaaaatgcaaattggtggctttgggtcagcgtgcattaccagcttcaccatatgccgaggagattacctgatacacgaggtccaagcctgaagtcacgcaagatccagaccgcgctgtcctgtccgggccccaagagcgagactccatctcaaaacaaaaacaaaaacaaaaccaatcttgtcattacctaggaataataagcatatttacagtcacctattttcagggatcttcgggacctgttaaaacactgactgccttgacattacatttctgccacagctgtgcaaagcacaccccttcaaagtgtcattttcagttgctactagacaatgagaaattagttgtagaagtattttgtaaatctgttttgaatcagaatacagattctctgtaactagaaatagtaaaggcacatgagttatagcttagtctataaattatctttattctttgacatcttacagatctctacacagacatctgtgacccttcagacgttcaggatgccccagagaagggaacatagagcttcctgtctgcattacataaacttttcctaataaatgcatatggttaagttataaggaaggtatagttgtagactaaaccaaatattttttgttttatttttttttgagacaaagtcttgctctatggcccaggctagaacacagtggtatgat

SEQ ID NO: 238774 - DNA, 814 bp, Homo Sapiens
  misc_feature (208)..(208): n is a, c, g, or t
ctcatcgagcagagagtagtccgtcatcagcagagtgtctatgcggctgactatgatgagccaccacatatgagggccttgctcatcagtcacaattcaatgtattttatcaaaaacaccccacagacacatcagcacacacagtgtcactactactctcagatgctctccagactgggggaaccaattgacaaggcccccagctccnccagctatgagactacattccccataacttttcagcatgttcacttgattctccaaccttaacagacttgtgatattactttaatggcaaacaaggctctgctgtcccacgcgcttactttgccacatggcacagtatctgtgtcacagacgcactcttcacaaggacaggtccaggcctgtgtcagtcactgcttcatcccagcacctagcacagggcctgactcatggtgagctgtggacaaacgcacatgcaattaacgacttgttcctgcctcagggttctcttttccagatgagtagaacaattcacattttttcactccttacttcagactgggagaaagggcctgagcagaaggatcagagttcaaaggaggggacacagcgccacagaggcaatgcctggagcaacaaagattggggtttgggcatgtactggagtgagagtggaaagggcatggaagtcagggtccagtcagaagacagaggcctcgtcagttatttcaacagagaggatttcgcatcatgaatcactatgtacgaagtgactaccgaaggagctgaaaagagaactctatctcagaagcaaaaactgcagggagca

SEQ ID NO: 238775 - DNA, 813 bp, Homo Sapiens
ccccaagcaacatggaagaggatctgccgcccacgcgccggccggtggagaagactagcaccaattgtggaaggaggatatggcatattcctatgacagccccgcacccggtcgacatcttgaccttgggctctggagcgggcaggattccattgggccaccgaccggccagagtcagttctggacccgttgggacggagttttggatacacctcatcgaattgatacattcgtcagacacaagatcccagtgatggcctgggtagggaatgatgctggctggacacagatttctcgggagcaggtgccctatatgggcagcaacgtggcctgtggcctggcctacactgattatcacaaggcagccatgggtttgggggcccggggcttgctgctctcacgggagaacgaggatcaggtggtcaaggtgctgcacgatgcccagcagcagtgccgagacggccacccggttgtggtcaacatcctcattgggaggacggacttccgcgatggctccattgctgtatagggccttgtgggtcaggacgcttggctgccttcctgcccctggactgtgtccagctggtttggagtctcatcattgcttgccctgggcctatcccatgaggcccagtgactccacaacctccctgaggaggggatggaggggtcaaatctcagagaggctctcttgtgagctcttggaccctcctcttcacggacccaactgtgccgtttgtcccctctcttatggagactgaataaaccacctctggcccatgtaggcccaagtaaaaaaaaaaaaaaaaaaaa

SEQ ID NO: 238776 - DNA, 900 bp, Homo Sapiens
gggggggaagggggccaaaaaaacccccccccccgggttggggattgggtttttggggccaaaggaccctgggttcccccctaagaattttggtgggttattaactgaaaaatggggattggttcacaccaaatccctgggccccctcccggccctgggacctttgggagcaactctaactatgcagcagacaaagggggctccgtatgtggatgtgatctgtttgaacagctactactcttggtatcacgactacgggcacctggagttgattcagctgcagctggccacccagtttgagaactggtataagaagtatcagaagcccattattcagagcgagtatggagcagaaacgattgcagggtttcaccaggatccacctctgatgttcactgaagagtaccagaaaagtctgctagagcagtaccatctgggtctggatcaaaaacgcagaaaatatgtggttggagagctcatttggaattttgccgatttcatgactgaacagtcaccgacgagagtgctggggaataaaaaggggatcttcactcggcagagacaaccaaaaagtgcagcgttccttttgcgagagagatactggaagattgccaatgaaaccaggtatccccactcagtagccaagtcacaatgtttggaaaacagcccgtttacttgagcaagactgataccacctgcgtgtcccttcctccccgagtcagggcgacttccacagcagcagaacaagtgcctcctggactgttcacggcagaccagaacgtttctggcctgggttttgtggtcatctattctagcagggaacactaaaggtggaaataaaagattttctattatggaaataaagagttggcatgaaaaaaaaaaaaaaaaaaaaaaaaa

SEQ ID NO: 238777 - DNA, 711 bp, Homo Sapiens
  misc_feature (64)..(64): n is a, c, g, or t
actcgggaagtggtcccaagggtggcgcggcagcagcagcaggggcagcgctagccaggcgggnactcacagcgggctggacttccgtagaaaattgccgaaccttacaaaaaaagtctcctttttttttttttttaaatcttttcttctttttttttttttaaagttgaggtaaaagcttcagtgtatggaaacctgcaggctgcatacacagccgctctgttccctccgaggagctcctgacatcaccacgagcggagaacgcacatcccacccgaccaccccccaagggctccacgctccgggctggggctgcgatgacccttcgcttaggcccagcctggtctccacaagcaggcacatctgtcctcagcccctccagaaagaggtggccgcgtcagacacgagggtcagagctcggggcccaaatgacaaggacaatgcgtgttgacaaagctaacagctttcaaatacagtacccatatccgagacatttccttggaaaaaattctttctcgagctatcgaccaggttgggcctaagcaaagggattccacaaggttcttcggtacgaatctcacacggttttctggggtcatcgggttagcatttgaagttgtcatctccaagtgactgaattcagtgatgaagaagagactttctgcagagttcacaccttctcatcaagtctaacgcacacacaagatagat

SEQ ID NO: 238778 - DNA, 882 bp, Homo Sapiens
aatttgaattcccccgaaagggggccaaatttgtttggagttccggtaaatgaagttgagaaaaaggccaggagcaatattcggggtttttgggaaaaataattgtaaagtaattgccagggcaattagacaggcattctatttggacccgtttttatctttaaatgaattttggaaaacattaatgaggtttacatatttctctgacatttatatagttcttatgtccatttcagttgaccagccgctggtgattaaagttaaaaagaaaaaaattatagtgagaatgagattcatttcaatgtaatgcactaaagcagaacacgaacttagcttggcctattctaggtagttccaaatagtatttttgttgtcaaactttaaaatttatattaatttgcaaatgtatgtctctgagtaggacttggacctttcctgagatttattttatccgtgatgtattttttttaattcttttgatacagagaagggtctttttttttttaagtatttcagtgaaaacttggtgtaagtctgaacccatcttttgaaatgtattttcttcattgcaggtccacctaatcatcctgtgaaagtggtttctctatggaaagctttgtttgcttcctacaaatacatgcttattccttaagggatgtgttagagttactgtggatttctctgttttctgtcttacaagaaacttgtctatgtaccttaatactttgtttaggatgaggagtctttgtgtccctgtacagtagtctgacgtatttccccttctgtcccctagtaagcccagttgctgtatctgaacagtttgagctctttttgtaatatactctaaacctgttatttctgtgctaataaacgagatgcaat

SEQ ID NO: 238779 - DNA, 874 bp, Homo Sapiens
ggagggggggacggggcccatttggggggctgggaattgtttaagggggggtgcctttttttcaagaaaagccttcggggggaatcatttgggtgggtttttgttgttttggtttttaccgatttcgaggttttgtttctggggttgaaattaaaggaattggggttccaaatggacagcagtagaaattgtttgattttgggtgtctctgtgttttggctgtccctgaagccataggttttgatataattaggatggactacaaaggaagttatctgcgaatctgcttgcttcatcccgttcagaagacagctttcatgcagttttacaagacagcaaaagattggtggctattcagtttctatttctgcttgccattggccatcactgcattttttttatacactaatgacctgtgaaatgttgagaaagaaaagtggcatgcagattgctttaaatgatcacctaaagcagagacgggaagtggccaaaaccgtcttttgcctggtccttgtctttgccctctgctggcttccccttcacctcagcaggattctgaagctcactctttataatcagaatgatcccaatagatgtgaacttttgagctttctgttggtattggactatattggtatcaacatggcttcactgaattcctgcattaacccaattgctctgtatttggtgagcaaaagattcaaaaactgctttaagtcatgcttatgctgctggtgccagtcatttgaagaaaaacagtccttggaggaaaagcagtcgtgcttaaagttcaaagctaatgatcacggatatgacaacttccgttccagtaataaatacagctcatcttgaaagaaaaaaaaaaaaaaaaaaa

SEQ ID NO: 238780 - DNA, 790 bp, Homo Sapiens
ttaaagcaggcctatgaggggaaccgtaaaagaaaggcccccttgagggtgggtacaaaagaaggccagggagtgggagaagaggaacatcgtggagttagagaaagaaaggggacccatagccggcagggtagtgccacgcaagccagccttcggacaggggaagagtttcaatgagtcacgggagatgagtgtgcctacttcactgtcaccatcacggacgtctcctagtggatcgtgtatcccagcgacaaggagtatgtggcaaccgtgcgcctagagcgtgtggtgatgacctatgagctatgccgaccctgggcagaggtgcgctggaccaaggatggagaggaggtgagtggagaaccccgcgctgctcatgcagaaggaagacactgtccgccgcctggtgctgcccgctgtccagctcgaggactccggcgagtacttgtgtgaaattgacgatgagtcggcctccttcactgtcaccgtcacagagtcttaccaaagtcaggacagttcaaataacaatccggagttatgcgtcctcttgaaaaagccgaagacccggcggctctggtcccgcttccccccatggcgacgaacagctggcactgagtagcagctgcccccatagtttggggcccacattcctctgtcccacctccctgccattgctttttgcctctccccagactgcttcagccgctaacctaacctggcccctgtgggcatttgagtttgcgacccctgtgttaaaccaatatcccgggaataccggacccgaaaaacc

SEQ ID NO: 238781 - DNA, 745 bp, Homo Sapiens
  misc_feature (716)..(716): n is a, c, g, or t
aaaatacaaagaggtgggtaaggagtaggaaggtagagagcaccactgatgaggccctcctagcccatggcagacccagacctcttctcccccaggaattagaagtggcaggagagaacaacaggggctgggaatggaggggagaatttctaggggaagtttcctgagttgaaacttctcctgtggttactggtattgagaaatcagctaccaaagtgaaaaaggacaagatcaattcttttctagtcagttctaagactgctagagagagataccaggcccttagccttgctctcagtagcgtcagccccagttctgagcctccccacattacacttaacaagcagtaaaggagtgagcactttgggtccttagactcatgtctggggaggaagagcaagtagaaaagtggcattttcttgattggaaagggggaaggatcttattgcacttgggctgttcagaatgtagaaaggacatatttgaggaagtatctatttgagcactgatttactctgtaaaaagcaaaatctctctgtcctaaactaatggaagcgattctcccatgctcatgtgtaatggttttaacgttactcactggagagattggactttctggagttatttaaccactatgttcagtattttaggactttatgataatttaatataaatttagcttttcttaatcaaaaaaaaaaaaaaaaaaaaaaaangtcctcgggaatccggaccgaaactgtct

SEQ ID NO: 238782 - DNA, 801 bp, Homo Sapiens
gccaggaacaaaaatttcagtggaagctttgggaatcctccagagtttcatacaagacgggggcctgtaccttgacgaagagcccatccagactctgtctgcccagctcgaccttcccaagtacaccatcatcaagttctttcagaaccagcggtactatctcaagcaccacggcaaactgaaggacaattccggtttagaggtcgatgtggcagaatataaagaagaggagctgctgaaggatttggaagagagtgtccaagataaaaatactaacacccttttttcagtgaaactagaagaagagctgtcagtggaaggaaacacagacattaatactgatttgaaagactgagataaaagtatttgtttcgttcaacagtgccactggtatttactaacaaaatgaaaagtccaccttgtcttctctcagaaaacctttgttgttcattgtttggccaatgaatcttcaaaaacttgcacaaacagaaaagttggaaaaggataatacagactgcactaaatgttttcctctgttttacaaactgcttggcagccccaggtgaagcatcaaggattgtttggtattaaaatttgtgttcacgggatgcaccaaagtgtgtaccccgtaagcatgaaaccagtgttttttgttttttttttagttcttattccggagcctcaaacaagcattataccttctgtgattatgatttcctctcctataattatttctgtagcactccacactgatctttggaaacttgccccttatttaaaaaaaaaaaaaaaaaaaaaaaa

SEQ ID NO: 238783 - DNA, 754 bp, Homo Sapiens
ctttcttcctcccgtgccctgagcttccattccgtctccccctgcatgccccatgtgggaggggctgagctccaaaccagcatcacaccaactttgacacatggatgtacctatcttggtgatgggtgggggccaagaattgagcatgacatcttccccagcagccacctcctctgagatccctcaccttctccaaaccagatccaatcaaacctcagcccgaggaaacatgctccccaacgtgctctcctgtgcttctgttttgtccccctgctggggggacaggagagggagtggtgaggccctgggcctccagagcctggctctgctttgtgctgtggcttagccggaggggacgtggccaagggtgaggtggccaaaaccagaaccagcagtctcctgccttgttccctccctggccctcaggccctccttccagggatgtctctccagctctactttatgtcctgaagctgacccgaggtcttcctatctggaatgactagagggagccaagaggatggggtgggggccagggccccccagggcctatcgtgggagagcctgggcaggatcccatcagaaaggtgctgactaaactggttgcccggacactcaacagcctccacctccctttctaccctcacagctcctggggccttcctggctctggcccagaaagtgattcatttgtaaattatcatggttttctttctgcattaaaatgctcatttccggaaaaaaaaaaaaaaaa

SEQ ID NO: 238784 - DNA, 787 bp, Homo Sapiens
taaaaagttaaagtgggcccgggcggggtggctccatcccgtaattcccagccttttgggaggccgaggggggcggatcacgaggtcaggggatccagactttcctggctaacaaggtgaaaccccgtttcttttaaaaaatacaaaaaaaaacattagccaggcgtggtggcgggcgcttgtagtcccagctactcgggaggctgaggtaggagaatggcttgaacccaggaggcggagcttgcagtgagccgagattgcaccactgcactccagcctgggcgacagagcaagactccgtctcaaaaaaaaaaaaaaaagtgtaagtggattaaaagagaaacttggtctagttcataatatttttaatagggctttccctggctgctggaaaacttaggccagtaagcatctctttgtttaaagtcctacaagacaatttgaaataattcattgttcatgccaaaattctaagtactgtttttcttagcaagtgtaacataatcaggaacaatgggtacaagtaaaacattctttggatgatattcaaagccttattagcactgcacctgaataataggtcattttgcctcactcatttgccaaagtagccatttctaagttaaggaagtttttagataggctcatagccttgtatttcgttttagattgtaagctcaatggcagggatactatattggtaattatgttttcatatagcaaccaccacagtatattcttggtgcttaataaatgtttataattgttaacaataaaaaaaaaaaaa

SEQ ID NO: 238785 - DNA, 903 bp, Homo Sapiens
ctcttcttgtcccccacgggaccgggtcgggttcggggggggcatggtggtgccccggggatggcaaaaccattggagttggggcctttcgaaagaatgggaattcggaaggagggtttttatgtttttttttttttgttccacttggaacccggggtcaaaaattaaaaaaaataaaaaggccatacaggaaatggttctttctggaatttgatactattggggttattcatcttcccttgactattggtaatactgttgtaatgttaactctgttaagtacccaaggtgcttgtcttccaccaaagagtgctttttaaacaagaatctgtgaaaatcacatttaaacactgttgcatgttgtaagaccaggtggtaccttagtaacctaaaacttgcaagagaatattaatggtagctttagaagactcaggaggagaaactgacttcagagttggaagatgttgcaagtcgttcctttttctgtccttcagggactgaagaactgggaggctgcccattgtttggttgccagtcatacaaattaaaatcatatttccttccatgaatggaagaaacacactattggtttttccccttggaaacagcaatcccaaataatgtcggcttacaaaaaaaaaaagttaccacttttttagagtccttccctgtaacattggattttttttttcccttatgagatccacctaaggccattgacgtggcctgcgatctcagtgacaatgatctgcttctggatctcactgttgcctttggttagggaacacaactagtaactctgcagagtgccttctcccgcagccctactggaacacagcagagtctgtgccatgaagcagttacagaaacagaattgatgtgctgctaaaaaaaaaaaaaaaa

SEQ ID NO: 238786 - DNA, 533 bp, Homo Sapiens
  misc_feature (9)..(9): n is a, c, g, or t
  misc_feature (42)..(42): n is a, c, g, or t
  misc_feature (44)..(44): n is a, c, g, or t
  misc_feature (88)..(88): n is a, c, g, or t
  misc_feature (148)..(148): n is a, c, g, or t
  misc_feature (153)..(153): n is a, c, g, or t
  misc_feature (170)..(170): n is a, c, g, or t
  misc_feature (183)..(183): n is a, c, g, or t
  misc_feature (187)..(187): n is a, c, g, or t
  misc_feature (202)..(202): n is a, c, g, or t
  misc_feature (213)..(213): n is a, c, g, or t
  misc_feature (472)..(472): n is a, c, g, or t
aaaaatttnaaagggtttcaaccttaagcaccccttaaaaancntgcccaaaaattgccagtcaattttccaatagagaaaatccagnactttaaaaatgttcaaataacctggttgggtgtggtggctcacacttgtaatcccagcnctttnaggtgggcaatggcttnagcccaggagttngacnccagcctggccaacncagtgaaatgngtctctacttacaaaaaaaaaaaaaaaaaaaaagccaggcatggtggtgggctactctggaggcccttgaggaccacttgagcccaggagattgaggctgcagtgagccatgactgtgccactgcacctctagtctgggtgacagagcaagaccctgtttaaaaaagaaaaaggccaggcacggtggctcatgcctgtaatcccagctacgcaggaggccaaggcaggagaatcacttgaacctgggaggtggtggttncagtgagctgagattgtgtcattgcactccagcctgggcaacaagagcaaaactctgtctc

SEQ ID NO: 238787 - DNA, 555 bp, Homo Sapiens
  misc_feature (3)..(3): n is a, c, g, or t
  misc_feature (13)..(13): n is a, c, g, or t
  misc_feature (32)..(32): n is a, c, g, or t
agnacccctgggnagtaaaagttccaaatccncccccaaaaaaagcatctgtagtatctctctaaattgactactggccctcagaagagaaacctgacatcttttttatataaaaggaaagtaaaacaaaagctaggtttactcttttaacaggggtcatttttctgtgttttcacatatctttggagtaattgagttcagttgtgtactctttaaagttagaaagatcgaccatagtggtgaacaatattcagttttatggtattcggtagagaacagcccagcacatgcttttgcagtttggagatattatgataagattaggatatgtccttacgtgtaaggatatgtttttattgatccctaaacatgcactatttataaatagtgggcacttatttaattggtaatatatgctgtctggttgatggtggtataagagttctattttttacacatatttgaagatgcattaaagtgacttagtgacaaatataaatacccaagaaactagtgatagtttcttctaaattgggaagtgtagagggcaaattg

SEQ ID NO: 238788 - DNA, 579 bp, Homo Sapiens
  misc_feature (3)..(3): n is a, c, g, or t
  misc_feature (81)..(81): n is a, c, g, or t
  misc_feature (97)..(97): n is a, c, g, or t
  misc_feature (127)..(127): n is a, c, g, or t
tanctggtgggcacgggcttcggaatcccagttctcaggaggttaggcccaagattggcttaaccccggaagcgaaggttnccagtaaccgagtcgngccattgcattccagctgggtgccaaaggnagacttctggtctccggaaaaccaaccccaaccaatacttcttaggaagttttaccaaagattttgtaaatatcctgtatttatttcccatgaagtgtattatttcttcaatattaccaatgcaagtgaacacgggctttccttatagtggtcatatctctgcttttgaactagcaaaatcagcatgagtgtgatttttgaatagatagatttctgtgaaatgcagcaaatcccatataagaaatcttagcagtagaatatgaaatcaaaattgcaaaaaagcagttatgtctaaatatgcagcccaaagtttttcttaatatctgtagatacaggccaggcacagtggctcacgcctgtagtcccagcactttgggaagctgagaagggtggatcacttgagcccaggagtttgagaccagtggggcaacatggtgaaaccccatctctac

SEQ ID NO: 238789 - DNA, 567 bp, Homo Sapiens
  misc_feature (22)..(22): n is a, c, g, or t
  misc_feature (35)..(35): n is a, c, g, or t
gccgacttttggttcagattanatctaaattaagngattaataattatttttaaaggtagtgacctagcgtagatccagatggtatgattcctgactacgaaaaggaatttatttgggcaaggattactggtatgtctattgcttttgttgcgtaaatgaattgatttccacctacgccataacagtgtatctcacatgcaacgactaagctggagttgcaggagctttcttgtctgccactgccctcagcctccattctcccttcctggtgccccagtacagcctctgttctcctttttcatagtttccagtgggagcatctccacttcccttctttttgaggggcctggtcatcttcacttccacacagcccacaaacttctcacttgtatctctcctggtacagtagccatgccataaaacaagatggatactgatcagttactcaggctagaaacttcaaagccatggaacaggttcaagaagagagtactacaattagacttacgctttagaaaagtcagtcttttacctgagcagtattatatagtacaatgcttgttatg

SEQ ID NO: 238790 - DNA, 581 bp, Homo Sapiens
  misc_feature (14)..(14): n is a, c, g, or t
  misc_feature (95)..(95): n is a, c, g, or t
  misc_feature (137)..(137): n is a, c, g, or t
ttagttaaaccggncccccccaccttccccaaggcacagaaacatacccattagctctcttcctgttttccttcctcatttcatgcttgttcggntgctaaactgatttttggtacttagaatattataaagtgtgnatgctttctataatgctattggtctaagtgtgattaaatttcattaaggtgtataagcctctaattattacataactggcacgtctgacttttgctatcatttgaggattctactgtatataagtttcatctaacattggcattaataaccacaggtatattccaactaattgttacttcttgtaattgccagactacttcaagagttctcgtaagttttagattttcagagacccatcttcaatactttgaactcattctggtaaacttccttctacctatgtgcaggtccctgtactccagccaacacaggctcagtaactggaaatgaattggctaaaatggtagcaccattgggtttcttaatggagctttaggagttctttatggaaaaaagcacagaactaaattcctcaaaaaaaaaacaaacaaaaccacacacac

SEQ ID NO: 238791 - DNA, 450 bp, Homo Sapiens
  misc_feature (19)..(19): n is a, c, g, or t
tttttttttttgaagatgnagtctcgctctatcgcccaggttgaagtccagaggcacttatctcgggctcactgcaagctccatctcccgggttcacgccattctcctggatgaccattaattctaatgtcttagtatcattgaggacatgagtaggagttctgattaatattacaaatctttataaaatcaaatatgcatgctaaaaatttgatgcatattcctagattctgaggaattctagcaaagtggcaggaatgacagaattataaagttgctattttgcaactgctaacaaagtaactgatttaggcaaagatcaatggatgaaaccttttagctaaaaagttgatgggaaacttcacagtgagtggggaacacatggtcagtgcctgaacccactaagtgtgcactgaatgtggtattaccagagaatacagcaccacctac

SEQ ID NO: 238792 - DNA, 571 bp, Homo Sapiens
  misc_feature (4)..(4): n is a, c, g, or t
  misc_feature (24)..(24): n is a, c, g, or t
  misc_feature (53)..(53): n is a, c, g, or t
  misc_feature (80)..(80): n is a, c, g, or t
  misc_feature (128)..(128): n is a, c, g, or t
  misc_feature (144)..(144): n is a, c, g, or t
  misc_feature (152)..(152): n is a, c, g, or t
  misc_feature (154)..(154): n is a, c, g, or t
  misc_feature (213)..(213): n is a, c, g, or t
  misc_feature (230)..(230): n is a, c, g, or t
  misc_feature (331)..(331): n is a, c, g, or t
  misc_feature (349)..(349): n is a, c, g, or t
  misc_feature (396)..(396): n is a, c, g, or t
  misc_feature (426)..(426): n is a, c, g, or t
  misc_feature (435)..(435): n is a, c, g, or t
  misc_feature (486)..(486): n is a, c, g, or t
  misc_feature (504)..(504): n is a, c, g, or t
  misc_feature (539)..(539): n is a, c, g, or t
  misc_feature (569)..(569): n is a, c, g, or t
accngtcccaaccagttgggaccntatttaacccaaatgtaaaaaaaaccccnatttatggaaaattgaaattgtgaccnctacccatatgtttgatattaaggaatttattgagatttttttaaagngtagtaatgatattgnactcttangnatctttaaatcctttagagctgtatactgaaatatttatagataaaatgataggatatntaggatttgaaatagcncaggggaagcaggagaagcagatggagttaaaggtgtgacaggatggccatgggccaggcgtggtggctcacgcctgtaatcccagcacttttggaggctnaggctggtggataaccanaggtcaggagttcaagaccagcatggccaacatggtgaaaccctgtntctacttacaatacagaaaaaaaaattatntgggcatancggcaggtgcctgtagtcccagctacttgggaggctgaggcatgagaatcncttgaacctgggaggcanaggttgcagtgagccaaaatagtgccattgcactntagcctgggcaacaagagcaaaactccatntc

SEQ ID NO: 238793 - DNA, 535 bp, Homo Sapiens
  misc_feature (83)..(83): n is a, c, g, or t
ggaccaaaagaagtggtggatccccagccaagttttgggctcttttccagctcaggcaaaggtggcaggcacttcagatctcntcttctttcacgcagaacctggctctgcaggtgccacttacacctgcaggtcacacacatctctctggaggagccccttggggccagcacccaggttgtcccaccagagcggagaacagccttgggagtcatctttgccagcagtctcttccttcttgcactgatgttcctggggcttcagagacggcaagcacctacaggacttgggctgcttcaggctgaacgctgggagaccacttcctgtgctgacacacagagctcccatctccatgaagaccgcacagcgcgtgtaagccagcccagctgacctaaagcgacatgagactactagaaagaaacgacacccttccccaagcccccacagctactccaacccaaacaacaaccaagccagtttaatggtaggaatttgtattttttgcctttgttcagaatacatgacattggtaaat

SEQ ID NO: 238794 - DNA, 542 bp, Homo Sapiens
  misc_feature (10)..(10): n is a, c, g, or t
  misc_feature (17)..(17): n is a, c, g, or t
  misc_feature (19)..(19): n is a, c, g, or t
  misc_feature (25)..(25): n is a, c, g, or t
  misc_feature (68)..(68): n is a, c, g, or t
  misc_feature (83)..(83): n is a, c, g, or t
ccagggggtnatatgananattggngtctaaaccatctaaaagagttctttcattcgcataaaataancatgctgtatgatancaaagtttatgtcagagttgagatggctctttatggtacatatatgctgtgccttctaaaaaatgtcatattatattcagtgaaagatgatgtttcttaaaatgaatgaatgtctctgaggtggccaacattagtccttctatagccagattagcaatcttagagcctggtcaggcacagtggctcttgtttgtaatcccagtactttgggaggccaaggtgggaggatctcttgagctcaggagttcaggaccagcctgggcaacatagtgagatctcatctctactaaaaataaaaatgaaattgttaattggccaggcacagtgggaagcacctgtagtcccagctactcaggaggctaaagtgagagggtggctctagcacagtcatcaaggctgcaggaggctatgatggagccactgcactccagcctagatgacaaggtgagacgctgtctc

SEQ ID NO: 238795 - DNA, 549 bp, Homo Sapiens
  misc_feature (8)..(8): n is a, c, g, or t
  misc_feature (11)..(11): n is a, c, g, or t
  misc_feature (32)..(32): n is a, c, g, or t
aaaaaatnccnttctcacataagccccagttnatcccccatttcccccctttacctttcagtgcagtttcttttcacattaggctgttggttcaaacttttgggagcacggactgtcagttctctgggaagtggtcagcgcatcctgcagggcttctcctcctctgtcttttggagaaccagggctcttctcaggggctctagggactgccaggctgtttcagccaggaaggccaaaatcaagagtgagatgtagaaagttgtaaaatagaaaaagtggagttggtgaatcggttgttctttcctcacatttggatgattgtcataaggtttttagcatgttcctccttttcttcaccctcccctttgttcttctattaatcaagagaaacttcaaagttaatgggatggtcggatctcacaggctgagaactcgttcacctccaagcatttcatgaaaaagctgcttcttattaatcatacaaactctcaccatgatgtgaagagtttcacaaatctttcaaaataaaaagtaatgacttagaaactg

SEQ ID NO: 238796 - DNA, 587 bp, Homo Sapiens
  misc_feature (5)..(5): n is a, c, g, or t
  misc_feature (14)..(14): n is a, c, g, or t
  misc_feature (27)..(27): n is a, c, g, or t
  misc_feature (48)..(48): n is a, c, g, or t
  misc_feature (82)..(82): n is a, c, g, or t
  misc_feature (115)..(115): n is a, c, g, or t
agccntggaacccnttttaaaggaagngctcccaatagggtttgccanagggaccagaagaaattaatatgatttattagcncaacgtgggactatttgccatttaaaactagancaggtatataagctaatattgatacaatgatgattaactatgaattcttaagacttgcatttaaatgtgacattcttaaaaaaagaagagaaagaattttaagagtagcagtatatatgtctgtgctccctaaaagttgtacttcatttcttttccatacactgtgtgctatttgtgttaacatggaagaggattcattgtttttatttttatttttttaattttttcttttttattaagctagcatctgccccagttggtgttcaaatagcacttgactctgcctgtgatatctgtatcttttctctaatcagagatacagaggttgagtataaaataaacctgctcagataggacaattaagtgcactgtacaattttcccagtttacaggtctatacttaagggaaaagttgcaagaatgctgaaaaaaaattgaacacaatctcattgaggagcattttttaaaaact

SEQ ID NO: 238797 - DNA, 596 bp, Homo Sapiens
  misc_feature (23)..(23): n is a, c, g, or t
  misc_feature (106)..(106): n is a, c, g, or t
  misc_feature (175)..(175): n is a, c, g, or t
aatgcttacctccagaaaagatncaaatgtggctaagagccaatatgatgcctcagtcggaataaccagcaagagctggcaccttagaagcagacggaaaataagncagaagtagagaatcggtgccaggaattggaagaaactgtcagacacctgaagaaatgtaaagaggcancagagaatacgctgaaagaagccagtgtggaatcagaacagataacagctaatctggaagaagctcatcgctggtttaagcacaggtttgatggtctacaacttgagctgacaaaaaaccggttgcagaggccttctggggaagacaggtggcaggaaaaggaccaagatgtaaaacatgatgtcatgtccttgacaagggagcttctttatgtgtagctacactccatgattccaagagcccagcagccggggctggcctgtttctagagtcataagaacatgaagtctttgatgtgggctgaagattttggacctgagtttatcactttatgaactcttatatcagtacaaaactacccctttttttgtcccttttcacattttccacccaataaatttgtgttaatttgttgtatgat

SEQ ID NO: 238798 - DNA, 586 bp, Homo Sapiens
  misc_feature (12)..(12): n is a, c, g, or t
  misc_feature (38)..(38): n is a, c, g, or t
ccccccggcatnttggaagttagtttccacaaaggttntactgattagcagtcccttggatttagaaggaaataatttcttaagccctaactagaccaagaatccaggagttagttcatacttagttgaagaatgatcatgtatgaattcataaatatagtcaatgactacaccaaaaaaatttcgtgatcagaatgcctatttcagttggatatgagtgatcagatggtagtatgtgtacccattgatgccatacaaattttgtaggaagctggtagagaatttggttttaaagaggtctgtgttggccgggcacggtggctcacgcctgtggtcccggcactttgggaggccgaggcaggtggatcacgaggtcagaagtttgagaccagcctggccaagatgttgaaaccccatctctactaaaaatacaaaatttagctgggcacagtggcaggcacctgtagtcccagctactcgggaggctgaggcgggggaatcgcttgagcccaggaggtagaggttgcagtgagccgagattgagccattacactccagcctgggcaacagagcaagactccatctc

SEQ ID NO: 238799 - DNA, 550 bp, Homo Sapiens
  misc_feature (9)..(9): n is a, c, g, or t
  misc_feature (27)..(27): n is a, c, g, or t
  misc_feature (37)..(37): n is a, c, g, or t
  misc_feature (39)..(39): n is a, c, g, or t
  misc_feature (42)..(42): n is a, c, g, or t
  misc_feature (114)..(114): n is a, c, g, or t
  misc_feature (118)..(118): n is a, c, g, or t
atccagggntttaaaaatgtgccaagntataggcccntntantgaaagaattttacgatccagtagattctgatataagagtaagtgaatttggaaaagtaagtgaccccttgntaanggtacagtggacccccaagcctttttcaaggtggtacccaccaaagactatccaggtgttctagagggcccaaaagttgacacgacttgtctcagctcacagacttaagcaataggacagctggaactgagcccaagacttcagtaataacagcagcccttattgagcacctggtctttgtgtggcattatcccttttgcctcctcactggccctcacagcaagcctgtgatgtgaacatcacgtctctcactctggacaaggggacgaggaggttcaggcaagtgaaatgactgactctctagcattcagtgtcagtgcaggacgtccatctgagctcattttggtcactgtcatgctgcttccgaaggtcttcccaaagaatcactttttctcaagtgcattgttgttttctgttaaagaggtaggaacc

SEQ ID NO: 238800 - DNA, 579 bp, Homo Sapiens
  misc_feature (11)..(11): n is a, c, g, or t
  misc_feature (77)..(77): n is a, c, g, or t
gttgttaattnccaaggaaaaagcccaccacgggcctccagaagcccaagaagaaatccccagatgcccaacaccantgagaagctgctttgacaagtgcataatcatgtgagccctgggccttaagagccagctcttcctatcctgtagcgtgtagaaaacgtggactcatttcactatgttacatgtacatggttgattttgtgctgttgtttggactgtaacatccatgttgtcaatacgtataccttgtaagtggataacttttctttttcccaggccagagaattcaaattgttaaaacattggcatttgaagaggagaacaaaatgtagcatgatgtatttaaagtaaggcctttagtaatgaatgtaatgagagaaaatgttttgaaaagaacaaaacatcaaaatgaatagaaagaaaaattggaaggcgtccttttggtaacccgattattgtgtattacctttaaatatttcacatcctgtaagtgcttaatcatatcttttaattgtgtatttaagaaaagtgttttcacaacaaaagcttttgataaattgctgcgtgacatatact

SEQ ID NO: 238801 - DNA, 514 bp, Homo Sapiens
  misc_feature (5)..(5): n is a, c, g, or t
  misc_feature (12)..(12): n is a, c, g, or t
  misc_feature (39)..(39): n is a, c, g, or t
  misc_feature (65)..(66): n is a, c, g, or t
  misc_feature (93)..(93): n is a, c, g, or t
caagntcccatnatggtaacccagctttggaaaaggccntcaggcaagaacttaagggggccttnnagccagtagtcagcagaaccagatccntgttctagtagtgtgccaggaactgaagattgccaacaaccttgttattttggaagtgaatcctggttcagtggagccctagttgagaccttagctctggctaacaccttgattgcagtcttttgagaccaggaaacagaaagaagccagctaatctgtgcttggactcctgacccacagaacctgtgagataataaatgtgtcttgttcttaacacaccagatttgtggtaatattgttacacagtgtagaaaactaacaaactaggcctcaaaataaatctataaacagttttgcaggtacactgtagaacacacaataaaaagtagccacagaaagagacatgagtgaataccagcaggagcttctatttaaacatctgtagggacctccagatattggagttttcagagacaagctt

SEQ ID NO: 238802 - DNA, 546 bp, Homo Sapiens
  misc_feature (8)..(8): n is a, c, g, or t
  misc_feature (60)..(60): n is a, c, g, or t
cgcagggngccttccagctcaaagcaagatccccgacttgactgatgtgaattccatagncaagtggtcccgaatgtttttccccatcaccttttctctttttaatgtcgtctattggctttactatgtacactgaggtctgttctaatggttccatttagactactttcctcttctattgttttttaaccttacaggtccccaacagcgatactgctgtttctcgaggtaagagattcagccatccaattggttttaggtcttgcatatcagttttattactgcaccatgtttacttcaaaaagacaaaacaaaaaaaaaattatttttccagtctaccgtggtccaggttatcagctctttaagagctctattaattgccatgtttacaaacaaacacaaagagagaagttagacaggtagatctttagcagtcttttctagtttccctggatttcactgatttattttttagggaaaatgaaaagaggaccttgctgtccgcctgcactgcttcctggtaaactataacaaacttatgctgcc

SEQ ID NO: 238803 - DNA, 538 bp, Homo Sapiens
  misc_feature (12)..(12): n is a, c, g, or t
  misc_feature (33)..(33): n is a, c, g, or t
  misc_feature (55)..(55): n is a, c, g, or t
  misc_feature (71)..(71): n is a, c, g, or t
cctagggaaaangccccggttcccttaaccctngccaagttccttgaccccattnactcctttcttggganttttcagccaccagggctgggcctggacttttcaattgcaggcagcctggaccttgaggttgaacttgaggagatccagcagcaactactgcactaccagaccaccaagcagaacctctggtcctgtcggcggcaagcgagcagcctgcgcaggtggctggagcttgaacagagaggagccggggcctgaggaccaggaagtagagcagcaggtgcagaaagagctggaacaggtggaaatgcagatccagctgctggcagaggagctccaggctcagcgccagcccattggcgcctgcgttgcccgcatccaggccctgcggcaggccctgtgctagcgtgttcgcaccaggaacgcaggtgctgggctgtcggggaggcctcaggccacctccaggaacagaacacagttttaagtttgattttttttatttcaaaatgctttgcaattaaatgaattactgttc

SEQ ID NO: 238804 - DNA, 540 bp, Homo Sapiens
  misc_feature (21)..(21): n is a, c, g, or t
  misc_feature (28)..(28): n is a, c, g, or t
  misc_feature (31)..(31): n is a, c, g, or t
  misc_feature (100)..(100): n is a, c, g, or t
aaggtccccctccgggttcangccattntcntgccaaaggtcttaagtaccccttttggttggttctcattctctctcttggctgccaccatgcaagacntgcctttcgccttctgccatgattgggaggcctccccagccacatggaactgtgagtccattcaacttctttttctttgtaaattacccagtctcgggtatggctttatcagcagcatgaaaacagacaaatatactgttgtttcttattaaatgttattggcttattttgaaaacaaaagcttaccaaatacatgtgattatgggaaggggccagaaagttacactgcaagtaaaaatatcagtaactatgtttactgggtggcgatggcaaaaacaatagtttttcctttttttttttttggagacaggatcttgctctgtcgcccaggctacagtgcagtggtgcaatcacagcccactgcagcctcgacctccggagctcaattgatcctcccacctcagcctcctgagtagctgcatctacagatgtgagccacc

SEQ ID NO: 238805 - DNA, 540 bp, Homo Sapiens
  misc_feature (34)..(34): n is a, c, g, or t
  misc_feature (55)..(55): n is a, c, g, or t
  misc_feature (61)..(61): n is a, c, g, or t
  misc_feature (79)..(79): n is a, c, g, or t
  misc_feature (456)..(456): n is a, c, g, or t
acttgttcatgccaagcgtatttaacttttctcnattactttatgatctatgagnccattnggggtctctctaagaacncagctcccatttataacactatttcaatagagaataagctctgaaaaaacactgttttgaataaagctcacatttcccagaaaatagccctagtgtgattcaaataggcatggcattgtgtagcgagaagccatgaaacctgtgggagcacgagctgagcacacagggagaaccctgcatttggattcactggcaaagaccaaacttgaagctatagctctgggtacctctcaattatccctactggctgaggcaacactttaatggtagcctgaggcgccagccctgtgagacatttgacaactcacagcacaacaaccctcctatgagcgggattcctcgtctgggcgcagtggctcaagcctgtagtcccagcnccttgaggggtcaaggtgggaggatcagttgagtacaggaattcaagaccagcctgggcaacatagcaagacctcatctctacc

SEQ ID NO: 238806 - DNA, 544 bp, Homo Sapiens
  misc_feature (3)..(3): n is a, c, g, or t
  misc_feature (6)..(6): n is a, c, g, or t
  misc_feature (21)..(21): n is a, c, g, or t
  misc_feature (36)..(36): n is a, c, g, or t
ttnccnttggaacccggcatnccaagtgttgtgctncagtattactgaagagtataatgaaagtaatgtcctgctgaaaattttctttgagatattaatcattaataatttatatattgctatttaatacttacataggtctttagccttttaaaggatttctgtttgacagcttttataattgaaagttattccattttttttttaattttgcatgcttgaaaaagatgaaaacagtgatttaaattatgaagtatggggccaggtgcagtggctcatgctggtaatcccagcactttgagaggctaaggcaagtgggtcacttgagcccaagagttcaagaccagcctggccaacatggtgtgaaaccccgtctgtactaaaaatacaaaaattagccaggcgtggtggtgcatgcctgtaatcccaggtacttgggaggctgaggcacaggaattgcgtgaacccaggaggcagaggttgcagtgagccaagatcacatcaccgcactgcagcctgggtgacagagtaagactctgtctcc

SEQ ID NO: 238807 - DNA, 555 bp, Homo Sapiens
  misc_feature (4)..(4): n is a, c, g, or t
  misc_feature (32)..(32): n is a, c, g, or t
  misc_feature (98)..(98): n is a, c, g, or t
  misc_feature (108)..(108): n is a, c, g, or t
  misc_feature (209)..(209): n is a, c, g, or t
ttgnaagcacccaaaaagtccttcaatagggnatagccaaaacttaatggaatattatttagggctagaaataaatgagccatcacgtcacaaagagncatggagaanccttccatgcatattactaagtgaaagaggccactctgaaaagactacctattgtttgattccaactatatgacattctagaaaagttaaaactatggagncagtaaaaaggtcagtggttgccaggggctgggaggacagagggatgaaaaggtggaacagggaggatttcagggcggtgaaactactctgtgtgatattacactggcggatgcatgtcactgtgcacttgtccagacccacagaatgtgcacccccaagtgtgaaccctcgtatggactatgaactctaagcaataatgacatgtccgtgtagggtcatcagttacacatgtaccagtctgatgtgggatgatggtagtaagggaccctgtgcctgtgtggtgggaggaggtgtgtgggaactctgtacttctactcacttttgctgtgaacctaaaactgctct

SEQ ID NO: 238808 - DNA, 467 bp, Homo Sapiens
  misc_feature (6)..(6): n is a, c, g, or t
  misc_feature (11)..(11): n is a, c, g, or t
  misc_feature (14)..(15): n is a, c, g, or t
cccttnccccntannccctcagaaagaactagaagtatgataaatgagtacgactgggaatttgttttttccactatctctaggatgttcatgttttgtagaatccatatccttaattctttttgtgtgaaaatgtagagcatacctagttctcagacccaattccatagattagaaagaagttttggccgggcacggtggctgatgcctgtaatcccagcacttcgggaagctgaggcgggtggatcacctgaggtcgggagtttaagaccagcctggccaacatggcaaaaccccgtctctactaaaaatacaaaaattagccaggtgtggtggcgcacacctgtagtcccacctacttgggaggttgaggcaggagaatcacttgaacccgggaggcggaggttgcagtgagccaagatcgtgccactgtactccagcctgggcaacagagtgagactccattt

SEQ ID NO: 238809 - DNA, 533 bp, Homo Sapiens
  misc_feature (27)..(27): n is a, c, g, or t
  misc_feature (46)..(46): n is a, c, g, or t
  misc_feature (74)..(74): n is a, c, g, or t
tccttgaaccagccatttctaggttcnaatattgaaccagattttntaagagcttttcagattttaatttttcntattcggccattcaaaaaaaaatagggattcagaaggagaaatctcttttaaaaaattataaagagtggtaagtaacacatgggtgctggatttgaacagaccttgtcatcaaatgtcaattcctacacaggtttcataggttgctatgagggtaaaatatggaaaacgctaagcccagtgactagaactaatgaaaactattatcattagtagtaatgtactttggaaaaaaaaaaatacaaacttccactcccataagctcaagggtattactaaaaatgattgcctggccagaattcctggcttaaacttgtaactttctgggggttgatacatccacccctgcattcttaagcccccaattgtgatagaaaagaggtgacacattctttccttttgctagactcatgtaaaagttgccataaaccacccatggcattttcagtggagtttcaatg

SEQ ID NO: 238810 - DNA, 565 bp, Homo Sapiens
  misc_feature (5)..(5): n is a, c, g, or t
  misc_feature (9)..(10): n is a, c, g, or t
  misc_feature (43)..(43): n is a, c, g, or t
tcccnaccnntccaggaaacccgggaagaaggatcgtttaggnccggagtttaaagcccagcttagccaccagatccagacccttgtccctacaaaaattaataagctaggtgtggtggcgtacacctttggtcccagctactctagaggctgaggaaggaggaggattgctggagcccaggaggttgaggctgcagtgagccatgactgtgacactgcactcctgcctgggcaacagagtgagaccctgtcttaaaaaaaaacagaaaacatgaccaggcatggtggctcacgtctgtcatcccagcactttgggaagctgaggtgggtggatcacttgaggttacgagtttgagaccagcctggccaacatggcgaaaccccgtctctactaaaaacacaaaaattagctgggcgtggtggcacacacctgtaatcccggctactcaggaggctgaggcaggagaatcgcttgaacccaggaggtggagtttgcagtaggccaagatcgcaccactgcactccagcctgggagacagagcaagactccatctcaaaaagaaac

SEQ ID NO: 238811 - DNA, 558 bp, Homo Sapiens
  misc_feature (5)..(5): n is a, c, g, or t
  misc_feature (14)..(15): n is a, c, g, or t
  misc_feature (18)..(18): n is a, c, g, or t
  misc_feature (25)..(25): n is a, c, g, or t
  misc_feature (54)..(54): n is a, c, g, or t
gttgncccaacccnnggntgacccnacatgttccttaaagccaagggccgatcncctgaaccaaggaaagtgccttcatagcaagggccgcagagcagccatcaggcattcccgatcttggtttctggacccagctctggaaaagaagccagatcctagccacttggagctgcctagggaagaccccagcctggtgccggctgacagctcactggaacttttcatctgcttggccaggtgatgccaaggggcagaggttagaagtgctaagaagcaggccgagggtggtggctcacgcatgtaatcctaacactttgggaggccaaggcgggtgaatcccttaaggtcaggagttcaagaccaggctggtcaacatggcgaaaccccatctctactgaaaatacaaaaattagccaggtatggtggtgcacgcttgtaatcccagctactctggaggctgaggcaggagaatctcttgaacccgggaggcagaggttgcagtgagccgagactgtgctactgcactccagcctgggcaacagagcaatactccgtatc

SEQ ID NO: 238812 - DNA, 557 bp, Homo Sapiens
  misc_feature (3)..(3): n is a, c, g, or t
  misc_feature (27)..(27): n is a, c, g, or t
  misc_feature (47)..(47): n is a, c, g, or t
  misc_feature (60)..(60): n is a, c, g, or t
aancccccttaattccccattttcccnagatttaatccaagtcaagnttttgccgcttgnatctcagctttcttcttcagtgataaataaaacttatgcctgatgttgcacatttgccacttgagaagctgggaccctgtctccctcttgacttaagtcgtggttcagaagttacagcaccggtagcctcagattcctcttaccgtaatgaatgtcccagggcagaaaaagaggatacacagatgcttccaaatccttcttccaaagcaatagctgatggaagaggagctccagcagcagcaggaatatcgaaaacagaaaaaaaagtgaaattggaagacaaaagctcaacagcatttggtatcaggagttgggatttctcagcactgctaatgaagatcccctcttatagtccaataagcttatcaggacttccagagtcatgacatgaacagtttaattgaacccatccactctgggcaggtaagagaaaagaaaaagataaggaaagaagagagaagagagacaaagatcactacagaccaaaacagaagaag

SEQ ID NO: 238813 - DNA, 567 bp, Homo Sapiens
  misc_feature (2)..(2): n is a, c, g, or t
  misc_feature (61)..(61): n is a, c, g, or t
  misc_feature (87)..(87): n is a, c, g, or t
cntctactgcaatgtaaataggataaagcctaggtatataaagctttttggtaatatgttncaattaaaatgccaagcactatatcncaatctctgtttgtatgtgggttttacactaaaaaaatgcaaaacacattttattcttctaattaacagctcctaggaaaatgtagacttttgctttatgatattctatctgtagtatgaggcatggaatagttttgtatcgggaatttctcagagctgagtaaaatgaaggaaaagcatgttatgtgtttttaaggaaaatgtgcacacatatacatgtaggagtgtttatctttctcttacaatctgttttagacatctttgcttatgaaacctgtacatatgtgtgtgtgggtatgtgtttatttccagtgagggctgcaggcttcctagaggtgtgctataccatgcgtctgtcgttgtgcttttttctgtttttagaccaattttttacagttctttggtaagcattgtcgtatctggtgatggattaacatatagcctttgttttctaataaaatagtcgccttcgttttctgt

SEQ ID NO: 238814 - DNA, 566 bp, Homo Sapiens
  misc_feature (18)..(18): n is a, c, g, or t
  misc_feature (28)..(28): n is a, c, g, or t
cctcctccaaccagaaanagtccaagcnttaaagtgttccgcaagtttcagtcccaaagttttcaggcccttttttggcagcagagcctctcctcaggttgcttgtcctcccctggcctccagtttcccctgccctcccgggtagagctgggatgccctcacttttcttctcatcaatacctgttccactgagctcctgttgcttaccatcaagtcaacagttatcagcactcagacatgcgaatgtcctttttagttcccgtattattacaggtatctgagtctgccataattctgagaagaaaatgacctatatccccataagaactgaaactcagtctaggtccagctgcagatgaggagtcctctctttaattgctaaccatcctgcccattatagctacactcaggagttctcatctgacaagtcagttgtcctgatcttctcttgcagtgtccctgaatggcaagtgatgtaccttctgatgcagtctgcattcctgcactgctttctctgctctctttgccttcttttgttctgttgaataaagcatattgagaatgtg

SEQ ID NO: 238815 - DNA, 557 bp, Homo Sapiens
  misc_feature (30)..(30): n is a, c, g, or t
  misc_feature (34)..(34): n is a, c, g, or t
  misc_feature (41)..(41): n is a, c, g, or t
  misc_feature (67)..(67): n is a, c, g, or t
  misc_feature (76)..(76): n is a, c, g, or t
  misc_feature (106)..(106): n is a, c, g, or t
gtgccgggaagcccaaggccttgccttaanaggnatatctntgccggtcccttggtccacaccttancccccaagntgctcagccagtgggcacatgccaggggcntcactgggggcacatagagcatttgggggactgcgagtgctcacctttgacttcctgcaggtcgggggaaaaccagatcatgatgaccaaagtctacatattcttgatcttcatggtgctgatcctgccctccctgggtctcaccaggtatatgccaccaccttctgctctaaattcagaataagagtcacatcaggagagcactgtccccaggagaatgcaaacggtttggcagcagaagcaaacctctaacaatatctaagcctgtcgcaaccactcggcgtgcagtagggctgggtcattgattcttctggcaatatgattgattgttcttctttaaaaaagaaaaaaacaccatattggtcaggctgttcttgagctcctgacctcaggtgatccgcccgcctcggcctcccaaagtgctgggattacaggcgtgagactctgtctc

SEQ ID NO: 238816 - DNA, 542 bp, Homo Sapiens
  misc_feature (8)..(8): n is a, c, g, or t
  misc_feature (16)..(16): n is a, c, g, or t
  misc_feature (38)..(38): n is a, c, g, or t
  misc_feature (47)..(47): n is a, c, g, or t
  misc_feature (116)..(116): n is a, c, g, or t
  misc_feature (373)..(373): n is a, c, g, or t
  misc_feature (375)..(375): n is a, c, g, or t
  misc_feature (503)..(503): n is a, c, g, or t
  misc_feature (523)..(523): n is a, c, g, or t
  misc_feature (526)..(526): n is a, c, g, or t
  misc_feature (540)..(540): n is a, c, g, or t
taaccttnttttaaanccaaattttctttttggccaanaaaggcagnaaccaaattggtgccagtcgttgaaatacgtcttgctctaaaaaattaaaaaaaaggatatccagagcnctggccattatttatatggtggttagagtacatcacttctattttttgaaaattaaaaaaaatattaacaagtgaaaaacaagcattctattccatgttccctcttacagtttatctggatacggtgtttaaaatgacaatacagccaggcgcggtggctcacgcctgtaatcccagcactttgggaggccgagacaggtggatcacctgaggtcagaagttcaagatcagcctagccaatgtggaaaaaccccatntntactaaaactacaaaaaattagctgggcatggtggcatgcgcctgtaatcccagctactcgggaggctgaggcaggaaaattgcttgaacccaggaggcggatgttacagtgaaccgagattgcgccnctgcactcaagcctgggccncanagaaagactctgtntc

SEQ ID NO: 238817 - DNA, 570 bp, Homo Sapiens
  misc_feature (15)..(15): n is a, c, g, or t
  misc_feature (19)..(19): n is a, c, g, or t
  misc_feature (21)..(21): n is a, c, g, or t
  misc_feature (33)..(33): n is a, c, g, or t
  misc_feature (36)..(36): n is a, c, g, or t
  misc_feature (86)..(86): n is a, c, g, or t
ggcaggcatcagggntaancngcctttccaatnttnaacacttgcaccttaaggttcacaccattctttctcaccttttttttganatggagtctcggttttcttgcccaggtgaagtgcaatggcacggttttcagctcactgcaacctccgcctcttgggttcaagcaattctgctgcatcagcctcccgagtacctgggattacaggcatgtgccaccacgcccggctaattttgtatttttagtagagacggggttttgccatgttggccaggctggtctcgaactcttgacttcagatgatccatctgccttggcctcccacagtgctgggattacaggcgtgagccaccatgcccggcctctttctcacctttacacctgtcttcttatcctcacatctgttttcacaccttcatccctgtcttcctcatgttcacacttgtcttccccatgttcatagctgcctttcttaccattttggtttgaagggcagtcttctctggcttgtttttttgtttttcccagaaaatcagtattattttttaaataagaaaaacattcctag

SEQ ID NO: 238818 - DNA, 559 bp, Homo Sapiens
  misc_feature (15)..(15): n is a, c, g, or t
  misc_feature (27)..(27): n is a, c, g, or t
  misc_feature (39)..(39): n is a, c, g, or t
  misc_feature (55)..(55): n is a, c, g, or t
  misc_feature (71)..(71): n is a, c, g, or t
  misc_feature (77)..(77): n is a, c, g, or t
aaaaatggagttccnctggttattgcnccaatccgaatngtcatcaatgggtggnttaaactcaatgtagnccaccnccttaaaaaaaaccagtaaggtggaatgtgtgcccagtggactgttgcccagtattgcaagaggattcatggagatggacccccttacaacagggcaggctctagcatcctccctgaagagtaagaatttacagaaatgtgcagataaaatccccagggagctgtctgattccatgatgtctgccctccacctctctggcaatgctgatggcagtgttggtaactaattgactgatctcacttcccttccgatccaagcaccagttccagtgggacgggagattaccagtgaaatagtttggttctccctgaagcatctgcatattaaaagaacccttccccaactatgtgtctttgcctcccactgttctctccactctctccaggaaaaagagtcccaagaggctggagctgacaaacccaataccctttatttaacccctactctgttttacaacagaaataaaagaagtatcagcagg

SEQ ID NO: 238819 - DNA, 562 bp, Homo Sapiens
  misc_feature (8)..(8): n is a, c, g, or t
  misc_feature (25)..(25): n is a, c, g, or t
gtatatantaaaaggtgtctcaaangtattagccaaaaaagctggtagatatattttgactattttttgcccacacccgtttaaggatttcacatcatacaaagcgcttgcttagatggcttctatcctaggcatatgctggccgggtgctctacatataaattctcattgtatcctcccatctgtccactgaggaagattatcaaatggatcttcatccaatggatgcataaactttcctacttacttgtagtggcaaagctggctttcaagtacaagtttgttggctccattacctatgctcctattatccgcttctgtcccgcaacaaagtagctcacttaggcgtatgaccacatgcattatgatagtttcccaccaccatattgaataataaaagctttggccaaagcttttttaaagtaggagaaacattggatgtatatgttttgcattgccatttgatttcaaattaatcaggaagaattagtgattttaatgagcagtaaagtggtgcaataaagcagaaagaaaaatgttcagccagaagtgaaagactagt

SEQ ID NO: 238820 - DNA, 554 bp, Homo Sapiens
  misc_feature (28)..(28): n is a, c, g, or t
tgggcaactccattcacggccattattnccagggacctggggcatatttcttgccttctatgatccgaaaaatatttgcaactttaccaagacctctggcattattttatgaaaactcaaagcttgatgaagttcctaaagtatatagttgtctgaacaacaagttagaaaagctactgggagaaattattgcttgtctgcaattcagctacaccggaacttatgatagtgaacttcttgaacaactctccccactattatgcataatatttctgcacaagaataaacagattcgaaaacagagtgctcagttctggaatgccacttttgccaaagtgatgatgttggtttatcctgaagagttaaaaccagtactaacacaagccaaacaaaaatttctgctcctgttgcctggtttggaaactgttgaaatgatggaggaatccagtggaccatattctgatggaacagaaaattcacaactaaatgtgaagataagtggcatggagagaaaatcaaatggaaaaagagattcatttttggcacaaacaaag

SEQ ID NO: 238821 - DNA, 584 bp, Homo Sapiens
  misc_feature (19)..(19): n is a, c, g, or t
  misc_feature (53)..(53): n is a, c, g, or t
ccaaacccttgagttcttnagaactccggaagccttcttgcaaaagatcttcnggttctattgaatgagattctggagcaagtaaaagataggacatgtctgagagctttggagaaaatcaagattcagttagaaaaaggaaataaagaatttggtgaccaagctgaagcagcacaggatgccaccttgactacaactactttccaaaatgaagatgaaaagaataaagaagtatatatgactccactcaggggtgtaaaagcaacccaagcatcaaagtctactcagctaaagactaacagaggacagagaaaagtgacagtttcagctaggacgaacaggaggtgtcagactgctgaagccgactctgaaagtgatcatgaagttccagaaccagaatcagaaatgaagatgagactaccaagacgagccaaaaccgcagcactagaaaaaagtaaacttaaccttgcccaatttctcaatgaagatctaagttaggaaagacgatggaggtggaatcctttaagattatgtccagttatttgctttaataaagaagaagttacccttgtcaaaatcagaac

SEQ ID NO: 238822 - DNA, 590 bp, Homo Sapiens
  misc_feature (10)..(10): n is a, c, g, or t
  misc_feature (56)..(56): n is a, c, g, or t
  misc_feature (107)..(107): n is a, c, g, or t
  misc_feature (197)..(197): n is a, c, g, or t
  misc_feature (202)..(202): n is a, c, g, or t
ccatcagccnacctttttaaaatcctattaaacctatttccattttgaagatttgnggtagaatgaccaaagttgtttaccagagcccatggtaaagttgagtcccngcttaaacttaaattgttttaaaggattatttctgtgttttactcttagtgtgcccttttgattttgctttacccaaaactgtaagaaancaaancaaaagatcatactcataaaagatctgtcctgcagtgtttctttttaggtttttgaaaccacatagcctcttgattctcaattcttattgtttactctgtcagaatgtgaacatgaaggtatttttagaaatagtctttatttcacaatctattcactgaaacttgtgggtatttgaatttttaaaaaaatcaaggataagctgtttggagaaaggtattataaagtctgaacaaagcaaaagtagtagtttaacaagaatgcatgtagaaaattcttagactgtacatgcttatcacattttacttactttgttaaacattggaagtttttgttacttatgctagtaacaatgtgtgtgtttctattgaattaaatttaatttattt

SEQ ID NO: 238823 - DNA, 535 bp, Homo Sapiens
  misc_feature (16)..(16): n is a, c, g, or t
  misc_feature (19)..(19): n is a, c, g, or t
  misc_feature (37)..(37): n is a, c, g, or t
  misc_feature (82)..(82): n is a, c, g, or t
cagccagccagtgtgncantgcttaaacggcattttnccaatgggttaaccccagagggtttcctaggaaatcacaggcttntgagcacagctgcattaaaccaaaggaagttctccttttgaacttgtcacgaattccatcttgtaaaggatattaaatgttgctttaacctgaaccttgagcaaattagttggtttgtgtgatcatacagttatgtgggtggcttctagtttgcaacttcaagggacaagtattaatagttcagtgtatggcgttggtttgtgttgagcgtttgcacggtttggataatcttaaattttgacggacactgtggagactttctgttactaaatccttttgttttgaagctgttgctatttgtatttctcttgtcctttatattttttgtctgtttatttacgcttttattggaaatgtgaataagtaaagaattacttgtgttacttgccaagcagtgcacatttcatagtttcaaatctgtaatcagcaataaaaatcctaaaatatgtacct

SEQ ID NO: 238824 - DNA, 548 bp, Homo Sapiens
  misc_feature (5)..(5): n is a, c, g, or t
  misc_feature (23)..(23): n is a, c, g, or t
  misc_feature (25)..(25): n is a, c, g, or t
  misc_feature (61)..(61): n is a, c, g, or t
  misc_feature (75)..(75): n is a, c, g, or t
  misc_feature (93)..(93): n is a, c, g, or t
  misc_feature (109)..(109): n is a, c, g, or t
  misc_feature (118)..(118): n is a, c, g, or t
tgtgngtccagccatccataggntncccattccattttaaaaaagagaaagtgcccttttncaagccagaaaganagcccccaccaagacccntatcatgctggcaccntgatcttgnatttccagcctccagaactgtgagaaaatcaggttcgcctgtttaagtcacccagtctttggtatttcgttatggtggcctgagctaagacaggccctgtgttctctgtgtagcaagaggcaggaagctagcacaaaggttgccagatagcagggactggctggctgttagtgagccagggccagtggcatttaattgcagtcattcccattctttgctgagctttggtcataactatttgtagaggacccctagacttttttttttttcttccaggacaaaagtgatccaaaacatactgtcttcagtttttgagcattggactaccaaacaggaacatttaaggaaaacaaaatgttgctgttgtaaagccttgatggtgggaagttatgtagtgaattctcaatttcttcttcctgcatcttgtctt

SEQ ID NO: 238825 - DNA, 569 bp, Homo Sapiens
  misc_feature (25)..(25): n is a, c, g, or t
  misc_feature (55)..(55): n is a, c, g, or t
tgctggctttaagccgggaagaacntttggaaggaaggctcgaagagaccaatgnaggtggtgaaaatcaagctttggattgtgcattcctaggcccaaaattacctcattcttcctaacaagcaatctgggacctgattttccaccttttttctcttttcttcccttcctttgttttcataagcctttggtatctttcctgcccttttcctttgtgtactctatactggagttcccttcttcctcttgctgtaggctcaatcccataccgacatctacaactaatctttcccatcaactctgtgtgaaggcaggttgcaactagaaattcagaggggcttggaatagagaaacctaaagaagcatcatcccctccatccccaacttcctcaaagcccaaagccaagggaaggataaatcaaggctcaaggcttccccagcaaagattagggaaagagacttgaccccaggactgtactacgactcttaagagaacactgcacagcactcaaagtcccccactggactgcttcctccttagccccactggtataaatacatctctctcc

SEQ ID NO: 238826 - DNA, 507 bp, Homo Sapiens
  misc_feature (16)..(16): n is a, c, g, or t
  misc_feature (20)..(20): n is a, c, g, or t
  misc_feature (25)..(25): n is a, c, g, or t
  misc_feature (38)..(38): n is a, c, g, or t
  misc_feature (41)..(41): n is a, c, g, or t
  misc_feature (44)..(44): n is a, c, g, or t
ccttttttaagcttgngagncaaantttttttaaaacnagnccnaattaaggtaaaattgatatccaaacacgggttaatatttaaagtggataatttgataagttttgccatatgtttacatctgtgaaactgtcaccacaatcaacagggggatcatatccatcacccacaaaagttttcttaggcctcttccccctgagaaaaccctctctctggcagccactgaactgctttctgtccctgcagattcgtttgcattttcttaagttttatataaatggaatcatagagtacgtgctcttcttttgtctgtcttctttcacgcagcataattattttttagattcttgtgtcttgtgtgtgtcaattcttttctttttattgatgaataacattccattgtatggatataccacatctgtacagtttgtttaatccattcacctgtcgatggacatttggatcacttccaatatttggctattaaaataaagctactctgaac

SEQ ID NO: 238827 - DNA, 543 bp, Homo Sapiens
  misc_feature (29)..(29): n is a, c, g, or t
  misc_feature (40)..(40): n is a, c, g, or t
  misc_feature (83)..(83): n is a, c, g, or t
  misc_feature (98)..(98): n is a, c, g, or t
  misc_feature (112)..(112): n is a, c, g, or t
  misc_feature (117)..(117): n is a, c, g, or t
atcccccagggtaaaagtccagggcctgntctgggctcantgaacctccacctcctgggtcaagggagtctcctgcctaagcntcccgagtagctggnattacaggtgtganccccnatacccagactcatttgatgagttttgatgtaaaagcatgtaactcaaacccctatgtctggaacatctgtattacatctgaattttttcacctagtcaattcctgcacctctctctcctgtcccttcttccctcccctggcagtcagctactgttaggattttgttcactgtagattaattttgcctattctagaacttcatataacggactcacttatgcagtatgtattctgtaagttccttttactcagcatgtttgtatgttcatcagtgtgtttaagctttgttcctttttatggctgagcagtgttctatgtatgaatgccacattttaacgtttcacctgttaggtgaacaactaactggtgaacaatgggctgtttctagtttggggctatcatgaataaagttggtatgaacatgt

SEQ ID NO: 238828 - DNA, 695 bp, Homo Sapiens
  misc_feature (6)..(6): n is a, c, g, or t
  misc_feature (9)..(9): n is a, c, g, or t
  misc_feature (17)..(17): n is a, c, g, or t
  misc_feature (39)..(39): n is a, c, g, or t
  misc_feature (128)..(128): n is a, c, g, or t
  misc_feature (241)..(241): n is a, c, g, or t
  misc_feature (628)..(628): n is a, c, g, or t
  misc_feature (631)..(631): n is a, c, g, or t
  misc_feature (645)..(645): n is a, c, g, or t
  misc_feature (661)..(661): n is a, c, g, or t
  misc_feature (688)..(688): n is a, c, g, or t
aaaggnttncatattanaggtttcattaatatgaatatncagaataggtaattcatagagataattcagattcatggttgctgggggaatggaagtgcttgcttcatgggaatggggttttcttttgnattgatgaaaatattgtagaccaagatagtgggaatagttgcacattgtgaatgtgccaaaatgccagtgaattgtatactttaaaatgggtgatttgatgtgtattttattncaattaaaaagaaaaggatttgatatttgcaatcattaccaaagccaaaaactagtgttctcaacgtttgtgaaatgcccaaaccgtggtttagaattaatttatagcattagtaacatgacaaatctattcagcttaaagttctagtaaaatttgtgaatcccatcatagaagtactcctgacagcagcagaaataaagctgtaattcatcaaaatttccttatatttaaaacttctgtgactgagtgattgacttctgtgtcaatgtttattttttatcttttgaaatttattatgattccttgtggcacatcccaatcacgctttttaaagatgtgtttttaaaaccatgctttgaaaaaaatttgtatacttttcaaggtttnccnttatagttttaaantttgtttcttttaaanaacaaatgcaacttgttgtattagagnaagacta

SEQ ID NO: 238829 - DNA, 568 bp, Homo Sapiens
  misc_feature (2)..(2): n is a, c, g, or t
  misc_feature (14)..(14): n is a, c, g, or t
  misc_feature (95)..(95): n is a, c, g, or t
  misc_feature (123)..(124): n is a, c, g, or t
cncctttaagagancaattgaccataaaaaaaattcgtccttccaattaattgcagtaaaaccaaaagagtagtgggaagagaaaaccatcccantacatattttctctcagaatagaaaganncccccaaagagaaaatatgaccaatataaagcacttaaaggaagaggatgatttcttccagcttttccacactctctttatgcgcaggaacaaacagctgttgagtgagctgctatgactttggtagagaggtgcaatatgttttttgaaccagctataaaagaaattaagaggtacatgtgagggtagaaacaaatatcaaggatgagaatggcactggctgtcccatatggtatccaggagccaccaatgtctgttgagtacttcatacatgcctagtctgaattgagatgtgctcaatgtataaaatatataccagatttcaaatacctacttcaaaaaataatgtaaaatatctcactaataacttttcctttgtgtattgcaatgataatatgttggctctattggattaaataaagtatgttattcattttacctgtt

SEQ ID NO: 238830 - DNA, 576 bp, Homo Sapiens
  misc_feature (17)..(17): n is a, c, g, or t
  misc_feature (72)..(72): n is a, c, g, or t
aagtaagtaaccccaanaagtccatgataggccagatttttgaaaacttaaagccagaaaaaagttgaaagntcaagaaagaagtgaaatcttaactagagggaaaagtaactcagatgacagtggatttctctctggaaaccatggaggccagaaggaagtgagacaagttcttttagtgccagaagaactatcaacttgtggctgggcacggtggctcacacctgtaatcccagcactttgggagaccaaggtgggcagatcacttgaagtcaggagtttgagaccagcctgaccaacatggcaaaaccctgtctctactaaaaatacaaaaattagccaggcatggtggcacatgcctgtaatctcagctacttgggaggctgaggcacgagaattacttgaacccgggaggtggaggttgcagtgagccaagatcctgccactgcactccagcctgggcaacagagcaagactgcctcaaaacaaaactctgtcaactccaaattcctatttggtgaaatgatccttcaggattgatggggtaataaaaacattctcggttgatagaaaact

SEQ ID NO: 238831 - DNA, 531 bp, Homo Sapiens
  misc_feature (36)..(36): n is a, c, g, or t
  misc_feature (46)..(46): n is a, c, g, or t
  misc_feature (48)..(48): n is a, c, g, or t
  misc_feature (74)..(74): n is a, c, g, or t
  misc_feature (211)..(211): n is a, c, g, or t
  misc_feature (233)..(233): n is a, c, g, or t
  misc_feature (358)..(358): n is a, c, g, or t
  misc_feature (376)..(376): n is a, c, g, or t
  misc_feature (393)..(393): n is a, c, g, or t
  misc_feature (407)..(407): n is a, c, g, or t
  misc_feature (494)..(494): n is a, c, g, or t
tcccaaatgtcaggcccaagattttctaccaaaatntcagaaagtncnctttaaggagccatactctgatatgncagatgagaaagggagagaagcttttctctggcagactatcagtgtttgcctcccaaatcccaggaccaggatgacatcaaaaatcagcaacctgcatcttttatgagagaagaaagagtgagagaggaattgcctntggactatcatcaatatgttgnacctaaaatccaggaccaagactcccctagagaacagaacaagcatatcaaactaccctcatcttttgagaaatgggagattgcaagaggaaatactcctggagtgccattggcttatgataggnatcaatcaggattgagcnctgaattccaagctccnctggcatttcagtntgacgtggataaagaagaagataagaaagagcgtcaaaagcagtacctgagacatagacgacttttcatggatattgagagagaacnagttaaagaacaacaaaggcaaaaagaacaaaagaag

SEQ ID NO: 238832 - DNA, 564 bp, Homo Sapiens
  misc_feature (20)..(20): n is a, c, g, or t
  misc_feature (39)..(39): n is a, c, g, or t
ccaattttttctttaacccncagtaattttttgccaccngtcatcatgaaactacccttaggaaaataagattacctgcaaaaaaaaaaagaaatgagttatggaataggaacagttatgtgatgattctgaaactttaacttagagcttcattactttaagaatggaaaacaacctctgagtttgatttcccaaagtttcataaagcccctaagctcatgattttcatcaactctttgcccacatagtcatttacctccacagccgtttgttgtcatagaaggggtggtggtgtttggatttgatttttttcaacttgcagtgagaaataggataggtgacaaaaccttacttgttttcttaagacaattcagtgcttgagcatctctgtcagaaatggaatgaaatactgttagccaattagaattattttatgtattgttattgtgttttgctgatttttatatgaaaatataattattcattcttgatctctggaagcaatcattattatgaggatcattttactttggaaacactttcataataaagataagtattaag

SEQ ID NO: 238833 - DNA, 570 bp, Homo Sapiens
  misc_feature (74)..(74): n is a, c, g, or t
  misc_feature (77)..(77): n is a, c, g, or t
  misc_feature (121)..(121): n is a, c, g, or t
  misc_feature (548)..(548): n is a, c, g, or t
atggcttttcaaatcccatcaaggtccaggttttattggccaagatggggttccagatgaggaaaagctggggnccnaagctaactggttggtcttactgactttttcagggccatgttgnaattgtccttgctcacatgctgccatcatgtcaggtaaagccagaataagagataaaaggaaatattttaaaattatacagttcagctagccaaatttggtttatcccgctcttggagtttctagtcactcacccaagtcaaatatgtggcacaggcattgtcttttctttgaaataaactttcaagactcagaatcttaaggaaaaaaaagtaaagtaagatcataaaacatttatcaatttttaaaagaggtttataggtttaagtaatttttcaaagaagtagctattttattgctaaataaaataattatgattcaactagtttaattttcaatataattttaaatggaaatattgacctctgaaacttgctgagcatattcttttggtatcttgattttgatccattgcatcaaaattatancaatagcaaaattttttaaagc

SEQ ID NO: 238834 - DNA, 540 bp, Homo Sapiens
  misc_feature (10)..(10): n is a, c, g, or t
  misc_feature (13)..(13): n is a, c, g, or t
  misc_feature (24)..(24): n is a, c, g, or t
  misc_feature (33)..(33): n is a, c, g, or t
  misc_feature (48)..(48): n is a, c, g, or t
  misc_feature (69)..(69): n is a, c, g, or t
gcccccatgnccnttcaagccggnatcaaatgnccagcctttgggccnagcagatgagtcatctgccantaggcagccccggaacatacatgcctgcaacgtcagctatgcaaggagcctacttgccacagtatgcacatatgcagacgacagcggttcctgttgaggaggcaagtggtcaacggcaggtggctgtcgagacgtctaatgaccattctccatatacctttcaacctaataagtaactgtgagatgtacagaaaggtgttcttacatgaagaagggtgtgaaggctgaacaatcatggatttttctgatcaattgtgctttaggaaattattgacagttttgcacaggttcttgaaaacgttatttataatgaaatcaactaaaactatttttgctataagttctataaggtgcataaaacccttaaattcatctagtagctgttcccccgaacaggtttattttagtaaaaaaaaaaaaacaaaaaacaaaaacaaaagatttttatcaaatgttatgatgcaaaaaaag

SEQ ID NO: 238835 - DNA, 533 bp, Homo Sapiens
  misc_feature (5)..(5): n is a, c, g, or t
  misc_feature (9)..(9): n is a, c, g, or t
  misc_feature (51)..(51): n is a, c, g, or t
tggantggnctgaatggaagatcgttgagcccggaggccagggccagtganccgaggtcatgccattgcattccagcctggcctgggcaacagagcaagaccctgtctcaaaataataataatatataattttacaccaaaagtttcaggaaaaaacgagtttgttggagttagtttatactttcacatatcaccacaaagatctccagttaaataactatcaatatccatttccattcatctccccctcaaatcatagcctaacagaacactttgaaagctcttttatttaatatttttttacatcctttgaagggagtgcttcaaaaatgaaagcatcagaagataaaatatttttatatttatgcatagcaagccttcatgaacggaagtgacacactctggattgaataatactgtagcctcattcatatgtagttattcaaattggattaatgtctgtgtgagtttatttgaactagcagaaagtatctgaagatattcaggaatagagtttatacttaaaatagctt

SEQ ID NO: 238836 - DNA, 517 bp, Homo Sapiens
  misc_feature (2)..(2): n is a, c, g, or t
  misc_feature (4)..(4): n is a, c, g, or t
  misc_feature (12)..(12): n is a, c, g, or t
  misc_feature (14)..(14): n is a, c, g, or t
  misc_feature (62)..(62): n is a, c, g, or t
  misc_feature (86)..(86): n is a, c, g, or t
  misc_feature (106)..(106): n is a, c, g, or t
  misc_feature (182)..(182): n is a, c, g, or t
anantccaaagngngcaatgcaattttggcagtagcaaaaaagtgggcttttccttttcttnattcctaatttcccatcccagagnagggtcagaaaccatttttntgccaagatggggggaagggtagccagcccagactgccaaaaaggggggaggaacccagtaccttcttgctgtttntcagtggcagactcccccacctgcaacaggtcaggtctgttactggagagaaaagacaggacatttttaaattctaggtatagagcaataaaagaagaattcaaacaaagggatcaggaagaggattgctactaagaggcagagaaaccaatgaagccttttgccatctcacactggaaagacaaaaagtcatagaggcttgatttttataaggaaagagaagtgagaaactgacctcgatactttgttggacttgcctaaagacatttgctgaattctcgggctgtgctgggatggagattagaggccaaataaaaacctctggtaagtagtgc

SEQ ID NO: 238837 - DNA, 444 bp, Homo Sapiens
  misc_feature (2)..(2): n is a, c, g, or t
  misc_feature (16)..(16): n is a, c, g, or t
  misc_feature (31)..(31): n is a, c, g, or t
  misc_feature (33)..(33): n is a, c, g, or t
  misc_feature (45)..(45): n is a, c, g, or t
tnccctgtgtgccagncctgtgtgcacggcntntgccccccggcntttgctgtggctggagctggacagtgcagcgactgcgaccgtgggggagccaggtcgcccttttggcagctgctaggctgaggctgcatggacaggaacaccaggcaccctccgtgtgcttctgagctgaggttgcttcacgggaccgtggcttccttcctcacctggctctgcctcccccgtgctctcgggcgaagtgggttcttgtgccttcccctcccgggcccaggctccccgtgcgcgggccctgccctttcctcccgcgccccaccggctccgacgcgcaaccccgctcagcagtcacagaagcagggcccagccaccttggtctttttttgggagttcaggggagtaggagaatgtcttccagaaaaatacataagctagtttctgttctgt

SEQ ID NO: 238838 - DNA, 558 bp, Homo Sapiens
  misc_feature (9)..(9): n is a, c, g, or t
  misc_feature (20)..(20): n is a, c, g, or t
  misc_feature (41)..(41): n is a, c, g, or t
  misc_feature (49)..(49): n is a, c, g, or t
  misc_feature (198)..(198): n is a, c, g, or t
taaggtccncactgtgggcnagtacttggccaacaaccttnacatgaangttctcatttaatccgcagaataccttatttcagaaatgaggaaactgagacttatgatcctaatttagtattaggaagtcagagaagacctgtgtgggaaaagtgacacacagagaaccagacaagtaggagataaccaggcaaagancagagagaggctgtgtaaagcagaaggaataacatgctcaaaggcctgaggatgaatgaatgaaagcatggaaggacaccagtggctgaaattgagtgagcaaggaaagagtgcaagagatagggcaggtaggggctaaatcgagggggttgttagagtccaggataaggagattagatttcattctgaggcatgagaaactgttggagggttttacctaagagtgggacacaacctgagttgctttcctagagatcactctgctttgtggagaatggattggcaggggcagaggcttactgtgatccaggtgagagaggatggaggttgggactacactggtggcaataaaaaaaatgc

SEQ ID NO: 238839 - DNA, 553 bp, Homo Sapiens
  misc_feature (21)..(21): n is a, c, g, or t
  misc_feature (59)..(59): n is a, c, g, or t
aggaaagtgctccccagaaancagaagaacccggatgcccagatacacgtttaagcttntgacaactacagtcactgtgtactaactagtggtaggttggcaatttgtaaaatttactcattaaagagggagacagagccaggctccgtgcctcatgtctataatcccagcactttgggaggccaaggtgggaggactgctcgaggtcaggagtttaagaccagcccggacaacatagcaagacccccgtctctacaaaaaatacaaaaattgccgggtgtggtggctcatgcctgtaatcccagcactttgggaggtcgaggcgggcggatcatgaggtcaggagttggagaccagcctggccaatatggtgaaaccctgtctctactaaaaatacaaaaaaaattagctgggtgtggtggtgcgcacctgtagtcccagctactcaggaggctgaggcagaagaatccttgaacccgtgaggcggaggttgcagtgagccaagatcgcaccactgcactccaacctgggcaacacagcgggaccccatctc

SEQ ID NO: 238840 - DNA, 465 bp, Homo Sapiens
  misc_feature (2)..(2): n is a, c, g, or t
  misc_feature (6)..(7): n is a, c, g, or t
  misc_feature (9)..(9): n is a, c, g, or t
  misc_feature (14)..(14): n is a, c, g, or t
  misc_feature (16)..(16): n is a, c, g, or t
anaatnnanttttngnagaaacagtgtgccatattctccaaactggtctcaaactcctgggctcaagcaatcctccggccttggcgtcccaaaatgctgggattacagatggatgtgagccaccattcctggccacagaatgctaatactagtatattttttaccaaaagagtatcaaggccagagtggtgggtggcacatgcttataacagcactttgggaggctgaggtgggaggatcgcttgagcccaggagttcaagaccagcctgggcaacatgttgagaccctgtgtctagcaaaaaaaaaaaaaaaatcattagccaggcatggtgggacacacctgtggtcctagctactcagtagtcttaggtgggaagatcacttgaacctgggaggtccatgctgcagggagctgaattcgtgccagtgcattccagcctgggtcacagagtgaaattcgatct

SEQ ID NO: 238841 - DNA, 541 bp, Homo Sapiens
  misc_feature (25)..(25): n is a, c, g, or t
ctgactgttagaaggaaaacttatnaccaaaagcagtagcatcacctcaccaaaaaggcggcccatgcaaaaacttcatcctaaggtcaccaccagcaaagaccaaaggtagataaatccatgaagatgaggaaaatccagcataaaaagggtgaaaattgcaaaaatcagaatacctcttatcttccaaaggattacaactccttgccaggaatgggaccaaaactggatggagaatgagtttgatgaattgacagaagtaggcttcagaaggtgggtaataacaaaatcctccaagctaaacaagcatgctctaacccaatgcaaggaagctaataaccttgataaaaggttagaggaattgctaactagaataactagtttagagaagaacataaacgacctgatgaagctgaaaacacagcccaagaatttcatgaagcatacacaagtatcaatagctgaattgatcaagtgaaagaaaggatatcagagattgaagatcaacttaatgaaataaagcatgaagacaagattagag

SEQ ID NO: 238842 - DNA, 515 bp, Homo Sapiens
  misc_feature (30)..(30): n is a, c, g, or t
  misc_feature (34)..(34): n is a, c, g, or t
  misc_feature (44)..(44): n is a, c, g, or t
cccatcccctctggagtttccattttaaanaggnattttgaaanccattaagctcttgggtctttcttaagatggttacacctcaatttaagatggggtattctttcactagttgaggagtagaagaggatgaccagctagactcccatggaattggaactcctattccttgcttagacattacaggttatgctttgagatctctttggggtgaaggattgaaattaaaccctgagccaccgtgtccttgtagagcacagagtagagaacaactggcagctttgaaaaaacaccatgaagaagaaatcgttcatcataagaaggagattgagcgtctgcagaaagaaattgagcgccataagcagaagatcaaaatgctaaaacatgatgattaagtgcacaccgtgtgccatagaatggcacatgtcattgcccacttctgtgtagacatggttctggtttaactaatatttgtctgtgtgctactaacagattataataaattgtcatcagtg

SEQ ID NO: 238843 - DNA, 431 bp, Homo Sapiens
  misc_feature (3)..(3): n is a, c, g, or t
  misc_feature (5)..(5): n is a, c, g, or t
  misc_feature (17)..(17): n is a, c, g, or t
  misc_feature (21)..(21): n is a, c, g, or t
  misc_feature (23)..(23): n is a, c, g, or t
  misc_feature (25)..(25): n is a, c, g, or t
cancntcaggtgatccncccncntnagcctccccaaagtgttgggattacaggcatgagccaccatacctggccccttttgttgttttgaggggcaggcagtaagaagcagggatttcttcaaatgctagtaagcacaaagagagggagaagtttttgtaagtaacgaacagggccgggcatggtggcgtgagaggccgaggtgggcagatcacgaggtcaggagttcgagaccagcctgaccagcgtggtgaaacccccgtctccactagaagtgcaaaggttagccgggcatggtggtgcacgcctgtggtccagctagtcgggaggctgaggcaggagaatcgcttgagcctgggaggtggaggttgcagggagctgagatcacgccactgcactccagcctgggcgacagagtaagactcccgtctc

SEQ ID NO: 238844 - DNA, 585 bp, Homo Sapiens
caggagggactggtggtctcggtgaacagaggagagagtttcagaaagaagagtccaccctggcagatcttgacaagatggtgtccggtgggcatagacaactcatcattggtgtcctttgggattatgactttagggaagccacgtagctgggatttagatagcatgtggttgaggagtaaatgagaggagaggaggtagtcatcttcttttaagatgtttggttgagagggaaaatgagaaatatatagcaaacaacaaaaggggatgtgagcttgagggggatgttttttaagattggttagattgtgtcaagctgcaaaatttgccttaacatggctgtggcattctcagggaaattgaaacatcagcaaagtgactgttaagccaaataaatatatttgcacacatttttcagcaatgacaattctcgtgactaggaaaagcaaacatgcaaataatcagagcactagttagcatctgattttaataagaaactatcaaaccaagttgaatagccttcagcatctggccagatcacatattccctttgggtgaatgattggagcatttcatttcttcttt

SEQ ID NO: 238845 - DNA, 708 bp, Homo Sapiens
  misc_feature (109)..(109): n is a, c, g, or t
ctggaaatgccttctgcagcctcaagaggtgcgagccttctgaatatgcagtcactggggctgtggactgggtactgcctgcagggtcactgggctcctttaattcacntaaactcaggccctccaagcggggccatggagaggagccccacgtggggtgaggctgctgaactctggggttcccacattctccttcccttcaggatccgccacaaacagacactttttgcttccttaaagtaggatcaaatctagatcctctagcctgggcagtagaggaagaaatgctagcctggaagctcggcatttggtttcactaagggccatgtggttccctgcagcctcatgcctggccccttgacacatccaaagcaaagggagtcctgccccctccccccacttcctttctaccctgcctgtgcacagtgggtgggttggtgtgtctggacactgaggacttcctccccctttgcctgtccttccctcggccctgtgtgcctcagggcagatatagcaagctctttcgaccatagttgatggtaggacattttagactttgtttctcagctctgtacaaacacaaatacacacccccacaaaactaaaatcaaagtttcactacataacactgggccttactgcatgtggttcattctagcatttctgttctgtgctgtgctaagctatactactgtaaattctttcagt

SEQ ID NO: 238846 - DNA, 505 bp, Homo Sapiens
  misc_feature (32)..(32): n is a, c, g, or t
gagcagggaaaatagagctatcaggaaatatntgtgaaggataggttgctagtcttcttcaccaccatttaaacggtatttactgccagaattatctaaaaatggcaatttcataatgctgctactaaacactaagtgttcgtcagattgcacaaagacattagattctgttcacttagtgcctctggaacatcttataataatctaaatgaaaaaaaaagcggtttctctgaaaacttgcctatgatcctccaactctaccttctgaactagtatgaagctcatatttggtataattatgtcttttctgggacctatttgagggtggaatgtgggaggagggtaaggattaaaaacctgactattgggcattatgctgattacctgggtgacaaaattatctgcacaccaaacccccatgacacacaatttgctcatgtaacatgagtaacctttaacctaaaatgaaagttggacagaaaaataaagtgtcttaatatcaaaa

SEQ ID NO: 238847 - DNA, 404 bp, Homo Sapiens
caatacacatctctgaaatgatcatcaatctgaattaagtgggtatgctaatttcacaaaaagcaaagcgtaaaatgttctcgtgtcatcccaatgacaggaagttctctcactgaaagaaagaagccaggtggggtatacttccattatcacctggctccagtcagcatttcctctatactcagggaaggccacagagggccgggcgaagtggctgacactgggtgagaatggcagttgtcagtcctgtccgtgtaacagaggagtgaagtggtgaggagggcaggtctaaggcactggcagctcttttccatggattttgaactctggaggaaggcagcaactaaataactgtctcattctgctattatgcattgtattagcaaagtgaaaatatagtctat

SEQ ID NO: 238848 - DNA, 465 bp, Homo Sapiens
aaatgcagtcttggtgaactggaaatatgctgtgtcattttagaaaaccaaaagcacaaataacttgttcttgaatttgaagatgacacaaatgatatttaagtctttcaaattcaaatttttggttttttacattgttataatgtacttaagaacgtatctgatggccggcacgctggctcacgcctgtaatcccagcacttttggaggccgaggcaggtgaatcacgtgagcttaggagttcaagaccagcatgggcaacacagtgagaaccctgtctctacaaaaatatatatatatatacaaaaattagccaggtgtagtgacaggtgcctgtaatcctagctactcaggaggctgagacatgagaatcacttgaacctgggaggcggaggttgcagtgagctgaaatcatgccattgcactccagcctgggctacagagtgagaccctgtctcaaaaaag

SEQ ID NO: 238849 - DNA, 685 bp, Homo Sapiens
ttgtacaggtctttggactccaattaaccctacccatccattagcaagtgtacagagatatcgtcctggcaattgtgcatctttctcctttgactttagcagtttgcatggcagattgtgcccagatgaggcctgtcaagggacccatgcaataaaaggttagattcttttaaagctttttgataattattattatttccagaaagatatttttgtttgccccatttaaaaaaggttaaattgagtcactgtcttcattttcatgagtaccttgtagaaaactattaataatgataaataactaaacttctctagattaccttaatttttttgttgttgttctcagtacatctaagagagtagcatataggccatgtgtatgtggtgataaatgaaaatgcaggggtcttacttggttatttaggacttaagattttatctagtcattttcaactgtgattgaacacttccctttaactcccttcagaaactccaagatcatattgtatcccaggtactagaatttctgttcagctgtttataggcctccaccacaagaaattggctccaaacctattcccattacatcatcacccactaatgtcattacaccagaatgaaatctgctttgaggcttgtattgttgttttccttccattctttcccctcatcatttcctttagaa

SEQ ID NO: 238850 - DNA, 690 bp, Homo Sapiens
gcacaagaaaatttgtcattggggaaaggccaacttggtggccaccttccccagttcaaaggtttcctcgcaaggccactatgacccgtgccagaatccacagaggaaagtcttgttccattgctttctggcgctcaccccccacccaatgcacagtcaagccttttgttcttctaagcactttcccaccaatgtgtggtaagcagttgtgtcagttggttcccattaagcccttgggttgggaagggccaagcatggggagtcaaggttgaaaccaaaagcctggttgtgattagatggattgcagcatgcttgatttttttcattgaactggtcattccgcaagaggggtgttagaactgacctggcttcttggcaagtgttcagctgagactacttattggccctgagcacagcccaaacacctgcttagtcctgaaaccctgacctgagttgtggagatggaggagacctggaggaaatactcattccattggagaggccttgtctcttctgccttggaagctgccccagttagatgaggagacagaattacgtactcaagagagtaatttgcaagaagcacagctgtgatttcattttccaggcatccttagcctatgtctctagacagtggtcccctcaagggcagtactgagttaatactcttttaccttgcctaacatggca

SEQ ID NO: 238851 - DNA, 565 bp, Homo Sapiens
gagctattgattttcacggctcctattcagaggctcattcggctggtgattttggtactgtttattaacatttgctaaattttctcgtggtatagttcacttataatgacatcactgctgtgctttaaatatgtgtgtctttaatattttgctggttgcatgtattttctatttaatgtcgcagttcatttagagtagagatgtacctcatttaacatacagatgtatttctaaaaacttgtgtctatatgtatttttttgttaaaaaattctacactttgttgttgacatgtcataattttagaaaagctttacttatacattgggttaaaattcattagctagtgtctcctactttcctaatactttagctttaaactagtaaactccaccttttgcctgtagtagtaaattgcttttaaatatttaaactaggtggtgaatggtgtttattaaacccttatggtcgatatttccttaaagtaaaacaaaaaacacctttggttatatggccagttctttcttaatttatatgtttcactaaataagatttttaaaagataat

SEQ ID NO: 238852 - DNA, 546 bp, Homo Sapiens
agaagaatttcaaggaaaagaattctcagcagagctcaagattgtagaaactcagcagaagctggtaaaaacatggggagcccggaggacaggctgctgtccagggcagaggccatgaagaagtgcttccgtggccgacagtctggaaatgaatccatcatacattagtgccatagagtttagtaaccgtccagcaagtgtcatcacttttacagaaaacaaggtccagtaatagcaagtcttagtacatcctcacttttattataaatgggtgttttttcataatttttactgacgctcagtaaccatgcaaaattgtgtatagcattaatgtatctacatacctacacctatctatatataagctcatggtagaaaaccatagctaagtagcatcgcagacttaagcgtacaaagtgatcttgttcacaagtaatctgttgacagtgccaataaatgataaaaaaaaaattaacatgtcacaatgtaacggatgaccatatgcacaattccatgaattaaatctgtttcctgtgttagtcagta

SEQ ID NO: 238853 - DNA, 535 bp, Homo Sapiens
aggagccacctctttcctctgcacacaggagctcatctgcactaaaggattagaagcaaatagaatctaccctacgatccaagctcaaaggatctggcctgcttgctggtgtcttcccctggcctccgctgggtggtgtttgcctgcccaggtcactgagaccagcagatccttctaggctttgctgaacctggctggtaataactatctgacccttcaattcttccatacactgaactcgttgctccagtgaatccctttcccagcccaccttgttttgtctctgcctttctgtctctcccactttctcaccctttcatgtaattcagcaactattttaaaacaaatagctttatatgaacaaaaggactagatcatgaactacactggttatttggaagtctaggttctttctggtcctgctacccctttaacttgagttatttacaagtctgtttaaaagtttctaaacaaacactggcttgttttttgtttggctatcgttttgtttaaaatttctaattgtattgcattg

SEQ ID NO: 238854 - DNA, 704 bp, Homo Sapiens
ataagttgagccgtgtgttttttgtttgtttcacatattgataatggtctatcacctttaacagtcaaatagatgttgtttttagccactaagttttggtagcaagctgttagcaagcaaaagttaactgatatactggcaaatagcagatcctcaagaagtcattctgtttttcatcctcaaaagaatggaagctcagctcatttggcatggaaattgggaaatatagattgtcagccattaatgggaataatggcttataaaagtgggtaagagttaaagttattattgtcctgaattcagattaatttgtgattcaagacattctgtcactccttttaaaacctaattatagatgtcttaagtgtttctggaaaaatctgttaaattccttcagtggacttgacttttcctcttaaaatactaaagatgttggtgctgacattgtgaaggcacatactctcacgtaactgcaaaataatttctgagaagctggtatctgtaaggtaacttttaaaggctctgatttatttctgtggttaagaaaagaggaattattaagaaattgttggaaatgtgccgtggctaggtttttcctcctcatatttgtaggctttcatgtgaagctcccttagctcagcattggtcaaaacatgtttgttccatagtatcttgtgctaattttctagaagaacagtacatta

SEQ ID NO: 238855 - DNA, 725 bp, Homo Sapiens
  misc_feature (100)..(100): n is a, c, g, or t
  misc_feature (204)..(204): n is a, c, g, or t
  misc_feature (248)..(248): n is a, c, g, or t
aaggtctgaaaactgcttcaaaagatggcaatgggcgctcttcacattattctaagctctaggaaaattacaggctggtcaacatacatgcagggcttcntatttgagatgggcaaaataggggtgtagtggcaaaagctgggttgaatgagggcttgaagtttggggcccaagagtggatatgcaaatagcagcatgaaagancagttgaacagttgttctacttgatatgcatttgtgatgtgcancattttctcctatcagggttacctggaccatgggttgtgtcacagttgcttttatacatgtactgtctttacacagaaaattatgcatgatgccattggattcagaagtacattaactggcaagaactacacaatggaatggtatgaacttttccaacttggcaactgtacatttccccatctccgacctgaaatggatgcccctttctggtgtaatcaaggcgctgcctgcttttttgagggaattgatgatgttcactggaaggaaaatgggacattagttcaagtagcaactatatcaggtaagttgtgaaaatatagcaatatttgatcattgcatcaaaaaccaaatgaaagaaattgttatacttccattgaaacatttcagtaatgttttacttagaggtcatttgtaaaatgtacttttggaaccattaaactttgggaatttttttcatctcttaaaaaaaaaaaaaa

SEQ ID NO: 238856 - DNA, 680 bp, Homo Sapiens
tttttttttttttttgggggggtagaatctcagctaataacttccaggcaaaacacattattattattattattattattattattttaataaaaatttgcaattccttttcctttgttccttcagagcagggactatgtcagttattttatttcccatatcctcagttactgtaccctgcatatgactggtacaaaaagtcaatgaatagtttttaaatgaacatgttattaactaattttaattaactgaaaaaataatcatgctatgttttggtgcttttctaagacacattaaagtaggtaatcatcaaaagataccacttagtaatattttcacttaaaaaaatagctcctaaattccaatattatttctctatacccctgaaataccacggatgcaatatctaagggtaaaaagaaaaaagtgagagtgggattcaaaaagaaccatgacttcattgcaggccagataaagacttggtccaaggcccaaagtctttttagttatacaattttggtgtttacaggtgttgctctttggaaaataattcaaaaagccggggaacttaccaatttttgtttaggtaccataagaaatttggcacctgtaaaattaacactttcccttattttggaacttaacccagttaaattcatatctaactttaacaccctaat

SEQ ID NO: 238857 - DNA, 553 bp, Homo Sapiens
  misc_feature (13)..(13): n is a, c, g, or t
ccttgacagtttnttagttgtcagagtcagagctttgcagctttgagggggaacagttctctttaaaatcatttgctattttctattctcccttgttattttaatctaagcattttcccccgtttctcatattttaaccatatgttcggtagataactaaacagtatgatctggttggcattttcttcctgatgatgggagcgtcattcttttgtcttcatggttacttgtgtgatataacatacatctgttaaagaaaatcacttctttctaggggagggaggtagaaaagtatctttcaaacttggtttttgagtttgtgtcttgtcttaactttgtgttggctctaacttaaacatgctgatatgtgttttcaagaattttgtttaaggaagtattgtatggaagtccacaaaatgaaggaagttcatctaggttttaatatgtaagcaagataacacacaagtgtaccaagtgattattaactttgttgttttacaaatttgtatgaacttggagtatctgttggccattactatacatgtgcaaataa

SEQ ID NO: 238858 - DNA, 717 bp, Homo Sapiens
  misc_feature (68)..(68): n is a, c, g, or t
  misc_feature (198)..(198): n is a, c, g, or t
ataaggcgaatggccaagtaggccgaaattcggccgcaagcaaaagcattttttttttttaattttantttgcagaaatcgtattctttttgcactatttcaatgtaaaggcagacagggtggattatttatcctataaaagggaaaagagaggaagaaatcgggttgatatattccctacctgaggctcaatgaccncagttcctatttatatttctcacctgatgatacatgcttttacaataaaggtctcaagatttataagtcagacagggaaaaatatacaaaggaatacaagttgcatttttatatgccccggtttatatctctaaatgacaaaaagtattgggaagaggggcagagcctattagtaggtttacaagcctatgattagaagtctgaagcagtctgcagtgaaattcaaaatctggctcaagagagtaaatctgaataaggcagcaatttcatctggggagagaatacatcactagtacattttcttttctggattcttatcactaaatcagctgaagaatctgttcttaaaagcaatcataatgaaattttctattattcaatgaatccagccttcggggatatcggtaattaagtcagaataagatgattttaaatctccaataaatattctaatattttaggtgtttaatatttatttatttagttcataaacaggcactgccacctccagtgttccct

SEQ ID NO: 238859 - DNA, 713 bp, Homo Sapiens
  misc_feature (8)..(9): n is a, c, g, or t
tttttttnnttaggcaaatatgttaatttttaaaataactgatggcaaaataaaatatttacatcacatcatactgtgtaaacatgtaaggtctctgtacaaagaaatatacatgcaaaataatgtaaaaatttaactgaaataataaaagaaccaatacccaaataaaaattatgaggttacgaatacacatccagtttcgaatccaatttcttttaaaaagtttctgtacaattttacaagaagaaacaaacaaaaacccaacaaaagaataaataaaatacactggaagctgcaaagcttaactacgccagtttatggctcaagacccaggtgtctggctggcttgggaagcgggctggtctcttttgtagtgcagttcacacgagaaagataaaaagacatccagaaaacttcgagggtgcccagaaacccagcctccttgagttgaaaggactccccacaccagtgcgaatgctgccacagtgactcgggcattgggtaccagccgcggggcggccagtgcttaatcggcttttatttcttaccaaaagctcaaaacccagccaatttttatacagaaagttcaacgtcaaaaagtctaaaaggtagtaaatgtccagactgattttgggaaaaaaaataatactttggcattctgaataatagcataataaattttaaaacattcccctattatccagttttatatt

SEQ ID NO: 238860 - DNA, 504 bp, Homo Sapiens
acctgattccccgacactggataccgaagatgaacccaaccattcacaaatttctatatacagcagaatactgtgatagctcctacttcagcagtgatgaatcagattaaaatcgtctgcaaaatctatgaagaatactggtttcacagcctattttttattttctatggattttcataaatacagtttgaatatatgtatgcatatattgttcagcaccacgatgctctgatttaattctagaaacaatttgattacctcttgtttgtgacaagactaagcattaagatgagaaagaatacatttaaatagtaacattgtacatagggtgttttcctattaaaaattcagtttcccctgagacttaatgtaaccacttaatgtaatcactatctcattgtttcatctttataaacttgtaaacttcatctatttcaaatattttatgcagtacattatattattctgtacaaaggctttcaaacaaaatttttaaaataataa

SEQ ID NO: 238861 - DNA, 477 bp, Homo Sapiens
ccgtattttctaaattatgaactgcatatatttgctttcaaagaagtaatcattatgtgtttgagtagtatagatagctcttcccaggtatcaatagccaaatttgacatgatactgtaatttactagcctttttagaggaaatataatgtgtagacagagcttttaaattatttcccctgtatttaatttggctttttattcctgttgttttaaagtatatgatgctataattccagattatttgagagtgtataacttaatgggataacttgctcagaaatgtttttggtcacatagttttgtttatctggaaacttgtgagatttaaaaattttcggctggatatggtggttcctacctataatactggtgatttgggaggctgaggtgggggaattgcttgagcccaggagcttgaggctggagtaagctatgactgtgctactgcactccagcctaggccacagagcgagac

SEQ ID NO: 238862 - DNA, 579 bp, Homo Sapiens
tttttttttttttttcggcattataaaataatatttattgtgtcctgctgaaatggagcttgtagtctcatttcttaggcacttacaaggtaaaatttatgaaccatactttattaatgggcatttacaaatgcctgaaataaaaggtgacttgtagaagggataatatatcttattgcaaacatgacacctagcttctggaatacggttagtggcatttgccactagtgagcataatttccatgttcaaatgaataatgaactaatcaaaaaacctttttttgaggaactgaggcactcagacacaaaacacaaaattaggcactcagacaaaaagcaacttattagccagttggagagagagctaagaaataccatatctatataattatcagagaatgtgataaaaagctactactctgtacttgtgtgccaaatgctgtaaaagtataaatagagggcaatatatttcgctttggacgggaggttttagaaggccgcacaagagggatattcagtctgatgcttgatgtaaacaagagggagaagaagggcattccagacaacatgggcaaaagg

SEQ ID NO: 238863 - DNA, 515 bp, Homo Sapiens
tgctgtgccttgatggtaccaggaaacctgtggaggagtatgcgaactgccacctggccagagccccgaatcacgctgtggtcacacggaaagataaggaagcttgcgtccacaagatattacgtcaacagcagcacctatttggaagcaacgtaactgactgctcgggcaacttttgtttgttccggtcggaaaccaaggaccttctgttcagagatgacacagtatgtttggccaaacttcatgacagaaacacatatgaaaaatacttaggagaagaatatgtcaaggctgttggtaacctgagaaaatgctccacctcatcactcctggaagcctgcactttccgtagaccttaaaatctcagaggtagggctgccaccaaggtgaagatgggaacgcagatgatccatgagtttgccctggtttcactggcccaagtggtttgtgctaaccacgtctgtcttcacagctctaaaatgccatgtgtgctgaccaaaaaataaaaattatta

SEQ ID NO: 238864 - DNA, 460 bp, Homo Sapiens
cagctgatgattgactcccagaattcgaaagaaactgagtcccacaaagctctgtctgatctggagctcgcagcccagtcaataatcttcatttttgctggctatgaaaccaccagcagtgttctttccttcactttatatgaactggccactcaccctgatgtccagcagaaactgcaaaaggagattgatgcagttttgcccaataaggtgaggggatgacccctggagatgaagggaagaggtgaagccttagcaaaaatgcctcctcaccactccccaggagaatttttataaaaagcataatcactgattccttcactgacataatgtaggaagcctctgaggagaaaaacaaagggagaaacatagagaacggttgctactggcagaagcataagatctttgtacaatattgctggccctggttcacctgtttactgttatcacaataatgcta

SEQ ID NO: 238865 - DNA, 593 bp, Homo Sapiens
gcctcagttggaactggagtctgggcacgaaatcctcaatatcgagcagaaggagaaacgtgtgtggagtttaaagccatgttgattgcagtgggcatccacttgctcttgttgatgtttgaagttctggtctgtgacagaatcgagagaggaagccatttctggctcctggtcttcatgccgctgttctttgtttccccggtgtctgttgcagcttgcgtttggggctttcgacatgacaggtcactagagttagaaatcctgtgttctgtcaacattctccagtttatattcattgccttaagactggacaagatcatccactggccctggcttgtatgtaacttttaaaatccttaaataaagttcttttttattataaaagtaattcatattcactgtacaaagcttggaaaagacggacaagcagaagtaatagcctaatagtcacccataatcccaccatggggagataacatggttagtgtttttatgtctgtgttttatacaaacagtttggatataactgtgtgcaccattttgtatcctgatttttttgttttaatgttgtatcataaacattttatcatgtt

SEQ ID NO: 238866 - DNA, 593 bp, Homo Sapiens
aattctctccacatataaaacccatagcctttggagatatggaaaatggtatctttcagatttctagaagttcaagtgtcatacaacaaaacaggaaccccctttactcttatggacctcatttcaatatactgtttacagtttgatggaattgtataatttaatatttctcttgtactgtagtttatatttatttacagatttttttgtactgtgtgatttgaactttttgttccttgctatgatcaatgtttatgtagtagagcacttatgatcacaaattaagttttttggtttgattgcactacattaaattttttaatgcagttctgatttttgactggactaaaactgtgtcttaatgtatgtgatgagtacttaaaattttaatccatgtggtccccccccttttttttttttttgcattgtatgtcaaaagcgcttgttctttcgtgcatgtgtaagatttaatggttccattgtattatttgaccatgacattttggagaaacattcccagctgtaatgttgtgtatggtagttctcactggatgctagagttttcaaaaccactattcttctaataaattttg

SEQ ID NO: 238867 - DNA, 586 bp, Homo Sapiens
agttaaatcagtaatctgtcgcatttcatcaagattaattaaaatttgggacctgcttcattcaagcttcatatatgctttgcagagaactcataaaggagcatataaggctaaatgtaaaacacaagactgtcattagaattgaattattgggcttaatataaatcgtaacctatgaagtttattttctattttagttaactatgattccaattactactttgttattgtacctaagtaaattttctttaagtcagaagcccattaaaatagttacaagcattgaacttctttagtattatattaatataaaaacatttttgtatgttttattgtaatcataaatactgctgtataaggtaataaaactctgcacctaatccccataacttccagtatcattttccaattaattatcaagtctgttttgggaaacactttgaggacatttatgatgcagcagatgttgactaaaggcttggttggtagatattcaggaaatgttcactgaataaataagtaaatacattattgaaaagcaaatctgtataaatgtgaaatttttatttgtattagtaataaaaca

SEQ ID NO: 238868 - DNA, 476 bp, Homo Sapiens
ctctgatatttacactaagatgttcagtggggggaaaaatcagtcttaacgctcagagataaataaccacattcatgacaatgagattatgtaattgttttttattcacaaatattttctggcacacacattaattcacagaaagaaagaacagtagtcacgtgggcacaatatttaaccctttcagatactgaggtttatcaccgcttgatttcttagttggaaatgttgcagtttggtttcaggcaggatttccaggctatcacagcctgctccgatggcatgattattaggagctcatctgcatcactggtgaatttctttggtcacttctggacagtttttaaacataagtccatgcccttctttgttctgctgatgaggcacgtcataaaataaatgtccagcaatgtcttcccgtcttgttctcaggcctcaggctctcggactccttcccccaaccctgcccccatgtt

SEQ ID NO: 238869 - DNA, 611 bp, Homo Sapiens
  misc_feature (58)..(58): n is a, c, g, or t
  misc_feature (83)..(83): n is a, c, g, or t
atgattgtagataaaatagacgtgattaaagatgggtttgtgacgagggggagctgantctggattaagcacgccaagaaganatcatatatgacaatgttgaaaacaatggcaggagtttgatatgaatcaagacggcttaatctcctgggatgagtacagaaacgtgacttatggcacttacctgggtaaggggcaagatgtcagcctggcagggaccgtggtcttgagtcaaagaaacaaatgggtcacacagtaaaggaaaggaagcttatcttaaatagttcaattcagtgctaagctgattccctttattaattttaaatttgtatattatgtatttttaaatttgtttaatttttgttttctgaagtctggaagtctggtatcttctacatttttagcattttacatatattttaccattttttctttatgtcatccctcatagagacaatttttggagtagatttcatttaaaagaatacattgggctgggtgccgatagctcacgcctataagcactttgggatgctgaggcaggaggattgcctgggcccaggagtttgagaccaatctgggcaacatagggacaccctgtctctaccaaa

SEQ ID NO: 238870 - DNA, 696 bp, Homo Sapiens
  misc_feature (91)..(91): n is a, c, g, or t
  misc_feature (96)..(97): n is a, c, g, or t
  misc_feature (125)..(125): n is a, c, g, or t
  misc_feature (138)..(138): n is a, c, g, or t
catctgcttgtgccggcacgtgcattccgaagcttcaagcaaggtccccaagtactgagcaagctgctatccccatctccctgctgggccnccacnntcagggctcccaggggtctccctggctncctcctccaggcntgcctcccacttcactgcgaagaccctcttgcccaccctgactgaaagtagggggctttctggggcctagcgatctctcctggcctatccgctgccagccttgagccctggctgttctgtggttcctctgctcaccgcccatcagggttctcttagcaactcagagaaaaatgctccccacagcgtccctggcgcaggtgggctggacttctacctgccctcaagggtgtgtatattgtataggggcaactgtatgaaaaattggggaggagggggccgggcgcggtggctcacgcctgtaatcccagcactttgggaggccgaggcgggtggatcacgaggtcaggagatcgagaccatcctggctaacatggtgaaaccccgtctctactaaaaatacaaaaaaaatttagccgggcgcggtggcgggcacctgtagtcccagctacttgggaggctgaggcaggagaatggtgtgaacccgggagcggaggttgcagtgagctgagatcgtgctactgcactccagcctgggggacagaaagagactccgtctca

SEQ ID NO: 238871 - DNA, 656 bp, Homo Sapiens
  misc_feature (36)..(36): n is a, c, g, or t
  misc_feature (42)..(42): n is a, c, g, or t
  misc_feature (137)..(137): n is a, c, g, or t
  misc_feature (139)..(139): n is a, c, g, or t
  misc_feature (150)..(150): n is a, c, g, or t
ggtgacagggtctcgctatggtgcaagctggcttcnaactcntgacctcaagcgatcctctttcctcgggcctctcaaagtactgagattacaagcgtgagcaactgcacccagccaactatatttctgatttactntntgttgggaaanaatcactagtaagtggacctgtgcagttcaaacccgtgttgttcaagggtcaaatgtatagtactttcctgagttctgtgagttgttctaattatagagcctgaaggaggcttaagggatccctccaatttatagccagttggtcagaaatgaagatggcctgggacccccaaccccaacttgcaacaggcatctgaagtgagggcagtctgggaactgtgcctctaacttgtggggtctatgctaacttttgagtggttagcatcagaattgaaatattgcagtatattctaagtctctaagttgaagatttactgctattaacacattttgatagatctaaattgttgatgccagaaagattttcaatctcaagaataatcgagagccaacaatttagcttatagtctgaattcaacagcttgtatctcagccacaagtgataattttaggaaaagaagtgccaaatgttacactgagaagacaaaagtcaacttggaaatgat

SEQ ID NO: 238872 - DNA, 655 bp, Homo Sapiens
aacggacccctataggcggagggtaccggggccgcgctcgaagaggtattagagggattttttagtttttcagactttttagaatgatttaactatacagtgtctagaaaaaattcactgcaaatataatgattacaggcaggttgaaaataaaaaaataaaaatgatacatcctgaaaatattaatctacagggaacagtcattatattatcagataaagtatatttcagcacaaagaaaatgaccagagactgagaggaatattacgtaatgataaaagggtcaattcactgagacatagtgagcctaaatgttcatgcacctttaaacatcagagctgcaaaataatgtgaagctaaaactaatagaactgaaaggaaaaataaataaatccacaaatacagttggagacttcaacacctctcaataatccaattaaagtagtcctaggagggaactaaatgtaactaaaatgctcacattagaaaagaggaaaggtctcaaatcaataacgtatgcttccacctctagaacctagaaaaagaagcacaaaatataccaaaagcaagaaaaagaaggaaataataaagataaaagtagaaatcaatgaaactgaaaccaaatcaatgagctggttcttggaacaaattgata

SEQ ID NO: 238873 - DNA, 645 bp, Homo Sapiens
  misc_feature (512)..(512): n is a, c, g, or t
  misc_feature (594)..(594): n is a, c, g, or t
tttttttttttttttaatgacatggctcttctggtagtggtggcaaaaatatacagatggggtgaccactgatcatttcaaattttacttttgtaagtgagaaactgcctatgtcaaagtggtatgttatttgcaatattaaaaaaacagagatgtaagatcataaagaattgtttctgtatcttatgcactccaaataaaataaaacttttgtgttagcacaataaaatatttaagaattgaccaatttagatgtcttttacaggtatcataggggatatataccatgtgactctgaggtagtaagttcaaaaacaaaacaaaccatgattattctaaaggttaaagtctgtaatttctaaatattatgagttatatgttacaagaaatactttgtttagggaaatcttactattgggatttacttctaacagtgacatgtgaagaaaaatatgtaattctccttaaaaataaactacatatggttatgtaatagccagtctatctagcanaaggcagacattacccgtagaagtttgggggtccccctttgtctcatgaaactcaattttggccacagttgacgattaatangaaccgggcgcaggctaagcccggtatagcacatttgcctctatgtgcccc

SEQ ID NO: 238874 - DNA, 525 bp, Homo Sapiens
agggacctggtgggaggtgattggatcatgggggctgtttccccatgctgttcttgtgatagtgagggagttctcacaagatctgatggttttaaaagtggcagttttccctgcactctctcctgccaccttgtgaagaaggtgcctgcttcccctttgcctttcgtcacaattgtaagttccccgaggttcgtcatgattgtaagtttcctgaggtctccccaaccatgcagaactgtgagtcacttgaaccccttttgtttataaattgcccagtctcaggtagtaccttgatagcagtgtgaaaatggactaatacagtcagggacctaaaagacaggtaaagagatgtggccaggtgaagacggaaaaaggacagtgcattccagacctgtggaaagacgcgaggttggaaagaacatcacaactggggcgactgaagaaattatgttgttaagcacgaaatgcagagagagagctatgtgaatgtgttgagtgtgattttcattaaacaatttttaaaga

SEQ ID NO: 238875 - DNA, 687 bp, Homo Sapiens
  misc_feature (192)..(192): n is a, c, g, or t
gaataacccagtcagatgtgaaataaaaatggttgaacagaaattcaaccgaactcccaattaaaaggccagaccctacccaagagagggatttgactggcaaaaagtatttaaataccccgaatgacatttaatttcactgtattcagctttaagttgttcacaatgaaaccacactgtcaaacaagcagnttcaagctgctgaatagacattatttcttgcattaaaataccactaatgcattctcttgcaacactgccagacatgggattgtcaccatagaattagttggtactatgccatctttcactctttcacaagtcagtgatggaacctgctttatgaccaagattcatcctcaaataagccacatgtacccttctgacaaagctgtgtaaagtattagaatctgatgctctagaaagatcctagttgcctttgtgtatatttactgcctgcttgagtgtttctatgtgtgggttttccctgtatcttgtagaaatgttggggtgttttcctctgccatatggctcgtggcctgcgagccaactatttcagctgtattttaccttcatttttgatgaggtgatttaaattttgtttcactttgtgtagtgaattccacagtagttttctgattgttgttaaaaatgacttaacatattacacagatattcaataaaaat

SEQ ID NO: 238876 - DNA, 799 bp, Homo Sapiens
  misc_feature (765)..(765): n is a, c, g, or t
  misc_feature (772)..(772): n is a, c, g, or t
  misc_feature (780)..(780): n is a, c, g, or t
  misc_feature (788)..(788): n is a, c, g, or t
  misc_feature (792)..(792): n is a, c, g, or t
gacaacaccaaccctatctcggtcaacgaataagggattttgcgattcgggcatattggttaaaaaatgagttgatttaacaaaatttaacgcgaattttaacaaaatataacgcttacaaatttccattcgccattcaggctgcgcaactgttgggaagggcgatcggtcggggcctcttcgctattacgccagctggcgaaagggggatgtgctgcaaggcgattaagttgggtaacgccagggttttcccagtcacgacgttgtaaaacgacggccagtgaattgtaatacgactcactatagggcgaattggccaagtgagctcgaattgcggccgcatgcataagcttgctcgagtctagagtcgactgggccgaggcggccgacatgttttttttttttttttttttttttttttttttttttgagatgtagtctcactctgtcacccaggctggagtacagtggcatgatctcggctcactgcaatctccgcctcccgggttcaagtgattcttctgcctcagcctccctagtagctgggactacaggcacccaccaccgcgcccagctaatttttgtatttttagtagagatggggtttcaccatattggccaggttggtctcgaactcctgaccttgtgatccacctgcctcggcctcccaaagtgctgggattacaggcatgagccaccgcgctcggcccccggccataatggccgaattcccgggtaccaacacaatggcgcgcttcccgaganaaagggnttgcaatncttccaantggnggtccaa

SEQ ID NO: 238877 - DNA, 445 bp, Homo Sapiens; identical to SEQ ID NO: 84828

SEQ ID NO: 238878 - DNA, 559 bp, Homo Sapiens
atgctgcgtgctgctgaactctgttgggtgaactggtattgctgctggagggctgtgggctcctctgtctctggagagtctggtcatgtggaggtggggtttattgggatgctggagaagagctgccaggaagtgttttttctgggtcagtaaataacaactgtcataggcagggaaattctcagtagtgacagtcaactctaggttaccttttttaatgaagagtagtcagtcttctagattgttcttataccacctctcaaccattactcacacttccagcgcccaggtccaagtttgagcctgacctccccttggggacctagcctggagtcaggacaaatggatcgggctgcagagggttagaagcgagggcaccagcagttgtgggtggggagcaagggaagagagaaactcttcagcgaatccttctagtactagttgagagtttgactgtgaattaattttatgccataaaagaccaacccagttctgtttgactatgtagcatcttgaaaagaaaaattataataaagccccaaaattaagaaaaaaaaaa

SEQ ID NO: 238879 - DNA, 506 bp, Homo Sapiens
actttatttgagattgagttaaatcatagcaatcaaatgacttttgaaacgcattcatcacaagagacagcttagaagaatgttctcttggggcttaaagatgcaatatcgacttttatttggtttctcaaattcaatgtgatacaaatatttactggtgaaaggtaccacaaaagtgctttatgcttcctatggggaagggactctgtaacataaacttgagttttgtaatttatacaaggacttaaatatataaacaataattttcttcatctttagaatttttaaagtaaatgaatacctatgattgtatgtttattttttaaaaaaagttttaaaaattgaggagttttgttccacaagcaaccggtactggctaccctggtcttatgacaattatgagctcctcacaactgtctgctataaatgcgaatgaactttattttctcaaggaaatatgatttaattaaatattcatgtccattttaaaaaaaaaaaaaaaaaaa

SEQ ID NO: 238880 - DNA, 623 bp, Homo Sapiens
tacttgactattgagcttacttacttggacgcaacattgcaagcgctgtgaatggaaacagaatacacttaacatagaaatgaatgattgctttcgcttctacagtgcaaggatttttttgtacaaaacttttttaaatataaatgttaagaaaaattttttttaaaaaacacttcattatgtttaggggggaactgcattttagggttccattgtcttggtggtgttacaagacttgttatccatttaaaaatggtagtggaaattctatgccttggatacacaccgctcttcaggttgtaaaaaaaaaaaacatacattggggaaaggtttaagattatatagtacttaaatataggaaaatgcacactcatgttgattcctatgctaaaatacatttatggtcttttttctgtatttctagaatggtatttgaattaaatgttcatctagtgttaggcactatagtatttatattgaagcttgtatttttaactgttgcttgttctcttaaaaggtatcaatgtaccttttttggtagtggaaaaaaaaaagacaggctgccacagtatatttttttaatttggcaggataatatagtgcaaattatttgaatgcttcaa

SEQ ID NO: 238881 - DNA, 469 bp, Homo Sapiens
cgatggcgaacagactcgactctgcgtacaggaggtagaaacacttcctcctgggctgacggagccgcctgccaccggcccacccggacagaaactcctcatcatccgcagcgccccagccactgagctgctggacagcagcaacactggaggaggcaccgccacgctgcagctcctggccccaccgccgtcaggcccagcctcgggccccgcggggctccccggggctccagcctcccagatggtgcaagtggtccccgcaggagctgggcctggtgttatgacccctcagggcctgccctccatccagattgtccagactctacccgcagtccagctggtgcacacgttttgaggagaggcagtgattcccctcccgccccgcacagagaccccgactcactgccagccggggcggggcagggtgccgcaggctgggcttgctaataaagacccgagtctccccgcc

SEQ ID NO: 238882 - DNA, 404 bp, Homo Sapiens
aaagtggaaaaaacctgagaacttcctgatctctctcgctgtgagacatgtctgagactcctgctcagtgtagcattaaggtaaaaatcttctcccctccttctacgtggtggaaaccctgagctgcaccggccagggcagtcgtgctgggctcctcagagcaggctgttgcagttgctctgttcgcaggaaattatttggggcgcgagggaaggagatgcagctcgcggtggctgctgtaccctttagcgtaaccttgctactccccccccaccgccgagcccctgccggctcctcggcccccacccccttgctttttgacaatgaaatgccggtcacaattggtcagagcaacccggattgtctccagaaccgtaaaacacccccgtaattagtgcgcttaa

SEQ ID NO: 238883 - DNA, 426 bp, Homo Sapiens
  misc_feature (54)..(54): n is a, c, g, or t
agagctttttaaaataccaagctaatcaaggagtttgcgatttctcttactttnctacagctcagcagtgactaatgatgtgtgactatgcgaatgagtttgatgaattcgtaaaaactaagcgcttaaatggttatagaaatgaaaacatggatatttagaagcctttctatatacacagtgcagttgagatggtttacagcaaatttcgttttatttctgaaaatgttgtaaacatgtaattagtgaaagattttgtaaaacattgtcctgtatttttgtctgtaaatatattgcataagttctaagtataaatatgtcagtatcatgtatgttattttaaattgcctgtacgccactttacacattgacattcaaataaaagccaacacttcagtggcgtgtaataaaaaaaaaaaaaaaaaa

SEQ ID NO: 238884 - DNA, 416 bp, Homo Sapiens
  misc_feature (22)..(22): n is a, c, g, or t
aatattgaatgtgtagaacctnttatggggaaatgattctttgctcttttgtctgtactggatttttcaaaatctttattggtaaaaagaaagaatgtatttctaagaattgttgcaaccatacagggcagccatggagctgactctacattttgttttaaaaatgttgttttatacctgcactatttatttaggagggtcctcttggtagctctttaacccatttattaagattagaagaggttccaccagcaaacaaaagacaactaatctgagtctgtttgaaagcagactgaagcacccactttcacaagacaggccagggctggattccatcctagatggccaagagaaccctctctaaacaataggggtttaaaatgttttagaagcaccaaggcggtctccactcagga

SEQ ID NO: 238885 - DNA, 503 bp, Homo Sapiens
gtgttcagattcatccttacatgtgttctaggtactgtattgctcatgattaaaattaatttaaattaattggctaattgttcagaattaatccctttctatgagaacaactaaaaagggaacaactacaaaagagtacaactattgagcctactatggttggaaaatacttgaaagtatcatttaaagatggttactttaattagatctccgtactaaacgtgggaggatagctttatattttactttttgaagagcattaagttctggtctgtccatttcctgaaattctgagctatgttattcatctctgttgttggctctataatgtatgtatctgtttgctgctattcataataacaaaggtcttagcgaagacctagcaatcttagggtaataggaagacagaggaatttcatattggaatttttaacttgcagatcacaacttgttagtgttttatgaaatcagtgtagtgggtcaaaaccactatagtttttcta

SEQ ID NO: 238886 - DNA, 527 bp, Homo Sapiens
gaagaactgctgaaattgagggcttggagaagatacagtaattatgtaaggtcaaatagttgtttagttccaaagcccatgctcattctgttgcaccaggaagtgacttggttaggaatgtgcaccaagatggatctgaaggcagatctgtatcagacagaaggactggggaagggaaagcagtaggtaaggtgctgtaatagtttaggtagaattctaggcaggaactaatacaaactgcattcagggtagaggaagtgggatgtgtaaggtattatggtagcatcagaggacttagcaatcgtctagatatggggactggatgctggggaagaatcagttgccaagtgttggtgactgggatgatgttgctccactaacaggtaaccaagaggaggggctttgggatggagaatgggcagagctgatttttggcttgaatacattacagttgagagatctatgagatattttgttggagatacccagcagctagctggaaaagtgaaacaggaacttgttaaaaa

SEQ ID NO: 238887 - DNA, 485 bp, Homo Sapiens
caatgcaacatccagcagacccagagaaactctctctcagcacgacaagaaagggaggattcctattcaccaggctcattaaacctgtacgcacacacacatgcaaacacacacgtgcagacacacacacgtgcagacacacacatattgctaatttatttatattaagaaatacagtgccaggcatggtggttcacacctgtagtcccggcacgttgggagggtgaggcggacgatcgcttgggcctaggcattcggggccagcctgggcaatgcagcgaggccttgtctagaaaattttaaaaaaaaaaaaaattggctgggcgtggtggcacgtgcctgtggttccagctactcgggaggctgaggcggcaggatctcttgggctaagtagttcgaggctgaagtgagctatgactgtaccactgcactccagcctgggcaacagggcaagaccctgtctccaaaaaaaaaaaaaagaaaaa

SEQ ID NO: 238888 - DNA, 509 bp, Homo Sapiens
tgtctattcccagacagagagaaagagcagaagagcagattacctgcaaaggacagacttaggtctgagttcactgacaccatcctgtccgtgcacccctctgatgtgctggacatgcccgtggacccaaacgaacccacgtactgcctgtgccaccaggtctcctatggggagatgattggctgtgacaatccagactgtccaattgagtggtttcactttgcctgcgtggaccttaccacgaaacccaaaggaaaatgatttcatttaaataaaaacctgtagtctgggcaacatcgggagaccccaactctacaaaaaatacaaaaattagctgggcgtggtggtgcgtgcctgtggtcccaactacctgggaggcggaggcgggaggatggcttgagcctggaagtccgaggcttcagtgagctgagatcgcgccactgcactccagcctgggcgagagagcaagaccctgtctcaaataaataaataaaaagataaaaacctga

SEQ ID NO: 238889 - DNA, 521 bp, Homo Sapiens
agtctggaagtttctacccatgccaagaaaagcattttatgttttgttcacatatgttgtgcaattcaaatttttttccctatattctctgactagacacttgtactgagtcaattggcgagtgtgtctgtctaaaagcacaatatcaaaatatcacttaaagcatctttacatagtgtgtttaagaaaaagttgttattcagcagaaaggtaattccaattggtctgcatatttatcagcacttggtattgtctgtttcttattttagccattctgataggtgtgtactgatatctaatcatggctttaatttgaatttccctaatggctgatggtgaacatcttttcatgtgcatttctgtcatctgtatgtctttggtgaagagtcttcaaatcttttgttcatcttaaaattggattgttatattaccattgggtttaagaatctacatattatggatacaaatatgttgtcagatatgtgttttgcagcattttctcccagtctgtagcttgtctt

SEQ ID NO: 238890 - DNA, 543 bp, Homo Sapiens
  misc_feature (60)..(60): n is a, c, g, or t
caggacaacacatataaccaccaaggatgtgttggcctttggagttcccctttaggttcntagtgatgtggaggtttatgggtgaaaaattagtggagagggaactcctctcccccattttgtgtagagtgaaaatagcctgaagcccctactcagcagggctctgggaatgtgccttccttattttagtttcagaattgctgggaaagttaccccactggtgggtgaggatctatcctcaacctacatccagatcctatgtgctgcttgcacagaggcctttggcttttgacccaggagggccgcgaggctggagctgccctgtctttcattgagccttagcatttccctctcaggcttcctctcaagctcaaggaactcacccccagataagaagctggtgcctcttgtctctctcatttcagaaacggactttctcatcatgctttcctatggtgggtatgaggggccagctgataccaaccaactggcctgtatctatctatctggatttgacttgaatttttaaaatgtgtatcgttt

SEQ ID NO: 238891 - DNA, 731 bp, Homo Sapiens
ccaaaggctgtgttatatggcctcttcgtatacatcgcgctcacatcctcagatggcaactagctcgtccagcgagtggccctgctgatcagagagcagactgtgtaccccctgacacactacatccggagggtgccccagaggaagatccactacttcacgggcatgcaggtgcttcagctgctgctgctgtgtgcattcggcatgagctccatgccttacatgaagatgatctttcccctcatcatgatcgccatgatccccatccgctatatcctgctgccccgaatcattgaagccaagtacttggatgtcatggacgctgagcacaggccttgactggcagaccctgcccacgccccattcgccagccctccacgtcctcccaggctggctctggagctgtgaggggaggtgtaggtgtgtgggtgactgctctgtgctgcgccttctcatggctgactcaggcctggggcatctgggcattgtaggggtgcagtggtatgtgcccacccctctcccattatcctttagctttaggccaagagcgttgctcagggcagcttctgcccagggtgggtgggactgagcaggatggattttcttttgataaaagagtcgatgcctgaaagagaaaccatttccttgattgtgtaaggaacttgctggacgcacattagagaataaagctcctgtttaaaggctcctaaaaaaaaaaaaaaaaaagctgt

SEQ ID NO: 238892 - DNA, 685 bp, Homo Sapiens
  misc_feature (29)..(29): n is a, c, g, or t
  misc_feature (33)..(33): n is a, c, g, or t
cagcctaacccttggcggttacgtttacntganatggacccttaggtgcctagagtcaaagaagttaattctgctcaggaaactctggaaagctctctggctggaagtcctgatactgaatctccagtgttagtgaatgactatgaagcagaatctggtaatataagtcaaaagtctgatgaagaagattttgtaaaagttgaagatttaccactgaaactgacaatatattcagaggcagatctaagaaagaaaatggtagaagaagaacagaaaaaccatttatctggtgaaatatgtgaaatgcagaccgaagaattagctggaaattctgagacactaaaagaacctgaaacggtgggagcccagagtatatgagatgtcttcagaggctcatctaactctgtccttacatactcaatgcatatatgaaaacaatactaaataaacatctgatctgtataaaaatgtaaattagtttgacactgcttttttgataggtgtggtcatttctccccatggtagtttaaaacatcagaaactgaattctggacagatttaagccttgacacactgtgtttttttttttttcccccttcttttttgggtcttcatttttttccccattgtgatgtttggtaacgaatttaaaatgtagttttaaataaagtttggacttatctat

SEQ ID NO: 238893 - DNA, 488 bp, Homo Sapiens
gtgttaggtttactaagtcctggagaaaactgctctgagattggcagtgctatggaaaattacaacatctgcaatttataaagatggtccgcccatctagactaataatgacattggaaaatgctgtgatgtgtgagacaagaagcatctggtgtgtgacaaacacaaatacatcacatatcgagaaagaaggaggtgacacagcttgaagacctcccacgccagagctgaaagcctgagtcaactgccagtggtgttttgaatcattttttaaatagactatgctacaagaaaatcttacttcttccaaacagtgtgatattgctactttcattaaatgaatgtcctttttgtgtgttttgtggtagaagtggttaaggcagtggtgttcagtctttgggcttccctgggccacactggaaaaaagaagaattgtcttgggctacacataaaatactctaacgatcgctggtgagctaaaaaaaaaa

SEQ ID NO: 238894 - DNA, 473 bp, Homo Sapiens
caattctgtgtgcatgtgtgtgtgtatatatatagttagaagttagaaactgaactcttttttgtctaccatcatttcatatttttcttgctatttcaaacctataatttttaaagaaacgactaacgtaatcattcatagaatatgctgtcagtaacttaacaatataaatgttaacatggaggcatttagttcagcatttgctttacttaatagagtgcagaaaatgtggcccttttctcagttagggtgtatgtgaagataaatttagaatttctagactagtaaatacttctctgataataacttaattatagctatttcaaaccaaattgtttaattgtggtgaatcatatgtaaattgttcagatgtaggtcaacacccacgcccacattctagcacctctttcctaattcaagacaactttgcagtgcctaaaagagctgaacagtgcagattagagacataagac

SEQ ID NO: 238895 - DNA, 469 bp, Homo Sapiens
cgcagccagctcccactttcctcaccctccaggacctgtaaactgtgaggctggaccagttatgtcaaatctgtcctcccccagagctcagtccctctgcccttgggtgtccttggcacaaggcaggctaggctgcaccagcttcctccatctccgtcctgcctcccccatccccaggtgccattcccacaccatctgaatcactgatttcctcgcaatcagacgctatcttccagttaatcacttcgcttgtatttaacataagaaagaaaaaccctttcattatcacatacagctggaaatcggcttcttgcaggaggcgtatccaaaggaattggagaagagataaactggtaattggtgaaagaattactttaattttttttcctacttgctgtcatgatgatgtccttagaattgtgagcccgtggacacttctgtacaataaatctgctattattacttctag

SEQ ID NO: 238896 - DNA, 552 bp, Homo Sapiens
gtctttctcttggataaatatcttcatctcctagacttggaaaaacacattttctcctggggtttcccattggcgtgtcttgagctgctctggtgataaccgtaataatgccaatactgatatgaacagcagaaaacagtaaccccaagaactctacagatgatcatcaaggaccactgtctcttaccatttgctgctttggtttgaaattctcactgcctcgtagatctcattttgagcactatacattcctaaagattgatttctttctatctgacttaaatttaggaatgattaaatcttcatttctcccatgaatttgatcctaaaacattttgaaaggaaacagccttgagatctgtgattactaagacatacataacattcttatcacattagaaagcaagaattgactgttgcttgtcttgttcctgttgtcttgtcccctgaattcctgtttatctttgattgtatgtgggacattgtattttcagtacatttgtagaaataatgcccagcctataaagatgttttttgccaaaaaaaaaaaaa

SEQ ID NO: 238897 - DNA, 524 bp, Homo Sapiens
caaagtagattcctgtaatacccagattgtttcaaacacacctagggactttccagtaactgcattgagtatctgggctttgcaattaacttttaaattttatttaattttaattaatttaaaacaaggcattttaatttaaaattaagatgcagttggggagctgaatgttaaattgtatttaatttggattcatgttctcagtcacactggccataattcaggggcacggtagccatatgtggttagcagccgccctattggacagcatagcactgcaccacctggtcttgctgcattaagaaatgagatggcttcattggcttactgccctcacgtgtgagggcaacttcctacttctgtcagtgagatttcttttgtgctgccatgagcccaaggtagccctcagggccccagatttgaccagatctctaagccaacttttctcttagagtcttaagactgaaattaactgatctttgcaccagaacccatcaattcatacattctactacccatgcttt

SEQ ID NO: 238898 - DNA, 568 bp, Homo Sapiens
ggaccttcctgcctccctcacgctctccttgccctactctccaggacagcctgtgccagtacttcgcccaactcaggcacatgccccctggctgctcctgcaggccaaggaccggcatgcgctgcagcgccctctactgggcacctggccctcgctggttttctgatcctaaccagcttctcctcttagaatttcctgctgatccatcccagaatgaatgggagttcaatctgtactgaattatctttcatctagcaattgtgcaattccaaatgcaggtgaggttgagggaaagcgggcatcccctcacatccatgggatctatgtgtgggttgtatcaagagtctcaaaaatgctcatattctccggtcctagaattgggtctagcctaaggaaataattcagaactccatgtttttttaaagctttatgcacaaacatgatcataagacatgatttatgataaaaattggatgaagtaaactttcctatgaaagcagctgagtaggttaaattaaggtatacacttgatagccccttcataaagaattttcaagtgaaaaaaaaa

SEQ ID NO: 238899 - DNA, 607 bp, Homo Sapiens
tgaagaatgtaccgttacttgattggcaaggcatatttgcaaaagtgggagactggttcagatcatggggctatgtgcttttaattgttcttttctgcttattcatctttgttttaatctatgttcgtgtctttcgcaaatctcgcagatcccttaactcccaacctctgaacctagccttatctccacagcaatcagcacagctccttgtcagtgaaacttcatgtcaagtttcaaatagggcaatgaagggactaacaacccatcaatatgacacaagtctactttgagaatatctgaacaaacagcagctgcagacaaaaagccttagctaaactttgatgagtaaagcaggtcttaccgagaattcagctgccaaaaccctcctctgagtgttcctcttataagggcacttagcactaggacctcccaaggtattgtaaataagccttatcagaactttttgtagtttcattctgaagccttaagacacacaccataaagctgatctgtaaacccttaccccttgctgttcagagagctactctttgtagtgttcttgcatgcatatataataaatgttttttctattgaaaaaaaaaaaaaa

SEQ ID NO: 238900 - DNA, 321 bp, Homo Sapiens
  misc_feature (56)..(56): n is a, c, g, or t
  misc_feature (164)..(164): n is a, c, g, or t
  misc_feature (200)..(200): n is a, c, g, or t
  misc_feature (208)..(208): n is a, c, g, or t
  misc_feature (229)..(229): n is a, c, g, or t
  misc_feature (282)..(282): n is a, c, g, or t
  misc_feature (287)..(287): n is a, c, g, or t
aaattttataattttcatattgtggagtcccatattttgttctgctttccactagnccaggcttctgaggtcttctctgtgttcattgcttattaattttattcagcaaagattaattgagctcctgcaatgagacacacacactatgttaggtgctggggganaaaatagggaagggccctaccctcagaaagcttgcnatttatgnaagaatacttacaaaacctgnaaagtggtattttaagttattttgtttcatttttgctattgaaacaaagaaantgagnatttggtatgattcaaaaaatgtttaggtacaag

SEQ ID NO: 238901 - DNA, 562 bp, Homo Sapiens
  misc_feature (22)..(22): n is a, c, g, or t
  misc_feature (57)..(57): n is a, c, g, or t
aagaaaagaacacttctttatntgagggactttcccaacaccaggtgcttggggatntcttagagatcaccaaccgactccctcactgtgaaattaaaccaagtactggaaacgtaactaaacagcgaaccatgtagcttcacctgactcagtgctgggggcctctaccatctactgtgcttgtgtcatgatgctttttctctgaagtggtgtgggaagtaccaggggactggcagaagcccaggccctctctacttttaccagcaactgatcatgtctttcagaatccatgtacatataggctgttctagccacagtggtagatttatgattcacatccgaaagtgtgccttagttatcaatttaacatttctctagtattcatatcccttttcttaccatatacctcagtgtatccttcctgtgtcaagccttataaatcatgtaatttagtgccactcatgtaaatcagtaaaatcacaaaggtctatttaatgaaaacgattttccaatgttgttcccttttaccaagaaaaaaaataaaagcacattgtcaattttt

SEQ ID NO: 238902 - DNA, 759 bp, Homo Sapiens
  misc_feature (9)..(9): n is a, c, g, or t
  misc_feature (14)..(15): n is a, c, g, or t
  misc_feature (70)..(71): n is a, c, g, or t
  misc_feature (90)..(91): n is a, c, g, or t
  misc_feature (187)..(187): n is a, c, g, or t
  misc_feature (211)..(211): n is a, c, g, or t
acttgaaanagagnnatggaaggtatagagtctactaccagttactcactacgagtggcagtcttaggcnntatggatctatgggtgagnnccagtccacgaagaatatttgccaatgctcatacatatcacatcaactcattttctattaatagtgattatgaaacatatttatctgcagatgatntgcggattaatctttggcatctgnaaattacagacaggagttttaacattgtggatatcaagcctgccaatatggaagagctaacagaggtgattacagcagcagaatttcatccaaacagctgtaacacatttgtatacagcagcagtaaaggaactattcggctatgtgacatgagggcatctgccctctgtgatagacattctaaatgtaagtttattgtatctttccttaaaatgattacatattctgtttgtctgaaataagcctcagacatgataagtacaattacagaggttcaaagtcttaaacccgtgtgtccagagccacttgtacccttggtaatctgcctacctcctcatgaggcattccaggttattcctggaagctctcttggggggcatgtctattgattgccaaggaatatatctctcatggaatgctgttgttctttggtaacttgcggttgggctctgtaaccttgtattgaagtagagctgttcctttctttcccatcctcccttcctactttgagcttcctaggaagatttcttctgaggtttccttggctt

SEQ ID NO: 238903 - DNA, 491 bp, Homo Sapiens
agacttgaggatccagtctctttcctttatagataattagactcaggcagaaactcagagctctcagggctttgctgtgctgtgctgtgtcatgccgtcctggggcccggggaaccaccctgagcactttgtggagtgtgtccttgctcaggcttttgccttgggattgaaccgaagctgctcagttccttccacttacctcctctctgtctgatcttccttttcccagagcctcagtgcttgatgctcagtgctcaggagatgtcctttgctccatccttcagaggggcagttgtgtagttatgctgccgggtgagcacagacacacatactttctcccctagctgggaccatcccacacggggtgctcaatatgcatgcctcatgaaagcatagactgtccatttaaaaaaaaatcaggtactcatggtattacaatatgccaggggttggacaaatggattttttacccttttttaaaaaagttatgt

SEQ ID NO: 238904 - DNA, 537 bp, Homo Sapiens
gagaaaataatataatatagcttcctggcaggttaaaagtcaacacttgattttgctattcttctgactttttgaaaccctgaagttctgaatttcaagcttttaagaagcttttcagcaatggttgtttgtttatggttcaaacatctgaaataactacctgcatttaaaatctaatgttgattattttctttttacattctgtgtggcaatggagcatttgccctttcaaacagtaaaacgatttagctttgtggcagtgcttttttgtagactgactgactatacccttcaaaaagaaaaactgctctacggaatgcaaattttgaggcatgtttacctgctcgtggaagaaataaaatggaattgaaaaaaaaaggactaaaattgaagaatgaaattacagttgtgttaaaaaccttggctctttataatcatgaatcttcagtattatcaataccataaaccagacattgatgctgttaatttttttacagaactatcactcttatcgtacaggagtaaagattaaattgt

SEQ ID NO: 238905 - DNA, 516 bp, Homo Sapiens
taatgagcctatgggtttgtttggtactgtaatgacaagccatcgcaagtgacctctatatacagggtcactcagagcccttaaaaagataaagtcttggcattgttaattgcattagaggtatgtctccttttgtatttagtacaccaaatacttaatatttcagaatgcttattccttcaatgatttcctaagtgtatcagttgagattatgttcagttgtatgggacgagtgttttatacaaatagaggcttatttacctcttatgtaaaagaagtctggagttagtgatccagggtggtagagaatgtatcactgacccgtgtatcaatgacccacatatcaatgacccacgtatcaatgacccgcatatgaatgacccatgctgcttcaatcattttggtttccttctcaagatcactttgtagtccataatggctgctgtggcttcagtcattacatttgcattccatgttggaaaaagaataaaggaataaaaaaaaaactcactctct

SEQ ID NO: 238906 - DNA, 415 bp, Homo Sapiens
gaggttgtagtgacctgaggtcgtgccactggactccagcctgggtgacagcgaaactccatctcaaaaaaaaaaggcattcagtattgcaacgggacagtccttggaggaggaacaaaaaaaaaaagtacttaggccaggcaaggtgcctcacacctgtaatcccagcacttttggaagccaacgccagaggatcatttgagttaagaaaccagcctgggccaagggcccatctccacaaaaaatttaaaaattagctgggtgtggtggtgcacacctgtagtcacagctactcaggaggttgaggtgagaggatcccttgagcccagaaggttgaggctgcagtgagccatcattgcaccactgcactccagcctgtggaccagagcaagaccctgtttcaaaaaaaaaaaaa

SEQ ID NO: 238907 - DNA, 575 bp, Homo Sapiens
actgtatggctatcccatgaagctagaggaagggcaagctggtggggggacagcctctgagaggcagcatggacagactctgtcctgccaaagtcctcacacagcccacacaggtgatttgaggtacaccccaagtgcctggcagctaaacacattgccattagtgccacatcatttagcttaaggctctactaagtcagtaattactttagtggcattatgagtaagtacagatgaactggcagtcgcttcaggaaagggacacatggtgagtcctgatgatgggcagggagggaaggaaggtggggtgtcgggccctgcagtggggtgtgggggagctgcagaacttggggcactagtagggtacaccatatcaggccaggaggaaaaaggagaaatcaaagttggggagtggtagggaaggaaaagggtctgtagtgaatggaacgtaactcttccctattggtgattttcctttgaacaaatgttggccaaattattttctgacccagtaccctcctatatcaaagaagtgatgggatggtgggaaataagcagctttcctattgttaaaa

SEQ ID NO: 238908 - DNA, 522 bp, Homo Sapiens
caagatggagggagctgcaggctcccttggagctgggctctcgcgggttggaggggctgaggcctgccctggggcgtccctgggcgccgccgtcctgtgctagcagcccggggcgctggccctgcctaggcctttttactgcctgccaccgtctcctggtccggaatggttgatggagactccatggaggctccctccacagcccgctctatcgccgggcgcacccgctgcggcccctgcggggagcagaatcagggacagatggcgcccggtgagggcgggccccacaggccacctccacgaggggtcttctcttttgttcctcgtctacacctacgtcttcggcggatgtcatggtgctgaaccatttcccggactccacgtaaagatggaagcgattccgctttcgtctcgccctggcggttcttagtgggattacaattgaggatgttagtttggatgaaagttggtgaaatacttaccttatgtctggaaatacagataatgtgatttttaaaaaac

SEQ ID NO: 238909 - DNA, 566 bp, Homo Sapiens
  misc_feature (10)..(10): n is a, c, g, or t
  misc_feature (61)..(61): n is a, c, g, or t
cagagttaanaattgtatgtatataattttttatagatattgccaaattgtcttccataanagttgaaccaattttctctacttttattttgcattctgagtgtggcagaggcaaagctatgtgcataccatagctttttctccccctgaaaacacaactaaactacattgttttcctggcctctcatgcatttaggttggggtcatattacttccctccaagaaaaacaacagttggtatgcctcctccacacttcccacaactgtggaagccagtgatccagatagcatagctattaatacaagatgggtgaaagctgctcaaccgcatcagacagcatgagtggtaagattttattgtgtcaaacgactgcattagttgtgttttgttattatggcagcatagcctagcttagccctaactaattcaataaataaagttgagcattatttgtacatttaaaagcgttttttatgtttgctttacagtggctttccacttttctatcagagaatcccccctcccttatgtaccatgctatattaataaattagaaggagctgct

SEQ ID NO: 238910 - DNA, 575 bp, Homo Sapiens
atgaagtgagtcttcactgatctctccatattttgacattttacagcacttattatctctactttgtattttgaaactgaatccaaaatagttttgcatttgttgtttaacagtcatgtatgtagtttttttttttttttttctttttttttggagacagagtctggctctgcactccagcctgggtaaaaaagcgagattccatctcgaaaaaaaaaaagtgtatatgtatagtgtatgcatgcacagaatactttacagcaataagaatgagtgttctgcaaatatacacaatattgctgactctcccaatgttaaacaaaagcatccagacacacaacaatgtgtacagtatatgattccattgatagaaagcttaaaaacaggcaaaattaattcacccttatggagtcttaagtaaggggaacaaaaggggccatctgggcagtgataatgctgtttcttgagctgggtgctgggttcacaggtgtgttcagtttgtcacattcatcaagcttacacttctcatacatcttcttttctatatgtatgtcatccttcaataaaaagaaatt

SEQ ID NO: 238911 - DNA, 474 bp, Homo Sapiens
aaagtggtgatagatttcctgtagtgtgtgtaaccttttgcgtgtgtaggttaagcacaacccagaaatattaatgaattatctaaagataagtaggtagattgcaggagtagaaaactggtggctcggggccaaattcttccacagatgtgttcttttttgtcctgtgtggtatttaaaattgtttctgccagtacataaaaaagaaaaaagaatttccatagaaatctggacttctagtttctcttagaaacatagtaagatttgtggaatggaaatctacatttccatatgtcagtagtgtgctgcttttaggctgggcctgattctgtttttcctcagttctagccttgcttgccatacccaattacctgtgtaggatattcttcccttccatctgtgtagcataggactgcacttctttagcttctctaaattttacaatgttttctgtacagtcttataagaattttt

SEQ ID NO: 238912 - DNA, 755 bp, Homo Sapiens
ggacccaagcttgaggacgacaaagtgacaatcactttcatgaaggagctcatgcagtggtacaaggaccagaagaaactgcaccagaaatgcgcctagcaggatttcagacaaaaatcaggaatcatcaccagccaagactgtgttcagaccacgtgacgtcttccaggcaccaggaagaaatacgaccaacctccgtaacaaatgagagaaacttcacctgactgtgttttgtgcatatggtttatgagtcgttttaaaaacgtgtacttttactgctgcgttcaggttttcagccatagaatattctagaaaaaaatagtgataacatttatttcaccgctataaccctgaatgtgtagctgtgttttttaaaaaaacatttttttacaattgtagaatatgtaacatgcctccagaaacgtgccctaaacacaaatatataatttggcaaataattacatagcaagtcctatgttactgtcatctgatctagaaatcatcgtcctcccagaagcccctcatgtgctctggccatctcaaatccctccctgccccagggataaataacatcctgttttgtgataaactctgccttttctatacacgtgtatgcttattaacaaactatgaatttctccacacggtagatttgattatgtttgaatcttacatgaatgtaatcctattggtggattgtttttgctgtataaaagatgtcttccagaaaaaatgcattaaggaaaatatgagaa

SEQ ID NO: 238913 - DNA, 815 bp, Homo Sapiens
ataaacagccaaatagcaaataggtcactgaatgataagatttgcaccttagaacaataatcattttaaggataacaagtaaatgtctgaaagcatgaggggctttatttgcctttacctcatatgagtctttgatcttgaaccgatacttttggatctcattgttgatatacctgaatttactttgtaagagattttaacttcacttcatgctgatgatgtatcaaattcattttatagaaagatttaaagtttttttctggaagtgatatatgtcaaattacatttcctactgcagtatttgagcagggacagtcattttttaaatgtttttggccgggcgtggtggctcatgcctgtaatctcagtacattgggaggccaaggcaggtggatcacctgaggtcaagagttcgaggccagcctggccaacatggtgaaaccctgtctctactaaaaatacaaaaaattggccgggcgtgatggtgggcgcctgtaatcccagccactccagaggctgaggcaggagaatcgcttgaacctgcgaggcagagattgcagtgagccaagatcaagccattgtactccagcctggacaacaagagcgaaactctgtctaaaaaaaaaaaaaaaaacacacacacacacaacacaatgttttcacgcctgtaaacctagcacattgggaagccaaggtgggaggattgcttgaggccaggagttcaaggctgcagtgagctatgattgcacactgtactctagcctgggagacagagtgagacactgtctctaaaaaaaaaaaaaaaaaaaaaaaaa

SEQ ID NO: 238914 - DNA, 812 bp, Homo Sapiens
gaagaaaatgaaaaacagcaaaatgcctctgaaagcaaactggaattgagaaataattcaaatacttgtaatatagagaatgagcttgaagactctaggaagactacagcatgtacagaattgagagacaagattgcttgtaatggagatgcttctagctctcagataatacatatttctgatgaaaatgaaggaaaagaaatgtgtgttctgcgaatgactcgagctagacgttcccaggtagaacagcagcagctcatcactgttgaaaaggctttggcaattttttttcagcctacaccctcacttgttgtggatcatgagcgattaaaaaatcttttgaagactgttgttaaaaaaagtcaaaactacaacatatttcagttggaaaatttgtatgcagtaatcagccaatgtatttatcggcatcgcaaggaccatgataaaacatcacttattcagaaaatggagcaagaggtagaaaacttcagttgttccagatgatgatgtcatggtatcgagtattctttatattcagttcctatttaagtcatttttgtcatgtccgcctaattgatgtagtatgaaaccctgcatctttaaggaaaagattaaaatagtaaaataaaagtatttaaactttcctgatatttatgtacatattaagataaatgtcatgtgtaagataactgataaatattggaactttgctagaacaagaccctgtagtaatagtaataatagttgaagtttggccaactcttaataaagttattttggtactaaaaaaaaaaaaaaaaaaaaaaaaaaaa

SEQ ID NO: 238915 - DNA, 847 bp, Homo Sapiens
gttccaagtagtaactggcagatcctcctgtctggaggtaccaccttctattctggtttctgacttttccttcttgatgaccatagatgtgttccagaggcaaaagagacacattatcccagatggcagaacatgctttcaaaacatataaaatgtcaaagttccagatccttctacatctttagtcctgtctgaggatggtagctggctctctgtagctgatagatggctagagttccatccaaatccttgaccacgacttcatggagatttgaataatctatttgatgagatttctatttcaataacccacctctctcaccccacattcatatccctaaatttgaccctctgggccgagtcacattaccttcaggagacttgatcccagtagactgaggtcttccctttcagcagaaagatttcatttccctggcttgccagtggcactgatttccgaacacccaatgagtttaatattctttcctccttggcattactgccccagcctctttttattttttttgtgtgtgtctaataaccaggaaaaaaataaagcttaggttttaaaaagttttaaaaataatctgtttcagaaactgtcaaatgtaccatatttgtattaagagttgttgggaatttttgtacaatgaatttacatttatttatggtgacatatttacgcttgtgatcaaataatgatgttaaattcttaaatcatatttgctatgcagctgaagatgatattttgatttgtattttgggggtacctgtgttgagttgataaacatttccatcttcattaaaactgcttccaaactaaaaaaaaaaaaaaaaaaaaaaaaaa

SEQ ID NO: 238916 - DNA, 819 bp, Homo Sapiens
catcctgatgggcagaggaatcaggcccctcacaagccttcggcagaagggcaggcacacaggattggatgcaaaatccaaaacttcagtacagcagggagcaaggagcccggaagtgggcgcactggctgtgcacacgcctggacactttcacaagcacacagaacgaccacctaccacgtccataacgctccggatgtcctgagtggagagagttgtgtttattcaccatgtcatacgcgcatatagggaacctctatttaggagctggtggcctgcactcagcaccgcacagataaaaatatacgactttcaacacagatccaaataccctcacattttaaaagtcaggattccctacacaagttttaagctgacgggattcaagttctgagttttcatacatagctttaacttgtattaaacacatgtttatttacaacgtggagagagaataaggggcagttaaggccactttctcctgtgaaacactgcaaaatatgtacataagtacaacctaatataggcaaaggttctaaaaatcatctttcttggcttcacgtaattgagtatcagtcggggagtggagagcggctgccgatagcaccaggccatgccaggccacgccaacaagggcgtgtgcattcactttttcattgagctgccctcagagctgctgccgagctgagccctgcacgggcccaggtgtgcgccgcaccccagaccggtctgaagcacgtgtcaccggtccctcagttccatttccaaatccaccaaggtccagtcgacagacatttccaaaaagaatcctgtcatccc

SEQ ID NO: 238917 - DNA, 805 bp, Homo Sapiens
accccagcaattttcatagtgttatccaggtactgtgctaaaaggtcagctcttctgtaaaatgccatgcttcgcagcttcaaaaagcaaaattctgtatttcatggagggagggaagggtcattctcttctaagaaaaatagactggacaggcgaatgcatgcatgcatgtgtttagagttgcttctcagaagacaaagagatgatagcaactattaaaatatgaatgaatgaatgagtgaatgagttgaaggcctagctcgggctgataaagcttttgccttagtagaggttttatgtcaacaccttcaggagggaagcccttatttctgggttgaactccccttccatgatattatgctagcaattgccatcacttagttcctggcgaaggcagaaaaagaaaacaaaaaatcagcattgtcattgacaaaactggatgctgaagataaagtaaaattgtcttttcccttgtcccacatttttgggattaaagccagaattgaataggaaatacagtactatttctgaagttgatagccgatctttaagaagaccctgtctttaaaatgaaactagcaggcaaacacctaaataatcgaaaattaccaaagaacaacaacgaaacaagaaaacctaaagatttttacttcctattcttattcctttccttattactgtgacaccccttgcattgctcagttgcctgtgtgtcaaaataacttgtggacgttggaaattatttgaaaatgtattgtgtggaatgtaataaaatgatgatatttttatacaaaaaaaaaaaaaa

SEQ ID NO: 238918 - DNA, 725 bp, Homo Sapiens
tttttttttttttttttttttttttcacgtggaagaggtttattacaaataaatgaaacaaaaatcaaaggcttgtgaaacatctctaagtcttcctgttcattgaccagtttctcaatcacaaaaaacaggaacgtctgtgaggttcaattttggaaagggggattggtttagtggctcttctgatacaaccacagacccctcggataagactgtggtccaaagaaggctgctgtatgttctctgtaggctagactcagtccttgtaaataaactcagtttaaagctttcaatactcaactgcatagttccatataaacatgaaaattaggaagattgctattagcacacattcctaaatccacaggagttatttagcaaaacatccaatgcatgaatgtagagaaaacacaatgacccaaaagttaagactggtgaatctccaggttcacatgagaaggtaacccaaattcatcacttaaccaaatttagacaagagtcaccatttcctaattctaggaaatctgactagttaaggtggcataactagtgataaagttcatcatgagctttatcatcacaatgctaagaaacattattttagaaaatctagagaatcattaacaagcaaataacagaatagagtaggggatgagctgggccactctggggtcagactgcctgggattgacctggccctactacttgctggtgtgagatgctgg

SEQ ID NO: 238919 - DNA, 704 bp, Homo Sapiens
ccacgctgccggcctcgcccctgtgccacgccctgcaggcccacgtgctgggcgggaccctgaccgtggccgtggggggtgtgctggtggctgccttactggtcttcactgtggccttgctggttcggggccggggggccggaaatggccgcctccccctcaagctcagccacgtccagtcccagaccaatggaggccccagccccacacccaaggcccacccgccgcggagccccccgccccggccgcagcgcagctgctctctggacctgggagatgccgggtgctacggttatgccaggcgcctgggaggagcttgggcccgacggagccactctgtgcatggggggctgctcggggcagggtgccggggggtaggaggcagcgccgagcggctggaagagagtgtggtgtgatggacgggcagcttcctgtgtgctccaagggatgagcctcgtggggcagagggcccggggccgccgcctggcctgggagtccctccctggtttttattctcagtacctcaggctcccctgtgtacttggaggggcagggagccctttcctcggttctggcctccagaccagggtaagggcaggcccctccaacaggtgctcacagccaccgaggcaggggctgcagccacccactgggagtcttgtttttatttataataaaattgtggggacacctcaaaaaaaaaa

SEQ ID NO: 238920 - DNA, 828 bp, Homo Sapiens
  misc_feature (100)..(100): n is a, c, g, or t
ataatgaatagactcacaggcattttacccccttattataaaattgtgaagagaaagaagatgacacacttttggacgctgtattttatgtatttatttntgagacagagtcttgctctcctcgcccaggctggagtgcagtggcacaatcacagctcactgtagctttggcctgctgggctcaggcaatcctcctacgtcagccctccaggtacctggaaccacaggtatatgccaccatgcccagctttttaaaattatttttgtagagatgggggtctccctattttgttcaggctggtcttgaactcctgggtttaagcagtcctctcacctcggcctctcaaaatgctgagattataggcatgagccaccacatgcagccaattgctatgtttttaaaactagatttatagacatattttttaaaagctagggcacttttccccttaactaaaagcactagttcagttcttcaggtaatttcattggaactcacctaagactggaattggaatgtttccatgttgctcattttttctacaggttatgatagaatctcattaaatcttgacatctctcccaggggaagaatatcacaggccagtggtgtgaatggggtatgagatgatagcatttactaaatcggtaatctcttttatgtatgttcttgttatattgaggttaagaggcaagatgattggcagcagaattcttcaggattttgtttgctgtggtatggattatattggagcaccttaatctgaaggatgaaactgtgacttgatttatctaattagcttttaattacctatagctattttattt

SEQ ID NO: 238921 - DNA, 664 bp, Homo Sapiens
ccccaaaggacgcctgcaggagagagcagcactccgcatcacctcaccaaggatcggactctgcccctggacctgggaacgactggactgtcacggggttccctcctagctctcccagtgaactcctgccaggcacacacagcccctatagcactgagctcacatgggactgggatatgggggcatctcttccccagagaggcactcagtgagcctcctgtgcctggccccagcctgggccatctcttaggtgagacagttgcccgaaactaagccaggcctggctggaggagcagcagcttggggagagggatttccctgcagacctcaagccatcatgcggtgggtgctgccatgacagaggctgcacccctgggccagcggggctgctcacccacctcttgtgcaaggtggcctttgtgctgcgcctgcaggcagagctggagcccccagcagaggcaggctgggacggaccagcatctggaagatgtacatagttatttttctctttgtggtttcttgtttggtttggtttgcttttgacagcttcattttatttttgacgtcactttttggccatgtaaactatttgtggcaattttatgtttttatttatgaataaagaatgccatttctcacgccaaaaaaaaaaaaaaaaaaaaaa

SEQ ID NO: 238922 - DNA, 812 bp, Homo Sapiens
ctgaagaagttattctcaagaaaattggatgttttcattggccttcttaaattgtggccagtgtcttttaatttcttcttattttccttttggcaaagcagatataaccctcagcatgctaggagagtgcacccgtacctatggaagtggtaaaatctggtatttactggcttacactcaaaacgaccacagtcctacctcagttcaaggtaaagccggatttccgtggcgggggtcccacaggacctcctgtagtagcccctgcgctgtgtgtctggagcgcggtcctcggccttattgaaatggtccaagtagacagctgcttgttggattccagtgcaggtacctgcgatgtttacgtccacaccgagcccagtgtgggactgacatttctcaatggaagtgaaatttgggattggactttgaagacggattactaaataataattattatatgtaactgaagcaacctacttttgaaaatcaactgtattgggtagtgggaggtgggagggaagggctttgggaaggggatgaatatctctttttacctttaacagacttgtttaatcttctcgatgtagatgtttatgtaggtacttcacattgcaaacgccttttattctatttacaagctcagatgtctctgctctcctgaatcttgggcatgcctttctgtaaccaaaaatccctgtaggcgtgctagcaattccagggtggtccgggtttggcagatttgatttttagaaaacgtattatctttaataaaatgttattatgtcaaccagtgaggctgccctgaacaaaaaaaa

SEQ ID NO: 238923 - DNA, 858 bp, Homo Sapiens
[293 bp omitted]cttccttggtatagtggaggatttgaggattggaatatagagtagagtgcttgcttaagcctgggagcccatctttatagctatttgatgtaagaaaagagacatggccatttctaaactatataaggtgagtgtgtctattcccagcagatataaaggaaaaaggaaacttttttgattcccaccttcccagcctcacctagccatcttccagcctcaaatatagagatgttagtgcaaggtcctgggctctaggtgatcatttcataagtcctttacagataaagaaaaagtagtgtttgtatgtttgtttttaagtaaccccaaaacaaatttatattgtattcagcaaaattggaattcaggtgtttaattttagaacatgaagtgcctgctgttttaagcattgacttgtataaaaagaattgcatgtctccagtaagcttatgggttttctcatttttaggtatatggcttttaatcatgtaaagtgaaacattagttttcttgcattttattacaggttctttgttgcaataaagatgctgctgaaataaaaaaaaaa

SEQ ID NO: 238924 - DNA, 706 bp, Homo Sapiens
gaacatttcatctcctgtgagtcagaagggctttatttctccctttgatggggccccttcttctttctggtgctctggaagttgtttagaggaaagaattctaattttaattaattgcgcagtgagttaatctcactcgcttttctgcttccaggcatcttaggaaaaacaaatggttttagtagataagggatgcctactaatgcttttttaaaacaaacagggacatttttattatagatttgatttttttaatgaatgtttttaaaaatatataaataggacaccaaagcggcagggttttttttggggggagggggtttgttttccaactcaagatggcacattagtggccagcaatattttttaactcattccaaccaggaagcttttttatacattgcctaaatctacgccaaccagaaaatagtctcatctctttttttctcaaatgagatccgtgttttattttagcattaaattagttacactgtgatgactggcctattacctgactcagctccctctaccttgaaattgacatttttaaaaaatgcaactaagtggttaatagtgtgtgacgctcaaagttaatgtaaactggaaaggttgtgtgtcgttgctttttgtgttttggttaggcttggttttgttttttaatttttatactttctaataaatttgcagtttcattctaaaaaaaaaa

SEQ ID NO: 238925 - DNA, 353 bp, Homo Sapiens
tttttttttttttttttttttttttttaattcaatctggaatcagaaagcggtggattctggcaaatggtccttgtgccctccccactcatccctggtctggtcccctgttgcctatagccctttaccctgagcaccaccccaacagactggggaccagccccctcgcctgcctgtgtctctccccaaacccctttagatggggagggaagaggaggagaggggaggggacctgccccctcctcaggcatctgggagggccctgcccccatgggctttacccttccctgcgggctctctccccgacacatttgttaaaatcaaacctgaataaaactacaagtttaatatgaa

SEQ ID NO: 238926 - DNA, 799 bp, Homo Sapiens
gcagtgttgagaaggccagtcactgtgggaagtcatccaagaagcccattttgagccttactcttaagttctctatgaagaactacattgatttgttggctttcagaatcttttaggaaataaatcctctccaggacaaaaatgaacatgaatggagtggcattttgttccaagtcagaggtgggcacctataataaatgactagggttcactttctgggactgatgtttaattgtaacacagatacaacagggtggccttgttgtatataatacggtattatacctgcatgtgctctagcaaggataccaaggcaagcatacatgtagctggcttgagtttgtaccaaaacagtccttcaactttgcactgtgccttaagtaattactaacaaaaggtactaggattagctgcaatctctactttcgatgaggaaatcccagtaagctttctgattcaagtacaatgctgccattttttaaagggccacaactatagaattaccactgttggaatttggtacaaaatatgttttgtctattgaaaacatacacggtaaatggtgttgttaggtaggttctgtccagttcttagggacttttttcacattatagcatttttaccctaaacatgatgttgagattattatatactgtattttcttctaaattaaccctaatgtttaaaaactcactttccccctttaattgaaggcattgttttgttagatgcagtaatgatgtttaccagagattattgtttcctatgcaaaataaattttcatatttgaaaaaaaaaa

SEQ ID NO: 238927 - DNA, 687 bp, Homo Sapiens
tacattaataattcttgtaattgatgcaggttttcttttttctacagactactattattttattcttgtctctctggaaaatgaaaaatccattagtttttctcttttgcttttacccagaaattaaaggttggtaagtggtaattagcgtagctcctgtcaaagccagttgcctcatgaggaccgacatttgacttaagctgaaataatggaatatggctaatgtaaagttcattagtcccagctgctttctttgacattcttttcttctaccacaagaacgggcatgccctgccctctctcactcctatttttagacgtattgctgcgctcctatgtgtctattctacaaggctggaggcacagtggttatagggaaggtaaatggtaatgggacaatatgtctgtgaccacgttcattacacatctgggatagagctctgactctttgatagaggactccagcaccccatctgtctgcccctgagaaacgaaagagaaccactctccactgtctactatatgttaggtactaggatttttctcattatagcacttcattcctttcttgggggggactggattatttattttgagacagggcctcactctgccacccaggatggagtgcagtggcacgatcacagctcattgtagcctcgaactcctggccgctcgcgatctaga

SEQ ID NO: 238928 - DNA, 648 bp, Homo Sapiens
ccaaaagccgaatgcactaatgacagttttaagtctatgaaaatgctttattttttcattggtgatgaaagtctgaaatgtgcatttgtcatccccactccatcaatccctgaccatgtaaggcttttttattttaaaaaaacagagttatcccaatacattatcctgtgatttaccttacctacaaaagtggctcctgtttgtttgatgatgattggttttatttttgaaatatttattaagggaaaactaagttactgaatgaaggaacctctttcttacaaaacaaaaaaaagggcagaaatcaccccaaggaacgatttctcaggttgagatgatcaccgtgaatccggcttcctctgagcattcgatggccttagcacctcatcaagccagcacatcctgcctgctgttgcagcctggctgggtttattcttcagttaccctaatcccatgatgcctggaaccttgattaccgttttacatcagctcttgtacttttcagtatattttcataatgagttatattgtcatttagactttgaacagctctgggaaatagaagactagggttgtttcttaaagtttagctcatgttataataaaaagttgaaatggaaaaaaaaaaaaaaaaaaaaaaaaaaaagg

SEQ ID NO: 238929 - DNA, 537 bp, Homo Sapiens
tatgtggtttaacgtttatagttgaattgggccaaaatgtttcgaatttatagaaatagaaaagttgtaactttaaaagagaaaaaaaattacaaacacctgtttccaaaccttgacagaaaactactttgagtctacaaagaggaggcgacaagtccatcagcagaaagtcacctgtctacatagaccaaatggagcaccaaggccaagcggacagaggggccatgggttgtaggattgaggaacggaatctgccgactcacatgacagcccattctttctttctgggtgatctggggatcacgccttgcccaagtgtgagattacctttctgttccttgcagttcacctcactttccgtcctttgtagagcagtggtgtctccaatgaacttgtttcctggttttgcatcttgtgaaatgtttttttgtatttttgttgaaggttaaacatttgtataaattgtaaatatatttggtttattacagtaaaggctttggtccccttaaaaaaaaaaaaaaaaaaaaaaaaaaaaaa

SEQ ID NO: 238930 - DNA, 860 bp, Homo Sapiens
cgtgtacagtagcacccccaaccacgacaacaagcagcagagcttctttctagcggagacactaaagtatctctatcttctgttctctgaagatgacttgctctccctggaagactgggtgttcaacaccgaggcccacccactcccggtgaaccactcagacagctccggcagagcctggggcagacactgaccccatctcctgccgccgccctggggccgccgcagggatgccttgccttttcaggatttgagactgttctcaaagggattgggaacgaaggccccatctcgggcagacccccagcagatgtgtcggacaagcaacttcttttcctctgtgaggagacaagacttggagactcagcgatgtcaggccagggccatggccacactggcccacacattcctttctacagagaatttctatgaagcccactcacttgccattccagggccaaaggaccggaggtttgcatatccgccccttgtatttgatttgcttccttttggtttcttggtttttgtttttgcttgattttgtcttttctctacagtttagttttgtcacaattacacatatagttttcaaaatcatgcactttctaaaatggtgtcatcctgaaaaacaaaacccagtgtttgcacacacacaaaatcttgaccccgttatctatattttaaatgctttttgcccaacactgaccctatgttcaactttgtgtcatttaccttataatttgaggaggggtttccctttgggcctcagtgttacaaattactagtgctattttcattattattgtaatggaaaaatctgtggactagaataaaagagtttatgaataagaaaaaaaaaa

SEQ ID NO: 238931 - DNA, 531 bp, Homo Sapiens
aaaaataagcccagacgtgggggctcatacctgtcatccaccatttggaaggccaaggcggaggattgcttgagaccagcctgggagacatagggagacctcgtgtctacagcaaataaaactagctgggcatggtgttgggtgtctgtagtcccagctactcaagaggcagaggtgggaggattgctcaggcccagcaagtcaaggctgcagtgagctgtgattatgctactggacctcctaccctggacaagggtagccgtgatcatgctgcgtggtctcctaccctggaccagaaagtgagaccctggctctaaaaaaagaaacacacacacaaatacacaaatatatatatatacacacacacatatacatatgtatacttaacataaaaattcaaggaaaatactgtattttattttacctattttattgtgcttaattatgttcaaaaatcctattctaactgcttgagctaggattgtgccactgtacttcagcctgagagacagagcaaaaccctgtctcagt

SEQ ID NO: 238932 - DNA, 567 bp, Homo Sapiens
ggtcaataaatgcccaacaagtaagtaattaaatgtacaaactgtatgttacaagaaagtcttttggccatcagatgaaaacaagtcctttcagttactccccacagctgtgagtatgctgcggactttaattcaaaccagaccttaatacctaggagaagaaggatatatcacaaagccgaattaccgggaacaatgctgtaaccacctcagttaaggtcatctaccgagcttggccttcccaataatgttgttgacatcagaaaaatcatttaaagattcaatttaaaatgttaatactgcagtgtcagaaacatacaaacatgaaacaagaaaaaaagccttccttccattgtgtgaaatgagctttgtcatgccctgtgttcagatggaagattttcttttgctaaaatattaagacctacttaatgaactttgacaaagcaatgcacttttccaagtttgcatagtttgcgtggttatctgtttttggtaccactatctcctgtgttcctgaaggagtttcttgccatgatttgaatgaataaagatatttacgaactaaaa

SEQ ID NO: 238933 - DNA, 592 bp, Homo Sapiens
atacctaagcagcaacgctatgggaaaggaatcatagcccatgccaccccacaatgccagataaaccaagtgaaattcaagtttcagtcttccaaccgagtttggaaaaaagaccggactaccattattgggaagttctgcactgcccttttgcctgtcaatgacagagaaaagatggtctgcttacctgaaccagtgaacttacaagcaagtgtgactgtttcctgtgacctgaagatagcctgtgtgtagtttaacctgggcaggacacatctccctgcatttttttttttttttttgagagagaggtgtgatgagggatgtgtgtgtgcagcttattgtagaccattactactaaggagaaaagcaaagctctttcttattttcctcataatcagctaccctggaggggagggagaactcattttacagaacttggtttcctttgccgatcttatgtacatacccattttagctttcccatgcatacttaactgcacttgctttatctccttgggcattcgtacttaggattcaatagaaacatgtacagggtaaacaattttttaaaaataaaacttcatggagtaaa

SEQ ID NO: 238934 - DNA, 739 bp, Homo Sapiens
  misc_feature (188)..(188): n is a, c, g, or t
gaggccagcttcctggatcaaaacttcacacgttcacagaagcagggcttttcctctatgataagcttcatcttatactatgatgcttgcaagaagatgatcaagctggcagattactaccccatcaactccaacttcaaagtgggctacaacactctcttatcctgtacgtgtgtgccacctgaccnaggtgagggcattacgctttgtgtttatgctcgctttgtatttggaggaaggtgtaggctccatgcttgcaaattttcaacatgctgtcatggtcctcaggaattagtcttgtttttttctctgaaaaactctgctactgaatttgatgtctcattgcctgaggtattttagctgtatgattcaaccaggaaggagaccaggagctctggaatgtgaacataaccaactcaatattttgaaattaactcaaactgtgggatttgcaaggaattcatgtgtacattattcttgattttataagggggggaaacctggatacatgtattaacagatataaatatgtgacaaacctatcctttgctgcttctttattggtgtaggaatgtcttcctttaagtaaacctttaatacatgattttaaacttatagaagaaaaagatactaatccacttcagataatttaaagaattaaattatgaaaaaaagaaattcagattggaattgcctagtggtagaattttatagcttatctttactagacaaataagaa

SEQ ID NO: 238935 - DNA, 471 bp, Homo Sapiens
  misc_feature (57)..(57): n is a, c, g, or t
tgagccctgatgacccttgggctgttcagctttgctagaacctcccagatgacccgntaggagtctagtgcttcacaggaccaccccgagcagaactgggacccaagagcctgcaccccaaggaccagagtccatgccaagaccacccttcagcttccaaggccctccactgcccggctgtcgccagtcaccacggcctcagacagggcttgtgctcagctgacacctgtgacacagctcttctgcctcatgagctgttgtccagctacacctccccgactctgtcctcgtgctgctggcggttctgaggtctgcagattttagctgagttccgggctgttgaaagcctgctgacgcttggttctgttatcagtggaatgaggtgactttcccggagttgtgcaatcctcaggtccggcagtgtcttcttccagttactggtttcaaacaagccaaaagtctgaaaaaaaa

SEQ ID NO: 238936 - DNA, 570 bp, Homo Sapiens
gacatataatgcatgtgataactggtggtggttcttgaaatgaggatagtttagtatctttaaaatcagtgacaaccataactggtttattatttacaatgctatgtgtgaaaaaaacacttattctttcaattataggtgaccaaacataaaaatagggtcaacaggcctcctttgtccctaggcatggaagggttcaagggcttccataacaagtagaaaactagatctcacattggccgtaagagtgataaacagctactaacgttcacgtgagtagaaaagccaggatcggaagtcctgcacagcgtaaagcactcagtcatcatccgaaagaaattaacaaaaacctccccgtgcgtgtggaatggttcctaaaatgcaagaacggggacttggcagtaagagcagacatctgttttctcttgtacagaataggttcaacaaccagcagatagccagtcactggcatgtgactgcaaactgctcagagcatggtgaagctatggatgcacaccggggattatattcctgctcgtgtaactacctatttattgaaaaaaaaaaaaa

SEQ ID NO: 238937 - DNA, 470 bp, Homo Sapiens
ctttgaattgatctctttgttatgagcttggaataaagaaaaaaatgatatgtgaggaccaatttaaatagcacttggtatctgtattttaaacttataaaccatggtgttaactttcaaatgtgactgttcagctgccgtcctttatgcttatcatgtgtcttgggctttctaagcttgggtctgcatgctcctcggtgttttcccaggaatttcagtgacgctttttatgttacctaattgacgttgtcaaccatttaactgtgtagcgcgtgtgctttaacattccacttatgtttatacctggggtctgcaaacaggaaaacattcaagcttttaagaattaaatcacctagaaataatgattacagttcgatcatgagaggagggtgtgatggtagcaattcatctttaatgctctagtggcagtcattaaattttgtgaatagcaagtatttggcaccactttt

SEQ ID NO: 238938 - DNA, 508 bp, Homo Sapiens
cgtatcctgtcctccagcggcactggcggctgaggctgaaggccctgaagtgggttcggtggaggatcagaggagacagcagggctactttgtgcgcctcggctccctgtcagcacggatccgccacctggcctacgagcactctgtggggaaactgaggcagagcaaacaccgtgcccaggacaccctggcccagctgcaggagacgctggagctgatagaccacatgcagtgtggggtgacccccaccgccccggcccgccctgggaaggtgcacgagctgtggggggaatggggccagcgccctccggagagccgccgccggagccaggcagagctggagacgctggtgctgtcccgcagcctgacccaggagctgcagggcacggtagaggctctggagtccagcgtgtggggcctgcccgccggcgcccaggagaaggtggctgaggtgcggcgcagtgtggatgccctgcagaccgccttcgctgatgcccgctgcttcagg

SEQ ID NO: 238939 - DNA, 490 bp, Homo Sapiens
gatgatgcctagtaaattacagaagaacaaacagagactgcgatacgatcctctcaatcaaaataagctgcgctggaacactcatcgtcctgcaccatggcatgcgctttcaagactctgcttgctcatacgctgtttgctctgcttggaatgtgcttacccccttccccttcatctggtgaactcctactcatccaagacccagcttcattgtctccatctttgggaagccttgccctgcatactccaggcagaaccaatcctttcctccataatgcttccctggtgctttgccattgtatttgtgacttgtttgtctgcttcagctagactgtgagctccatgagggcagggaccatgtctttttttgcttttgcacacggtaggtacttaatattgctttatgtttatttgatttaccatccacctcattctagaagtgtatagtggtaataaatgtttattaaataaataaattataccgtacatt

SEQ ID NO: 238940 - DNA, 538 bp, Homo Sapiens
atgatctctgatttccctagcaatgattctgtttccattgattcaaattactaaaaatttaaacaatattcattggtgtgtcaaaatacacttgtgcattttctgcagttataaagatatctttgggcttaaaatatttttgtgtttcgtattactttcttggtgtagattcccaactaagttaagagttataaacataacgaaagactccatgttagagtgtgtgtatgtgtgtatgtttaaataatacatttgactaggcgcagttgctcatacctgtaatcccaggactttgggaggctggggcaggaggatcacttgaggccaggagttcaaccagcctgggtaatgtggcaagacactgtctttacaaaaagatatttaaaactagccaggtgtggtagtgtgtgcctgtagcctcagctactcaggaggctgaagaggggggattgcttgagcccacgagtttgaggctgcagtgaactaagatcacgccattgcacactagcctgggcaacagagcaagaccctgtctctt

SEQ ID NO: 238941 - DNA, 517 bp, Homo Sapiens
cctgcgccagatgactcgtccccgctgcggggttacagataccaacagttatgcggcctgggctgagaggatcagtgacttgtttgctagacaccggaccaaaatgaggcgtaagaaacgctttgcaaagcaaggtgagcactgttaaaatccggctaggccaagatttcccaatgtcttgaagccaatggctaggaaaacagctgagcctgggactggactttgtcagtaacctctcttccctagggcacgggaggagtggggtgaataggacctcttggcttgaggaccatgattgtgaatacagacatttaattcagaatgacacctacattgatgaattttcattgtacaagtgtttttccagatcaaacacaaaacccatgtaattccttgataaattttcaatgcagggcagataaactgttgctaacatttttcatttatatttactgaagttattttcatcagaattcattctttttcataagttattaaacaaatgtgtgatctattg

SEQ ID NO: 238942 - DNA, 523 bp, Homo Sapiens
acaggtttaccaaccagcattgaattggaggaaggaataacatatgaacagatgcagactgtgattgaagaagtccttgaggaaagtggctattacaattttacatctaacaggtatcattcctatccatgggggaccaagaatcacccaaccaaaagatgaaaatgctgcattttgagtggacttgattttctcagtgaagttcaagttctggacttcagccgctattgcaagatgcccaaggattgggtgctgctagagggtgtggaaaagaccaagatgccatggggcctgcaggacttctttctgggggtcctgtgctggagtatatgacagctgcggtacttgagggcttcattgccagaacacattatatacaggatgtcagagctaccagtgtgctgctgggagaaaatgctgcaaaattcatcttttggagggtggggggaaaacccaaaaacaacaacaaaaaaactctcttacagaattttccttaacattaaaaaaacttgtcatatttttc

SEQ ID NO: 238943 - DNA, 469 bp, Homo Sapiens
  misc_feature (31)..(31): n is a, c, g, or t
cgaagttcaactcaggaaggtgcaatataancaaatgtgctatattataatgaggaatggtactaccgttccagattttctgtaattgcttctgcaaagtaataggcttcttgtcccttttttttctggcatgttatggaatgatcattgtaaatcaggaccatttatcaagcagtacaccaactcataagatcaaatttcattgaatggtttgaggttgtagctctataaatagtagtttttaacatgcctgtagtattgctaactgcaaaaacatactctttgtacaagaagtgcttctaagaatttcattgacattaatgacactgtatacaataaatgtgtagtttcttaatcgcactacctatgcaacactgtgtattaggtttatcatcctcatgtatttttatgtgacctgtatgtatattctaatctacgagttttatcacaaataaaaatgcaatccttc

SEQ ID NO: 238944 - DNA, 529 bp, Homo Sapiens
gacatttcgtatctgtaaagcaccatcacccttctccctaatctgtgcatgtgtgtatctgtagaagtgtgcgtgtgcgagaatccacccttcatgatttaattgaaatcacagagcagtgatcagcagcagcgaagatgaccctcacagctggggagcccatgcttgatgtggtcagcattgcctccctgcaggagggcccggctcagggagtccttctcagacccctctgtcttccctatggtctattaatctccccatgcaaagggaagatgatggacatcaaatcgactgtaggctgtgctcctctgtgcgctctcacgagcactaacacctcccagcatgattctccaggactgcggctccaagaggaaagctggccccagaagcaggctgctgttcagggcctccttgcctggtccagtccttgcttaggtgaactccagctgaccaagataagcattcactgcatttggtttaagcagcctttcgtgtttattgtgttagtgggtgcttttctttctaaagc

SEQ ID NO: 238945 - DNA, 613 bp, Homo Sapiens
tatggctctttatgcatccactcatctactcattcttcgagtctacacttattgaatgcctgcaaaatctaagtatcacttttatttttctttggatcaccacctatgacatagtaaacttgaagaataaaaactaccctcagaaatatttttaaaagaagtagcaaattatcttcagtataatccatggtaatgtatgcagtaattcaaattgatctctctctcaataggtttcttaacaatctaaacttgaaacatcaatgttaatttttggaactattgggatttgtgacgcttgttgcagtttaccaaaacaagtatttgaaaatatatagtatcaactgaaatgtttccattccgttgttgtagttaacatcatgaatggacttcttaagctgattaccccactgtgggaaccaaattggattcctactttgttggactctctttcctgattttaacaatttaccatcccattctctgccctgtgattttttttaaaagcttattcaatgttctgcagcattgtgattgtatgctggctacactgcttttagaatgctctttctcatgaagcaaggaaataaatttgtttgaaaagacattttctctc

SEQ ID NO: 238946 - DNA, 577 bp, Homo Sapiens
cgggcagagctaacacctgagctgttaaagatcctgcattctcaggttgctggcagactgatcatccgtgcagaggagctggcccagatgtggaaagtggtgaatctcccaacagatctgtttaatagtgtgatgaatgtgggtcgcttcacggaggagatcgagtggctgaagtttttagcccttgcttgcagcgctctgggagttactattaccaaaactctcaagatagtgtgtgaggtcttatcatgtgaccataatggtgggtcgccccggatcccgttcagcaccttccagtttctctacacgtatattgcaaaagtggatggggagatctctgcatcacatgtcagcaggatgctaaactacatggaacaggaagtaattggccctgatggtataatcacagtgaatgactttacccaaaaccccagggttcagctggagtaaaagcacaattttggcaattttaaaggaagatacagagatgattgtacttcagaatgactgaaacccatataccacccaaaatcaattttcttgtacaactggtacacactaataaacaattaaacat

SEQ ID NO: 238947 - DNA, 539 bp, Homo Sapiens
  misc_feature (13)..(13): n is a, c, g, or t
cactttgtaggtntgtgttttcataatctttaatttgaaactcatgtgtcctcatggatcgtggatgccttcatttcttgagctctcaatgcagacatttaaatggctgcaatcagtagagtgacccgcggatggcataaatgcacctccttttcttggccttggatctatgggtctgggattgtggtcatctcctcaatcctcaaaaagaggctgaatcaatgtggccgtgggtgggaacttacatacagaacccaatgaagaacttgactgtctaaacaagggggcctcgcatggagctgtaaagcatctaacaaatatgaaaaatgtgaagttccaaggtccaagaagaaaaataatgatgtttctgaaagtgatgataaataattacttttaaagtgctgcatatttatacaattgagagattatttttgtaaatgcaatgtctgtgagctgggatacatgggcagtgcttcagacatttaaaaatcactttttactcctagggagatgccaataaacagaacaaattttgtttc

SEQ ID NO: 238948 - DNA, 474 bp, Homo Sapiens
gcactccagcctgggcaaaagaggaagcctcgtctcaaaaaaaacaaaaacaaaaacaaaaaaagaatgcatggagttagttcattcttctcgccccctggaacttctgatcaaaagtcaatacctttgtgacctacaagtctctttatttgccctccattatagactgagctgttaataacatttaatgagctcacatggattcactggctaataaagaagaatagagttgaggacattgctgccctgtttatgcccaaaaattaccctaaactgaaagttgctttgtgttccttcactcccctctgctggtaaattttaatatagttcttaatttttttaagtcaaattgatagaaacatcaattgtgtttttaaaactgtaagaaaaaataatgttgaacatcacaaaaatgtactcaatctttcccaaaacccatttctttccagttagtttaaataactgtaggttctt

SEQ ID NO: 238949 - DNA, 439 bp, Homo Sapiens
gagatgacatttgggaggggtgagtgactcagactctcagggtctctgacgacgtccagatcagtcacttccttgctacacatgccatggactgtgaatgagaggagtcccacgtccaggtccaacccaggctcctccatgtacctcagtccaaggctgaccccagaagcccttcaatttcaagtctaagaatgagggtgccctgataaatggcacacccaagaagggcactcaggcagtttggtggggctaggagccagtgaaggctgtgaaaggggtacagtggcccagcctgtcctaacagaagcatgaagatcaggatgagggtggggtggtgccgctctattcggtgctggcaacatctgttccttcagtgagtaggtctctgaacacttttttttttgagactctgtcaaagaaaaaacaaaaataaagaaag

SEQ ID NO: 238950 - DNA, 643 bp, Homo Sapiens
aggccactacaagaaagatccttctgtaaggctctgacctccaagaccaaccgccgatttgtgaagaagtttgtgaagacacagctcttctcacttttcatccaggaagccgagaagagcaagaatcctcctgcaggctatttccaacagaaaatacttgaatatgaggaacagaagaaacagaagaaaccaagggaaaaaactgtgaaataagagctgtggtgaataagaatgactagagctacacaccatttctggacttcagcccctgccagtgtggcaggatcagcaaaactgtcagctcccaaaatccatatcctcactctgagtcttggtatccaggtattgcttcaaactggtgtctgagatttggatccctggtattgatttctcaggactttggagggctctgacaccatgctcacagaactgggctcagagctccattttttgcagaggtgacacaggtaggaaacagtagtacatgtgttgtagacacttggttagaagctgctgcaactgccctctcccatcattataacatcttcaacacagaacacactttgtggtcgaaaggctcagcctctctacatgaagtccctggacatgtaagggcgagagtaaagtgatttatcttattttt

SEQ ID NO: 238951 - DNA, 383 bp, Homo Sapiens
tttagtaaaagtctgccgtggagacacgaaggtgctgagaatgaagagagagggctgtgtctgtaatggaagccgcgtggaaaggaggatgggcggcagccttcgagggtgtgtgctgggcagggagtaaagcgacaggcaagcccgcagatggggaactccctgggaagccccctgtatccttcgggacagacattgtatgagttcccacagaatcagagagggtgactggagccactgaatttggagtgaaagaaaaaggtgagagtaggaggaacgtgcgttttcagtcgtggcaggctagataatttcaaccacatttcccactggataagacctttttgtttttttaaattaagccaacaaagcaaaaagaaaaaaaa

SEQ ID NO: 238952 - DNA, 564 bp, Homo Sapiens
atgtcctgtgtgcattataaattttcctctaaactcaactatgataccgtcacctttgatgggctccacatctccctctgcgacttaaagaagcagattatggggagagagaagctgaaagctgccgactgcgacctgcagatcaccaatgcgcagacgaaagaaggtaagggccgcttggtcttaagatatttggtggctggagagagatactagctagaaggtgcctggcaggaagctaaccgccattatgtctctagtggggactgttcgttctagtactttggatacaactttcattgatagccaaggtttgcagcagttggccttggagtttcactggtttattttatttctgcatacttgggtcatctgtaacaggctaacccaaaacgtggaagcctgattattcttctcgctgttttttaaaatgagggagggaggagagggggatagctatctagactctttgagtgcttgtcttagggcgttttctaacttattttccatcaggagggcaggagagcctgtgcaaagcttgtttgttcaataagcaaaaaaaaa

SEQ ID NO: 238953 - DNA, 604 bp, Homo Sapiens
  misc_feature (17)..(17): n is a, c, g, or t
cagttgtctgcctgtanaatgttgagtttcgattgagccatgtttggagattttattactattctgaagggtagtgttgttggttttcatcttcaagaagttgattccaaaactgagttatgaagaatgatataacagttccttcaaaattggcctaggaaataaaaccttaaaaggacactggtgtgctactttgtcttaatttgggcttttctgtttcagtttgccacctccagctgtgaaatggactgcagtccaccctaagtactgtgcacagtatctccctgtgtgtgtgcacagtggcttccccttacatggtagatttttggccttaatataatctaatcccaaagtagttgtgtatgttttctgttccttggcaaataaatgaagaaataattagccaagattgaaaatgtattgtcctaacggtgtccctttaatgtttcatatgaaaaattatgttgacccactaaaatatccttgctcaatgtctggtcagttgaatttaataacatatcttgttaatgtttgtgtgtctattaaatgtgactaagcaggattactgaaaattccctataaaatcaaaggcatctaaaaaaaa

SEQ ID NO: 238954 - DNA, 518 bp, Homo Sapiens
agagaagtatgtatatctctcccaagtaagtagggcatgtatgtgtgcctgtgtgcaaaaggatccatgcatgcctgccctgtgtgtgctgtgggaagagggggtgattatggctggtgctgtagatacaaagatatcagccttgatccgtgttctccagagagggagaggagacagacacatgaaaatgcttacctgggtggcataagaagtgtgatagaggccgggcgcagtggctcacgcctgtaatcccagcactttgggaagctgaagcaggtggatcacttgagcccagaagttccagaccagcctgggcaacatggtgacaccccatctctactaaaagcacaaaaattagccaggcatggtggcacacacctgttaattgcagctacttgagaggctgaggcacaagaatcgcttgaacctgggaggcagaggttgcagtgagctgaaatcgtgccactgcattccagcctgggtgacagagcaagacttgccctcaaaaaaaaaaaaaa

SEQ ID NO: 238955 - DNA, 553 bp, Homo Sapiens
aaagagcagtgttctcctttggataccaacagttgtaaacaaggagagagaacttctgatagagatgtcactgttgttcaatttaagagccttgtaaataatccaaagactcctccagatgggaaaagtcattttcctgaactacaagacgacagtagaaaagatacacccaaaacaaaacataaaagcttaccaaggacagaacaagaattagttgctggtcagttttcatctaaatgtgataaactaaatcccttgcaaaatcacaaaagaaaaaaattgaggtttcacgagggtaacctttcactccagtaataaaatgacagcatcttatgaacaagcttctcaggaaacccgacagaagaaacatgtaacacagaactcacgtccactaaaaacaaaaacagctttttttgccaaataaagatgtgtataagaagcatagttctttgggacagtcattatcaccagaaaagataaaattgaaactcaaatcagttagcttcaaacaaaaacgaaagttagaccaagggaacgtattagatatggaagt

SEQ ID NO: 238956 - DNA, 743 bp, Homo Sapiens
  misc_feature (738)..(739): n is a, c, g, or t
tccttaaaagccaccatgggcctggctggaagagccagagtgaaggaaaaattttcccctgaagcatttacagaacagctctaccgatatgttaccaaactgctggtataatcagattgtttttaagatctccattaatgtcatttttatggattgtagacccagttttgaaaccaaaaaagaaacctagaatctaatgcagaagagatcttttaaaaaataaacttgagtcttgaatgtgagccactttcctatataccacacctccctgtccacttttcagaaaaaccatgtcttttatgctataatcattccaaattttgccagtgttaagttacaaatgtggtgtcattccatgttcagcagagtattttaattatattttctcgggattattgctcttctgtctataaattttgaatgatactgtgccttaattggttttcatagtttaagtgtgtatcattatcaaagttgattaatttggcttcatagtataatgagagcagggctattgtagttcccagattcaatccaccgaagtgttcactgtcatctgttagggaatttttgtttgtcctgtctttgcctggatccatagcgagagtgctctgtattttttttaagataatttgtatttttgcacactgagatataataaaaggtgtttttcttaaaaaaaaaaaaaaaaaaaaaaaaaatcccggaatccggaccgaactatcgataccacgtccnncccc

SEQ ID NO: 238957 - DNA, 788 bp, Homo Sapiens
tcagtctgaggtctttgtgagctcccactgtgtgggtgtctcagctctgagggtcttgtgagctcccactgttgtgggtgtctcagctctgagggtctttgtgagttcccaccaacttttaattattcatgcccttgaccatgtggttgcttggagacctggggtcttctgcagactgaagaagacacatttctagattatttgtcctttttatcctctcaaaaatttaaacactgtacctcttcagtggtcagaagaaagttggaaacttttcctacatattaggcgttagtatgaggacatttgtttgaattatagaaatttgccctgagctgaactgggttgtgttaacacattggtagagctatgattccttcccagttctaagagatacgatctgtaagtccctatgtcaccacattgcttgagatgatcattcagttacttgtcaggatttctcctcttcagagagatttttttttatagcacagattcctttgccccttttatctccttatctggatatgataagtggttatgagggtctcactaactattttgtgtttaccttttatatgtgtaaaactttgcagtagcatttaaagtgtaatttatttttctatcaagtgcactattcatttagtgtgttccagttttatatgacttgtattagaaacactgcactgagttgtttgtacactgaaatgagaactctagatgtaactctattcaaataaaccttcgtgggcctttcaaaaaaaaaaaaaaaaaaaaaaaaaagggcggcc

SEQ ID NO: 238958 - DNA, 734 bp, Homo Sapiens
agaactgctttctgaagcaagtttccaagaagctcttcaggaaagcattcctgacattcaagcgcacgagtgggtgccgctgtggctactgcggtattcggtcattgtgaaaagtagaggaattatcaaatcaaaaggctacattttacaagctaaaagaaggggttcttaactgacttaggagcataacttacctgtaatttccttcaatatgagagaaaattgagatgtgtaaaaatctagttactgcctgtaaatggtgtcattgaggcagatattctttcgtcatatttgacagtatgttgtctgtcaagttttaaatacttatcttgcctccatatcaatccattctcatgaacctctgtattgctttccttaaactattgttttctaattgaaattgtctataaagaaaatacttgcaatatatttttcctttatttttatgactaatataaatcaagaaaatttgttgttagatatattttggcctaggtatcagggtaatgtatatacatattttttatttccaaaaaaaattcattaattgcttcttaactcttattataaccaagcaatttaattacaattgttaaaactgaaatactggaagaagatatttttcctgtcattgatgagatatatcagagtaactggagtagctgggatttactagtagtgtaaataaaattcactcttcattccaaaaaaaaaaaaaaaaaaaaaaaaaaaaa

SEQ ID NO: 238959 - DNA, 777 bp, Homo Sapiens
  misc_feature (101)..(101): n is a, c, g, or t
gcagacaagagacaccaaggactggggatcagggtctggctctgtcagccgccacttctgggaagagaaaaagtttgggtccactgaacatcatgttgtangacgctgacaggtggggtcctaatgagagccaacacatgctcactgccagctcctgtcctgagtactgggaagtttctcctgaagccctgtgagatggctctgtggctggtatcccgacttggaagatgaggaaactgaggcacacggcctggcctggcttcacacacatagccgactcaggagagggatgcccatgggggaacatgtgactctcagcattggaaggacagagctaggatgatggctttccggtggcactcgttcaggtttttgcccaagtctcagcttggccaaggcctgtcactgactggtttaccaaagtcgatgtgaggaggaggctttatacctgaggggatgatgttaacttcagacaagatggagctgctcacttttgccgggtttggtggccacttcacccccaaccctgtctcacccccattatccctcctcaattggaggctggacagagctgaataggaaagacttgctattgcctaaggctatgtgtgacaccctcctgaggacctccccaccccagtgtaatggcccttcatggcagggacagaaaggtggactgggggccatttgcttcctgtggccttcagcagaccaggccctgtccctacctggagcctcacctccaaggaaattcatgttctccttaaggaaaaaaaa

SEQ ID NO: 238960 - DNA, 845 bp, Homo Sapiens
gctatcagtgtgcgtgccatcgagtgcatggatatgcagcaagttccactccagtcagtcatgtctctcatgacgactttggatagagcgatagtgcgactgtcactctcagcatcggcgagcagaagactgtcctcagactgttctggtgtctgtatagctcagcactgtgactggctggatatattctggagaccacaaaatccaacacctaaggtgcaggggcaaatgccagccttgatgagggtaggaatcttccagtccttccagaagagctcccgagacatacttctctgcacagacatagcctctcggggcctggacagcactggtgtggagctggttgtcaattatgatttccccccaacgctgcaagattacatccacagagcagggagagtgggccgtgtggggagcgaggtgccaggcaccgtcatcagttttgtgacccatccctgggatgtgagcctggttcagaagattgagctggcggctcgccgaaggagaagtcttccaggactagcatcctcggtgaaagagcctttgccccaagcaacctgattttgacaaatctgattaaaatgtgatgctagaacagggatctttcccagtatcttgagtgggtgaccacacttgtcagtgggaggctctgggctgccctgtcggctccttgagggcgggatgaactgctttgtgacttggaaaggtacgctgctggccagcattggagaagaagctgctgagcatggctttctgtagtctttagcaagacacaagtggattttgactttgtatcatgtcatgatttctaacaataaatgatgtttttatgtgaaaaaaaaaaa

SEQ ID NO: 238961 - DNA, 770 bp, Homo Sapiens
ctccactcaccgcagcgtacttgccacttcagtttcaaacacgtagtcctttaaaacttgatccgatagctttaatgcggccggtcctctctcagtcaggaaaattgcacagaccgacagtcgtgaggatggcagagctgctgcattcccccacatggggatttctgtgtctgcttggcgacctccctgcgtgcacggcctaggaggtgcacgggccaccatagtcacactggcactgaaaagaaagcgttgccctggtgattctttcccccccgtttgtaatgttaactgatcaggaagtgcagtttgggtgggatgccgaatcgtcgtgctgacattgagtcacggatgaggaaggtacaagtcctttaagatcaaaactcaaacgggccgttctttctaaggtgtcggtatgtggggagtggtacaaaatggtctgatgctccttcaaaaacattcactttttacaacgtcaaggaattaagcataaaaaagattggttaaaagctttggtttctagtaaaggttagtgtgtgtggtttttttaagaagctgttttgctaaattatttttacttggaatgtttcaaacagatttcaggctgcaaacttgttttataatcgtttgcttctccaagtgaagctcagaaatacctaaaaatagctgtaacgttcgcgttaggaaagatggtgtttattccagtttgcatttttatggtgaaataaaatccttttccaatggaaaaaaaaaaaaaaaaaaaaaaaaagggc

SEQ ID NO: 238962 - DNA, 842 bp, Homo Sapiens
  misc_feature (49)..(49): n is a, c, g, or t
gggacatgtggtgttcttatagattgtgaccatcttaaatcactacagnattcgttgtgcagacctgatcttgtgatgtggaagactgatcttgttgcaatattttgctagagactcaaatagtagcacacattagaacctgtacagctcatgttgagctgatttttcctttttgtatttcttagcagagctcctggtgatgtagagtataaaacagttgtaacaagacagctttcttagtcattttgatcatgagggttaaatattgtaatatggatacttgaaggactttatataaaaggatgactcaaaggataaaatgaacgctatttgaggactctggttgaaggagatttatttaaatttgaagtaatatattatgggataaaaggccacaggaaataagactgctgaatgtctgagagaaccagagttgttctcgtccaaggtagaaaggtacgaagatacaatactgttattcatttatcctgtacaatcatctgtgaagtggtggtgtcaggtgagaaggcgtccacaaaagaggggagaaaaggcgacgaatcaggacacagtgaacttgggaatgaagaggtagcaggagggtggagtgtcggctgcaaaggcagcagtagctgagctggttgcaggtgctgatagccttcaggggaggacctgcccaggtatgccttccagtgatgcccaccagagaatacattctctattagtttttaaagagtttttgtaaaatgattttgtacaagtaggatatgaattagcagtttacaagtttacatattaactaataataaatatgtctatcaaaaaaaaaaaaaaaaaaaaaa

SEQ ID NO: 238963 - DNA, 805 bp, Homo Sapiens
  misc_feature (28)..(28): n is a, c, g, or t
  misc_feature (92)..(92): n is a, c, g, or t
cagattgctcaaactatcagaatttctnaagagagtatcaggagagaaacgtgagagatgcttttgacacttcaagcatatgatgagagtcnttaacaagctccagccagaagcctgcctgaaagatgggtccactgccacgtgtgttctggctgtagacaacattctttatattgccaacctcggagatagtcgggcaatcttgtgtcgttataatgaggagagtcaaaaacatgcagccttaagcctcagcaaagagcataatccaactcagtatgaagagcggatgaggatacagaaggctggaggaaacgtcagggatgggcgtgttttgggcgtgctagaggtgtcacgctccattggggacgggcagtacaagcgctgcggtgtcacctctgtgcccgacatcagacgctgccagctgacccccaatgacaggttcattttgttggcctgtgatgggctcttcaaggtctttaccccagaagaagccgtgaacttcatcttgtcctgtctcgaggatgaaaagatccagacccgggaagggaagtccgcagccgacgcccgctacgaagcagcctgcaacaggctggccaacaaggcggtgcagcggggctcggccgacaacgtcactgtgatggtggtgcggatagggcactgaggggtggcgcgcggccaggagcacgcatggtattgacttaaaaggttcattttgtgtgtgtgcacattgtgtgttttgtgtactcctgtgggactcccatggttgtaaataaaggtttctctttttttttcctaaaaaaaaaaa

SEQ ID NO: 238964 - DNA, 685 bp, Homo Sapiens
  misc_feature (44)..(45): n is a, c, g, or t
  misc_feature (48)..(48): n is a, c, g, or t
  misc_feature (50)..(50): n is a, c, g, or t
  misc_feature (56)..(57): n is a, c, g, or t
  misc_feature (60)..(60): n is a, c, g, or t
  misc_feature (68)..(68): n is a, c, g, or t
aaagaccatctccccaacccagaggagccagcccccggaggggnncgncntggtcnngcngatgcccnacaccctccaccccagtccccctcccttgtgtccccccattgctgccagccctcacttcaccagcactgactttggcagaaagggctccgtgatgaggtctccacggtgggaagacagctgcggtggtggtggctgcccgggaggctgctggtgaacgcagggcccggaggcggaggcagaggcagaggctatggctttggctgcacctcggggaaggctgtagaggtagacagcaccaatgacgagtccagcgccaagggcaaataatgggtccacgtggaagccaaagaggcgaatggaggcaacagtggacagcacaatggacagggaggtggcaaagcccttgaggatattgtcagcgtacttgacaaccacagccaccagtagcccgccgaaggcctggttgagcaccacgccccagacagcaggtgtgtacccaaaaaagaaaccacgggtggccacggcggtaccctcagcccaccagagccccaccaggcccagtgctgtgccgaagaggcccagttgcaggttgcgcagccacacggagcctgagctgcctttgaggatcttctcaaagtagacacctgcgaagccggaggagagacaggaggccacg

SEQ ID NO: 238965 - DNA, 733 bp, Homo Sapiens
ttacttagccaaatacacctgagaggcagacactgtgttataagcagacaataatgttctgaatccttcctgttcatgctgctttcttaattcatttctccatgtcatcaagaggttggataacttatttctaagctcaaggttaaaaatcatgtcaccttttttttttttcccccaacacagacctcagaaaaattgcgattgaggaagtagcatgatcctaaatgtgttgctgaaatcaggcagcccgagcctctggtctctccagagagcccgtcttcacatttctctattcctcagcactcacccgaaactgaacagatggggagtggtcttgattgtcaagataaaactggtgaagaaagctaaatgctgagaaactgagcatctattgtcgtgtttaagcttagctgggtcctttctagtttgtttttacagcttactaggtgaagtagtttgcactatttttgcaataaattcatggaaaacctaacagttacttgttttgtttcttactgtgtgtatataaactaatactaaaagtttggcatagtgttttttcacctccttacataacccctaacatgcacagaatgctgtaaatctgataaaatatgatgtgaatgatattttataaagttattttgtatggtgtcaattttgttttgcctcatagtatgtcagcaaaaaattaaataaaagtcctcctatttcaaaaaaaaaaaaaaaaaaa

SEQ ID NO: 238966 - DNA, 772 bp, Homo Sapiens
  misc_feature (73)..(73): n is a, c, g, or t
ttctgagcgctgtcgaggattgtcttgagagctccagtagagcaatggtgactatttaatgcgagcgatcacntccctggaatccacgtcctagactctagccgtcccactgaccctctgagccacagcagcaacagcagctcagagcccgccatgttcatagaggataaagcagtagacaccctggcttacctcagtgacggtgacgcccgagctgggttgaacggactgcagctggcggtgctggctaggttaagctctaggaagatgttctgtaagaagagtgggcaatcctattctcccagtagagttctgatcacagagaatgacgtgaaggagggcctacagcgatcccacattttatatgaccgggcaggtaagtaattcacctgtggaaagagtgaaaccatacggaaagaagtgtgtgcacacattctcatttccggaagcctgactgggttccggaagcattccagctgggtccagagcattccagtgattctcaggtggatctgcatgttggtattaagccttctacacagggctgacctttccgaagagaggcatgaagcagaagctgccctgttgagaatctagaggagttttggggttggaaatggcaggctgcacattcaccttagaaggtagttggctattccccaccttgcagaatacaatcacctttgaaagcctgtgcattcacttgacaatgaatatgttttgtgatcatttacaacggcagtaaataaaaagaggactttgtcaaaaaaaa

SEQ ID NO: 238967 - DNA, 745 bp, Homo Sapiens
caatcatagtatctttccagtatgtctgataagattaaaactgaagtttcatttgggagtagggtttaaagctcaatctgtttctgctaaaattgattatgttgatatgagagaagaggggaaattttatttaaattgcatttattaatctttttatctgaaactttgtacacttttccactttcaaaacctattttaagtacagcaaaatttatttaaaactgtcatagcagtaaaaagtattacgatgaaattgttagggtattaatggaacaaacccagtttcactctcttgacacacttattaggaagggattgcttcactggtttaataatttaaaagttatgtttgttaaacaccctgtcagaacagtcattttcagtattagattcctgtactattgtgttttgagtgtgttttggaaccttcatagaacacactttcttttggaatgtatttgattgataagaaagtttaaacattgttttcacctcaatgtagaaatacagtggttttgtttttttttttcttttagtgctgacaaaataaaatactcatttttgcataaaaaggttcctaatccttttgcagaataagttttgtttactctttataccaaaattcagtgaaggcattctacaagttttgagttagcattacattttaatatttactattgctacattgtataattgagtttgaaataaaaccccagcttatgacaatgcaaaaaaaaaaaaaaaa

SEQ ID NO: 238968 - DNA, 865 bp, Homo Sapiens
ctcgatcccgggtctctatttcggtatcggttcattccaagggttcaatcagtcgtccgcggttaagggcagctgttatgctccaagacatctgagtataacgcgccttttttttttttttttatgagagatctgcttgtgccagcggatgggatgcatgcgcattcgctcatgcagtccgctccgggtcacgccatctctgcctcagcctccgagtagctgggctacaggcgccgccaccgcgcccggtaattttttgtattttagtagagacggggtttcaccttgttagccaggatggtctcgatctcctgacctcatgatccacccgcctcggcctcccaaagtgctgggattacaggcgtgagccaccgcgcccggccaatccttttctcttaagtgtgtttctgactcagcctttgctccttcagcatcattagagagtctgagctctctgaagattagctcttcctgtcgccacagcaactgcccaggccctgtgggcatccgtggtaacaggcgcagggctttgagagcccaagcttgacttgtagtgagagaaagccccgcagggagcccgataggaaacaagcacgttgtgctttgagaagttgtctttaacaggattagctatgcaggcgagcctcactttacgcaattggcatgcccctgaagaatgtgtgcgtgtcaaattttggtaaatggaggaactctcattttaaaggcagaaaagagactgttctctaagtccctgtagtgaatccccttcgtaaaacagagtcttcttttgtaaagtgattctgcacccgtgtagtgacctgttatgttagtctagtgctgagtatctattactgggaccatctgc

SEQ ID NO: 238969 - DNA, 841 bp, Homo Sapiens
  misc_feature (84)..(84): n is a, c, g, or t
  misc_feature (112)..(112): n is a, c, g, or t
tagctcgaggagtcgaaggaaatacatggagactacaggagggggaaagcacacccatgaccacctgatcacattatgatattncattaaagtgctttctcttctctagacntgcgtaatttataacctaggtgtagaaacacaccattttaaatctcaacttgctaacctgacttcgaagcattaacgatctattattagcaatgtaaacaggtttaagaatgaaatattgatttttctgaccctgaaaaaaaaaaaaaaatcctagagtgactgaaccagaggattggaaagaacattttctagggtgcattttccagatagtaatcactgttttgttttatttttgtttttctctatcttttaggtctgttttgcctgaacccatcaacagctgggagattaatcaaccacactgaaaatgtggagggatttatgggggagggggttgaaatgtgggtgtttgaaacaaaagtgtataaacaaatgaattgttgataacttagttattgacctggagactggtagcttattaaagaaactccgtgttactcattcctggagttgggggtttctgtaggcactttatttctccactttcaagagcttgggcttggcccaaatcttagactgtccaattctgcctctattaccaatttaaatctatggcttgaacctgtgcactgaaaatcaaatcctttaaaaagaaagaggagaagaagaagcaaaaaagaaagaaaaaacacttattagaagccctagtcattttttggctttctgttttgttgctgtccattgaagactttgaacatgccgccttaataaatgtattaaaattgaa

SEQ ID NO: 238970 - DNA, 744 bp, Homo Sapiens
aaacatgtaaataacattgcactccacttgtaaccataattagtatgccctaaacaataaaaaccataaacaacatttgattttacgattatttaaatgttattcactgaacagccaagctttgtgctactatgggatttcgttttctgcggttccaagtcttgatccacgtcctgccacaggatcactgaagtagagcccattttcttacactctcgccattagttcaaaagcttgcagcattttatgtctggtacttggaggatgattttcctgtacagttttgcgtttttttcaccgaaaatttctgattattattgttttctcttgtgggatgaaatatgtaccttctatatcacagccttaataccttcagcttcttattcattcaaatcttgcttacaatccagtccgaggattcccggtttactgattttctttttcctgcaaattttagccttctgttttgttttgaaataatgcatcctctgcgctttgtcacattctgaaattcgtcaggtgttttaggatgcacactttcttagatcttttcgagggtcttaactgcagttctgtttccggaatggcgtattttctttctaggaattgtaggctcccggccgccccctgaggagctccgctagcagctaagagggcagccacgaagagcgcctgagcactctcgcgagactgtggggctcgccattggctgctccgccgcgccgcaacggaccctgggagtcg

SEQ ID NO: 238971 - DNA, 742 bp, Homo Sapiens
ctcaccacgcaaacctgcctgccaacacagcaggggccacagaaagctgccaccagagccaccacagggatatgtaatgggcccagccaggcctaagggcccatcacagggagacgcaagaaagggagcaggtgacagaagcacggcggctccctccacaaagctgcggcccccgcagggctccctccctggtgaagagttccaggaccacagcgggaggggcataaagagccaaacacacccggtcccctcggccacagcaggaccagcacacagttggggcagggcgggcgcatggttcggactgatgctaggaaaaactggtgacaccaggtctgtccactagtctgggcgggactgggttgacgtgcatggagctgggtccccacggcaacgagggcacacggaggcctccacggagcacagagagcaagcaaagcgaccctgaattcctttgtgtttgttactggttttgttctttgtgtggttgggtgttttttttcttcttttcttttaaataaaaatgctgcaaggtttccgcctctgcgttccccttgtgatggctggcaggtggtctggaagcgtcccggatggcggccaagccgcgctggggcaggtgtcctggcagcgaagggcagcccggccgcaggccacgtcactgcacagcggcgtccgggtggctctggtatcgctgcctccaaacctcctggatcttcctgcaccacttgtgtgcgttcccgct

SEQ ID NO: 238972 - DNA, 745 bp, Homo Sapiens
ccactcgggagcaagtgcccagtgaagacgcccagcgcttcgactggaccagcccaagctgacgagtcacacgacgcatcaagcaggggagccccaacggctatgcggtcctcttagccacccaggcaacccccagtgggcttggcactgaggggatgcccacagtagagcccggtctgcagaggcggcttctcaggaacctggtctcctacttgaaacagaagcaggccgcaggggtgatcagcttgccagtgggggggtccaagggcagagacggcacaggcatgctctacgccttcccaccctgcgacttttcccagcagtacctccagtcagcactaaggacattgggcaagctagaagaagaacacatggtgatagtcatcgtcagagacactgcctagcccaagcctgtctttcccagcgtcatgtttgtgtcacaaaagcagttattttaaaatctgatcccctctctaccctaccactttggtttgaattatctcctgggttattttggttcatttgggtggggatcaaagtcctgtccaccaccaaaactaagttcttagattttgggggatttttttttttaaacgatgagaagggaatccggttatgttgatttctagtgtacaagatactgtctgctgtggttctgtatttttttattttttgaccaactgtatggaaagttgtcagtaaaacctttgacagaggatggaaaaaaaaaaaaaaaaaaaaaaaa

SEQ ID NO: 238973 - DNA, 775 bp, Homo Sapiens
taagccagagaaaacttacggtttgaggaaggaacctaggaagcaagcaggaagtctggcctcgctctcggatgcaccccccttaaaaagtggactcagctccctggcgggagccccttctttaaaagactctgagagtaaaaggggaaatacagttttgaaagatctgaaattgatcagtgataaaattggatcacttggattaggaactggagaagatgatgactatgttgatgattttaatagtaccagccatcgctcagagaaaagtgagataagtattggtgaagagatagaagaagacctttctgtggaaatagatgacatcaataccagtgataagcttgatgacctcacacaagatctgactgtatcccagctcagtgatgttgcggattatctggaagatgttgcatagacacgaagaaggaagtattctaattaacaaggacagaggactgaccggttccattttttttttttttccagacaatcactcagctggaatgtctgctctctattggtgccttgcatttcaaaaacactgcagatattttttaaaagtaattttcattttactaaacaaaatacttcctatttgagcccatgtgtggaagatttaatattcttaatttaactgtacatttctttatggaaattgattatctacactcagtttcattacagggaaggaacccatgaaaacatcagtgttaagagcatgatgaaaggtgtcaaatcccggaatccggaccgaaactgtcaagtcacaatc

SEQ ID NO: 238974 - DNA, 755 bp, Homo Sapiens
catccttctcctgatcattcgcctgtcctcactagggtgatctccaatctctccaattttatcccttattcattcaagagctccaatgggtctccagctgaagcccctccgggaggcaggtggaaggcaggcaccacggcaggttttccgcgatgatgtcacctagcagggcttcaggggttcccactaggatgcagagatgacctctcgctgcctcacaagcagtgacacctcgggtcctttccgttgctatggtgaaaattcctggatggaatggatcacatgagggtttcttgttgcttttggagggtgtgggggatattttgttttggtttttctgcaggttccatgaaaacagcccttttccaagcccattgtttctgtcatggtttccatctgtcctgagcaagtcattcctttgttatttagcatttcgaacatctcggccattcaaagcccccatgttctctgcactgtttggccagcataacctctagcatcgattcaaagcagagttttaacctgacggcatggaatgtataaatgagggtgggtccttctgcagatactctaatcactacattgctttttctataaaactacccataagcctttaacctttaaagaaaaatgaaaaaggttagtgtttgggggccgggggaggactgaccgcttcataagccagtacgtctgagctgagtatgtttcaataaaccttttgatatttctcaaaaaaaaaaaaaaaaaaaaaaaaa

SEQ ID NO: 238975 - DNA, 727 bp, Homo Sapiens
ttgcctgtcagtgtccactgacggcagcgtgctgctctcaggctcccacgacgagaccgtgcgcctctgggacgtgcagagcaagcagtgcatccggacggtggccctcaaaggcccagtcaccaacgccgccatcctgctggcgcccgtcagcatgctgagctcagacttcaggcccagcctgccgctgccccacttcaacaagcacctgctgggcgccgagcacggggacgagccgcgccacgggggcctcactctgcgcctgggcctccaccagcagggctcggagcccagctacctggaccgcacggagcagctgcaggccgtcctgtgcagcaccatggagaagagcgtgctcggcggccaggaccagctgcgcgtccgtgtgacggagctggaggacgaggtgcgcaacctgcgcaagatcaatcgggacctgttcgacttctccacgcgcttcatcacgcggccggccaagtgaggcccggagaccccggcccgaggcgcccaggcctgagccccatgcctcccagcaaccagggcccgcgggtgtggcccccaccagcccaggcctggactctcctcagttctgtgtcgtgttcgggtttttcctctgtgactgggccgtcttggtgtctcgtggcacgcgtcacagtggtgctagtctgtttttaacaaaaggggatgaaaagcccctcctctccggcaaaaaaaaaaaaaaaaaaaa

SEQ ID NO: 238976 - DNA, 745 bp, Homo Sapiens
cagcaatgcagagctgtcagcttatctatgaggagcaagaagcgctaactgagcaaggagctggcctccctgttgagggctggaggcgtcctggcctatgagctgctgccggcactggacgaggtgctggctagtgacagccgcttcttgctgggcagctggctagagcaggcccgagcagcggcagtcagtgaggccgaggccgatttctacgagcagaacagccgctaccagctgaccttgtgggggccagaaggcaacatcctggactatgccaacaagcagctggcggggttggtggccaactactacacccctcgctggcggcttttcctggaggcgctggttgacagtgtggcccagggcatccctttccaacagcaccagtttgacaaaaatgtcttccaactggagcaggccttcgttctcagcaagcagaggtaccccagccagccgcgaggagacactgtggacctggccaagaagatcttcctcaaatattaccccggctgggtggccggctcttggtgatagattcgccaccactgggccttgttttccgctaattccagggcagattccagggcccagagctggacagacatcacaggataacccaggcctgggaggaggccccacggcctgctggtggggtctgacctggggggattggacggaaatcacctgccctccaccaccacccaaagtgtgcgattaaagtcctgtttctgtccactatacccaa

SEQ ID NO: 238977 - DNA, 764 bp, Homo Sapiens
  misc_feature (30)..(30): n is a, c, g, or t
agcagacggtgatgacggtggtgtacgggntcacgcgctatggcgggcgcctgcagattgagaagcgcctccgggagctgagcgactttccccaggagttcgtgtgggaggcctctcactatctcgtacgccaggtcttcaagagtctacaggagatgttctcggggacccgggccatccagcactggctgaccgagagtgcccgcctcatctcccacatgggctctgtggtggagtgggtcacacccctgggcgtccccgtcatccagccgtatcgcctggactccaaggtcaagcaaataggaggtggaattcagagcatcacctacacccacaacggagacatcagccgaaagcccaacacacgtaagcagaagaacggcttcccgcccaacttcatccactcgctggactcctcccacatgatgctcaccgccctgcactgctacaggaagggcctgaccttcgtctctgtgcacgactgttactggactcacgcagctgatgtctccgtcatgaaccaggtgtgccgggagcagtttgtccgcttgcacagcgagcccatcctgcaggacctgtccagattcctggtcaagcggttctgctctgagccccagaagatcttggaggccagccagctgaaggagacactgcaggcggtgcccaagccaggggccttcgacctggagcaggtgaagcgttccacctacttcttcagctgacaccccgtgagccttgtcagtgtgtaaataaagctcttttgc

SEQ ID NO: 238978 - DNA, 812 bp, Homo Sapiens
  misc_feature (8)..(8): n is a, c, g, or t
cttcgctngggatagttgccgagtgacagtttccctgcaacagagtggtgttgccaacgcaccctgagttcatgcagacttcgtcacgtgtacacatagagggtttgagaagacaaaacgtctgctgtcaagccagtcggcaagcactcagcccagcctcgagtccttctggggagagtgtaagtggacagagtcctggtcagggggcaggagtgtcccaagggctggcccacctgctgtctgtctgctcctcctagcccttggtcagatggcagccagagtccctcaggacctgcagcctcgccccggcagaagtcttttgtccaggaggcaaaaagccagagattctgcaacacgaattcgaagcaaacaaacacaacacaacagaattcctggaaagaagacgactgctaagacacggcaggggggcctggagggagcctccgactctgagctgctccgggatctgccgcgttctcctctgcacattgctgtttctgcccctgatgctggagctcaaggagactccttcctctttctcagcagagctgtagctgactgtggcattactacgcctccccacacgcccagacccctcactccaaaatcctactggctgtagcagagaatacctttgaaccaagattctgttttaatcatcatttacattgttttcttccaaaggccccctcgtataccctccctaacccacaaacctgttaacattgtcttaaggtgaaatggctggaaaatcagtatttaactaataaatttatctgtattcgtcaaaaaaaaaaaaaaaaaaaaaaagg

SEQ ID NO: 238979 - DNA, 428 bp, Homo Sapiens
cttagtagcttgagctggtcctggaagagcaagtaggagctctttagccagactaagagaagggcattcttggcagaaggaatattctatataaagaagtggagtcagggaacagtagggctctttgaagaactacagattgtgttctaaatgaatgacatgtaaggtttgtaaggggcgagtgataaccactgatgaatggcagatggtgttgacaactaggcggggccagagtctgtaggatcttacatgtcttgcaatcagttttgactttgaccttggaacccagttgaggctcccttccgccccagttcctcatggcagggaaatacatcatgttgtgcgttgtaagacttcaaaactttgctagtgagaggcctgcttaatattatttaatccagttcaatttaattgttttgaaaaaaaaa

SEQ ID NO: 238980 - DNA, 614 bp, Homo Sapiens
ggttaatacggcatcatctgcatggaggatttgattcatgagatctatactgttggaaaacgctcaaaagaggcaaataacttcctgtggcccttcaaattgtcttctccacgaggtggaatgaagaaaaagaccacccattttgtagaaggtggagatgctggcaacagggaggaccagatcaacaggcttattagaagaatgaactaaggtgagagacctcatcctgagaaaggttgagttaatgttagagtataagtggtggtaatcttgaatacttttcccattaaatattgatgggggtttgaattttaatcagtgcttttgtggggagtgggggtcaactatcttaatgattacaggtgggtttgtttacgtgcttttgaggacctttctggaggaaaggaaaagcctgttttggggagtctttaaagatggaaattgggtggtcttaaaaatgtaaactcaatcattactttataactgcctagtttatgttaattgttagctgcctaaagtgttttctaatggttttcttttttcctttcaggtgtctaccatgattatttttctaagctggttggttaataaacagtacctgctctcaaattgaa

SEQ ID NO: 238981 - DNA, 239 bp, Homo Sapiens
acaataataaagttttatgattttaaataagtcatatgtttgtatcctgttttatgaagaaagcagaaataattactgaaagtgccagacactaaggaatattattgtttattattttaatacatataaaaagggattaatctgctaaaatgtaatctaaatcagaattttgataaattttttttgtaaactaagtatgtttattcaagacattgaaactactttgcacatatgaatat

SEQ ID NO: 238982 - DNA, 449 bp, Homo Sapiens
cctgccagtctccagctgctcctagctccactccgaggggaggcagaggaaagaactggctcttctctgcagcatcaactcagttctagagaaaaggcttgatatttatgtaaatgagcctagaaataacatttagatgttcatctcatattgaaaagcagttactggctgggcacactggctcacacctataatcccagcacttggggaggccaaggcgggcagatcactcgaggttaggatttccagaccagcctggtcaacatggcaaaacctcgtctctactaaaaatacaaaaattaggtgagcatggtggcaggcacctgtaatcccagctactcaggaggctgaggcaggagaattatttgaacccgggagatggaggttgcagtgagccgagatcacatcactctactctagcctgggcaacagagtgagactctgtctca

SEQ ID NO: 238983 - DNA, 666 bp, Homo Sapiens
ccggtgaccatgaaggtggcacaggaattacagtgtgaatggctgtgtcagatgttttcgtacctcagattaaaaatattgctgaggtcagacgccacaattttcatgactttcttcagaagtagcacattttcgtgacttccgctgtcctctgaaaaacaaagttatttggaacatgttcatgcaaaagtgattctgaccaagtctaaatcgagcttttctactgacatgaaactgttggaaactgatctcattttataagaaatgattttcccctcaaggaggcgtctgtaattccagaacagtccagacatcagctgtacctcatgctcagtagtttttatttgagtttcttttgtgagttaactatgggagatttaacctcttttgccaaagagggaagtgtgtgtgtttttttaatagaaaatatggaccaaaaatttttttccctgaagaatgtattataaccctatttgtgtggttattacatcctgtgaaatgtatatatgttaaaataatgggggtgctggaaggtcatggcagactagctgctggttagtgtggaggggaagtggtttactttgtagagtttacatggttttatgcgcacactaattgtaataaactatgccaacccaaaaaaaaaaaaaaaaaaaaaaaaaaaaa

SEQ ID NO: 238984 - DNA, 768 bp, Homo Sapiens
tcacttggagagtgtcaaatacatactttgaggattgactttatataaggtgccctgtagaaatctgttacacatatttttgacccatattatttacaatgtcttgataattctacctttttagagcaagaatagtatctgctaatgtaagggacatctgtatttaactcctttgtagacatgaatttctatcaaaatgttctttgcactgtaacagagattccttttttcaataatcttaattcaaaagcattattagacttgaaagggtttgataatctcccagtccttagtaaagattgagagaggctggagcagttttcagttttaaatgagtctgcagttaatatcaaatgtgagtttgggactgcctggcaacatttatatttcttattcagaacccttgatgagactatttttaaacatactagtctgctgatagaaagcactatacatcctattgtttctttctttccaaaatcagccttctgtctgtaacaaaaatgtactttatagagatggaggaaaaggtctaatactacatagccttaagtgtttctgtcattgttcaagtgtattttctgtaacagaaacatatttggaatgtttttcttttccccttataaattgtaattcctgaaatactgctgctttaaaaagtcccactgtcagattatattatctaacaattgaatattgtaaatatacttgtcttacctctcaataaaagggtacttttcttttaaaaaaaaaaaaaaaaaaaaaaaa

SEQ ID NO: 238985 - DNA, 759 bp, Homo Sapiens
tgttaaagaagactatagaagaagccaaagcaataatatttaagaaacaagtggaagccggtgtctgtgttaccatggagatggtgaaagatgccttggaccagcttcgaggcgcggtgatgattgtttaccccatggggttgccaccgtatgatcccatccgcatggagtttgaaaataaggaagacttgtcgggaacacaggcagggctcaacgtcattaaagaggcagaggcgcagctgtggtgggcagccaaggagctgagaagaacgaagaagctttcagactacgtggggaagaatgaaaaaaccaaaattatcgccaagattcagcaaaggggacagggagctccagcccgagagcctattattagcagtgaggagcagaagcagctgatgctgtactatcacagaagacaagaggagctcaagagattggaagaaaatgatgatgatgcctatttaaactcaccatgggcggataacactgctttgaaaagacattttcatggagtgaaagacataaagtggagaccaagatgaagttcaccagctgatgacacttccaaagagattagctcacctttttcctaggcaattttaatttaaaaaaaaaaaaaaggccacttactgccctctgtaaaagatgttaacatttctagttttcttttagtgtgaatttttaaaatagcagttattcaaggttttagaacttaataaatacctcgtcggaagaaaaaaaaaaaaaaaaaaaaaaaaa

SEQ ID NO: 238986 - DNA, 719 bp, Homo Sapiens
tttgtaccaataaaaaactcacacaggtttgtctccaaaatgtaaagattgttttttttttttctttttaaattattcacaaaaagcagctggaaatcagaaaggcagctgccgctccagggtctcaaatccattaaaaccaccacagaacaattaaaacaatcagagagagaaaaggaaaaggaaacaacgtccaacatttggcatttggttttatccacaggttttcccagagctcctcttggaattgaaagcaaaatatattggcaaacactgcttctcaatacacaggaaggggagcctcagtgcctcctgccaacagaggcggctctgtgcagtcagactgtggggtgcacagcagtctctcaggctggggtttctggcctctttccatccaatcaccccttccaggaaattcagcagcctaccagacactgggcctctgcctggctgccctttcccccaggcagagcggccttgggcataataccaggcaacctgccagccccagagcagaaaccctgctgggatcccttccttcatcaaccttggtgtggaggatgctcaatagcgcttccacctccccctccccagcccctagctacatctctccacccttccctggacagtcctacttcccagctcacccacccaccagcagcttaagtctgggtgggatctatcatcagctcctccccctgtaacctcttccctccaca

SEQ ID NO: 238987 - DNA, 779 bp, Homo Sapiens
ctgcctggggccagcagcctgatttagcagctaatgaagcccagcttctgaggaaaattcagttgttgtgcctcatggagatgactttcacacgacctgccaatcacagacaactcacttttgaagaaattgccaaaagtgctaaaatcacagtgaatgaggtggagcttctggtgatgaaggccctttcggtggggctggtgaaaggcagtatagacgaggtggacaaacgagtccacatgacctgggtgcagccccgagtgttggatttgcaacagatcaagggaatgaaggaccgcctggagttctggtgcacggatgtgaagagcatggagatgctggtggagcaccaggcccatgacatcctcacctagggccccctggttccccgtcgtgtctcctttgactcacctgagagaggcgtttgcagccaatgaagctggctgctcagacggtcgacattgaatttgggtgggggttgggatcctgtctgaagtacagactgttcttgctctaaaaacaggactgtccctgatgggagccaggccacagggaggaggcttctttgtgggtctctcctgcagagggtgggggtctcagggttttaggtgatacgggagagaaggaacgtgccaggcaggaggccccctgaagtctgtgtactccgaggtggatctccatccccatccacctgtacggacatcttttccgttgcggtttgagaatgttcctataataaacccctctgctttgtaaaaaaaaaaaaaaaaaaaaaaaaa

SEQ ID NO: 238988 - DNA, 631 bp, Homo Sapiens
caaggggatgctgcctgaccccaagaacgtgcacatttttgtgagctggatgattgcccagagtgtgacggcagtcgcagggctggtgtcctacccctttgacactgttcgtcgtagaatgatgatgcagtccggccggaaaggggccgatattatgtacacggggacagttgactgctggaggaagattgcaaaagacgaaggagccaaggccttcttcaaaggtgcctggtccaatgtgctgagaggcatgggcggtgcttttgtattggtgttgtatgatgagatcaaaaaatatgtctaatgtaattaaaacacaagttcacagatttacagtgaacttgatctacaagttcacagatccattgtgtggtttaatagactattcctaggggaagtaaaaagatctgggataaaaccagactgaaaggaatacctcagaagagatgcttcattgagtgttcattaaaccacacatgtatttggtatttattttacatttaaattcccacagcaaatagaaaataatttatcatacttgtacaattaactgaagaattgataataactgaatgtgaaacatcaataaagaccacttattgcaaaaaaaaaaaaaaaaaaaaaaaaaaaa

SEQ ID NO: 238989 - DNA, 821 bp, Homo Sapiens
ttttaagctgagcatactgtaatagtcataagtttaatttcattataataaaaataatcaaacaaaaggactttagaacccaagacaatgagctagttttccctaaagtttgctgaactattaaggaatatgttcttatagcttttgactagaatgagtcatgggaattctaagaagggatggcctagacatttttagctcagttaaattcagcatttaatgcaggtgagttcctgggtcgttttccaactagtctggaacagtctggttctgactcaaactggtataaagcattattttaggttttctctttgccagtttttaagcagttataaccatgtaaatcaagatgtgaggacatctatatgaagtatagtaaagaagtggtgtcagcagatcaatatgtgtgtcctgggtgtgctgctctcttaagtgagactttgtgagactatactttaaatgcattattaccattgcttacattttgggggattttcttcctcctcaaaacttccatttctattgtaatattcttaatgacaatctttttttttttttagcagtgtatgtttgaaacagccaaagatggcgatgaaccaagtgtaaattgatctaagcagcccatgcagtttgtgttgaatcaacaaacagtgtattgttgaagtgaaattattttctgaaatgacttgttagaccagttttgaggacatactcaaaagtagagtaataatggctcctgggatggagaaatatgagatgaacctggaacattctattatggtgccacaaaggaaatctaaaaaaaaaaaaaaaaaaaaaaa

SEQ ID NO: 238990 - DNA, 588 bp, Homo Sapiens
tatatatatatatattgtttactactcaccacagatctgcaggagttcactgatctctaggatctgccttaactccaacttacatgttttggtcactattacaaactgtcatcccagaatgatgctgcagaggctagggctaggacacagaccagtgtttccatgtgggaattccctcccagtatttcttaggaaatgtatgttttttgaatccataatccctagaaaaatcagttgaggaaatgagaagtattgtaattattctgtgaatagtaacacttaccattatggagacatcactagtttgaaagaatccaacttcatcaaatattaacgtaccgagttgaaggctacaagaactgagacaggagcatagcagagagaaacggtcaccatctcattagccctatttttggttgttgtgatgccattacatctgtatatctggccatatcagctgctaatggtgagttcttgcaaacaaaatgatttgataaacaacctaccatactttatacaaatcttatggtgttccgagaaataaactttggaagcaaatttaaaaaaaaaaaaaaaaaaaaaaaaaaa

SEQ ID NO: 238991 - DNA, 632 bp, Homo Sapiens
caataatgctttgccatatgagttttttaaagtaacttgttcaatttactcacgtgttctaaacatctttccattacatgttctgtattttaatacattgcatattgacaactaggttctataatgtatgctttgaaatttacttttttatagtttacaggaattttattttttgtgcctatttctttttacacctatgtgaaccactatggaacaacttaaattttgtgccataaaaatatttttgtggtaaggtactatttttttagctctagggatatatcagcaaaaacacatcatgcaatttgagacacataattttgtgttgaatgagcacaacataatttgaagcattgcaaggagataaccagacagcagaattaaatggtcctgtctttttcatttttaatttattgtcatacatgggtttcatatttataacggcatcatgagctcattgcacttaatacctgcaatgtttgctactgtaccacaattgattttcaatactttattacgaaggatgaaactgtaatgttttattaacaatgcttctggaaatgaatgcattttaaagcaaataaatctttttgatagcccttttacaaaaaaaaaaaaaaaaaaaaaaaaaa

SEQ ID NO: 238992 - DNA, 603 bp, Homo Sapiens
cctgggttgcatacttactactcaggggctttccccccagctttcagagcactgaattattgtgagctggtgactctgcaggcctgagtggtattagggttgtggaatgttgttgcatacacgtttatgagttaaccactatttaaatgatgctgctttttaaagttttttcaaagtacaatagatttttgaagtttcaggtaactggaaaaatctttaacttttgctttaagtgtttggggcaggataaaacaacatagaaaatataaaacaatttttgctttgaaaaatacagtgcaggtgaccgtttactgcttattctgtaatccttactgtctataattaacttcagtaacactgaaacttgatgaaaagttttaaaaaattatttactgtagggacaaagttatatggaatgtttgttattttctataccatctgaatgcactgccagtgaagactgtaaagacagaacacactattttggagggaggatactaattgtttaaaatttttcatcatttgtgagtgataaaaaagtttgtatagtttttataataaatcccctattttggaaaaaaaaaaaaaaaaaaaaaaaaaaaa

SEQ ID NO: 238993 - DNA, 869 bp, Homo Sapiens
  misc_feature (45)..(45): n is a, c, g, or t
acctcaggtgacctgcccaccctggcctctcaaagtgctgggatnagaggcgtgagccactgcgcctggccaagattcattttaattgtgtatttttctttaacccaatatttccaatgttaacatttcaacatgtaatcaatacaaaaaattaggagatatttaaccttttattgtcctttagagcacatctcaatttggactaaccatatttcaaatgctcaacagctacatatgggtagtggctactgcactggacatcgaagttctagaactctctcttacaaatgaacactatcactgtcgttgaaaactttcttgagatagtttattttatacaaacaaactgtatttcttattattcctgaaatatctcatattggcatcctgccatttcattgtagtgcctatcatttttccattgatactgataaagttgcctaagacacaacttcctacatagaggaaataagaggaacaaaccccttttggacagaatctattaaaactcattccactatccctatgtacataaataacattgcctctgctgagtggaatttgcattcgttacttcaaaattcagactcatctacctttccaagttagacagttggggaaagaacttcctaaatcttaaggttgaaggcagagggctcaaccccactccagattcaggcaaggggaataggaaagaaagtgcgagataagagcatggtggcctcttggggtcccttgatgggggctgttgggaagtggaaggcattcttttaaggggataagaagcaaatggaagacttgctccaactctagagttttcagagagttagaggaggtggagagattttcccggaattccggaccgaaac

SEQ ID NO: 238994 - DNA, 742 bp, Homo Sapiens
aaatttatgtcgtgtgtgtgtgtgtgtgtgtgtgtggttacccattttttagaaggagccgtacagaagaaaaattattctacattatgtaggattgctgtttgcattgccattttgcataagaaagtaatttttgattttgaaaatctcaaaacttttagatctgaaatacagccatgtgatcgatcatattctaaaggctatttaaaacatgtaaaaggatttggggaacggcagaaaacatgcagtttgggcatttgactgacttggaagtctaagcttattttagttataactattaaaatcatttttaaaaatttgttagttttgctgacagagaaaaatcgtcagttgtcagattttgcacaccacaataaatgtaccaccacacacggaatatgctaagaaaactatcagatagcgtttgatacactagtcattgtctcaatcactgatcctgtaagttgtcatcaaaatatgatttagaaatattggccaaggtgttgctttaactgaggagaaaagaaagcacactgcctaaatgtgtaaaagaaaaatgcagaggttattaaaatgtaaagaagtaacaatctttggatttgtctatacatatatatatatatatatggctttgccttaatatacccccttttttgtttgtgactttcaactgtaatcagttaataaagtatttattctctgcattcaggttcaaaaaaaaaaaaaaaaaaaaaaaaaaaag

SEQ ID NO: 238995 - DNA, 881 bp, Homo Sapiens
  misc_feature (62)..(62): n is a, c, g, or t
tcagggacaatgcagtagccacttggcttgtggaatttactgaaggctatttcctgtaactngctagttaacttagttttgtatttcaggcagaggtgcgctctgtaatgttgggcctttgacttcacagtactggagagctgttcacacagatgtttagacctttctctctctctctcttttcttctttctcaacaactctttcacagaggcagtcattttgaaaggttgaaatatttggcctttaccaaagagctttttttttccttaagcaaaatcctttcagaaagaaacaaatggggagggcagattaagaatgcatatgtcccaatccacttctataggagtttaatcatattcacatgagtaaaatgatggaagaactctttaaggtaatcctttgggataaaggatcctgggaagttctctcaggtaaagaaagcttacagcagatttgtaatatatgtctggagagctatttataagaaatttaagaggattgttttgttttcctttattaaagatttaagcctttttactttgcaaaaagaaaactacaaaagttttatagatataactttgctaattttttaaacttttctgaaacgattagctgtagccaaattatgtggttacgttttgctacattagaatttgaaaatgcaatatgtgtggtaaatctactgtttgaaatttataatggtctctgatatgattcgaattttggtaacttttgaaagttattttccccctttagtcatggatttctatttgttttttaatgttaatttttctagaaagcatctgaattgactaggcttttcctatataaaaaactcaaaacttgttaactctgtactttaataaaatttaaaattaaa

SEQ ID NO: 238996 - DNA, 832 bp, Homo Sapiens
  misc_feature (38)..(38): n is a, c, g, or t
  misc_feature (127)..(127): n is a, c, g, or t
gagacagctctcaagtcagtttagaaagtttattttcncagggttaaggtgtgcccatgacacagcctcaggaggtcctcaccacatgtgcccaaggtggttggggcacagcttggttttacacatnttagagagacatgagacatcaatcagtatgtgtaaggtgtacattggtcttgaaaggcaggacaacttgaagaggggcgggggcttcaagcataggcaggtaagagagaaagggttgcatttttttgagtttctgattagcctttcactgaatatacaatttacatgtgagaggagagtagaggaatagtcagttataccttaatctggcttagtgaaacatgaaacagagaaagcaatcatttatgcatttgtttcatgtgaagactttgagttctttgtccataaggaattcccttgtgagcaaattttatctttgtggctgtcttatttaggaataaaatgggaggcaggtttgcctcaatcagttcccagcttgacttccctttggcttagtggttttgagatttttctttcatataaccttagtataaaattcatccttgatagtgtttatccctaaaagacattttcttcattcaattcattcaaggtagaagataaaaatcaatggctaaatgatgttgtcttgctctaatacagtctgcagtctggtttgttcgttggctgaataaacatgggagctgagagctctggagaaatacagccatttactggctgtgaaatctcaagttaactactctaaaatcgcttcgattatgaaatttagacaataattattaaaatgtcattatgagttcctggt

SEQ ID NO: 238997 - DNA, 806 bp, Homo Sapiens
acagccagccggcaaaccaagtattgagatagcttctctgactcaactttatggagtacctccacaatgtccaaagtgcaaccctgaaacaaatacacagactttatttatgcacaaatacactttccagcaaagacagaagtgatttaaaatcacacaacttcctggggcagctagtgtccgtgtacttcggacaggaaggtggaaagtggtgtaaggggctgggtcacaggattaaggcacaagaagctcaccaacaaggagctaggtaggaaggaaagcgaggaagagagggcttaaaagaggaagagaagggtaggagactttgagggagaagcaggaggcagctcagggaaggggagctggcctcagatcatgtgcaggggtgaccatgccagatgtccccaggcctccattggttcagctgggcctgctccagaggaagaagttgcaccgggaggaggggtcagtgggaggaccccggggcctggcacacatgtagaagcggcggcccaagttgggtcctggcttcttcacagtacgcatcacacatggctccctgtggcccccacagaggggtgtgcgcaagggccccgccagcacagacttccagaatgaggtccgtaactccttctcatctttggcttctgaagtcttggcctgccccttcaccactttggccactgccttctcttctggagtcttcggggtcatgagggcgctcatcagtggtaggctaggcagctctatgtcaggagaggcttggggacagctaggggagggctgaaagtagctcttcaggtttt

SEQ ID NO: 238998 - DNA, 736 bp, Homo Sapiens
ggagctggctgcggaggtggaggttcaagacggccccaatgagaatggggagatgttcatgcggccagggaagctgttcgactatttcccaaaaccataccccaacagtgaggctgctcgagctgccaacaacggagcattgccccctgacctcagctacatcgtgcgagctaggcatggtggtgaggactacgtcttctccctgctcacgggctactgcgagccacccaccggggtgtcactgcgggaaggtctctacttcaacccctactttcctggccaggccattgccatggcccctcccatctacacagatgtcttagagtttgacgatggcaccccagctaccatgtcccagatagccaaggatgtgtgcaccttcctgcgctgggcatctgagccagagcacgaccatcgaaaacgcatggggctcaagatgttgatgatgatggctctgctggtgcccctggtctacaccataaagcggcacaagtggtcagtcctgaagagtcggaagctggcatatcggccgcccaagtgaccctgtccagtgtctgcttgccatcctgccagaacaggccctcaagcccaagagccatcccaggcctgttcaggcctcagctaagcctctcttcatctggaagaagaggcaagggggcaggagaccaggctctagctctgggccctccttcagcccccatcatgggaataaattaattttctcaatgtaaaaaaa

SEQ ID NO: 238999 - DNA, 712 bp, Homo Sapiens
cttccttgcatgtggccaccagccatccctgatcttgtccccagaggcccaggcagcctgtgatggctgtgaggggctgtcccactgtgtgggtatcccttacccagcacttaaacttggcaggagaggcagggcaaccctcacagggagatgggagggcacccaactcccacaagcatgcaacagcagtaggaattgggggtctgccccaggtgggtgagaccaaatgagtggatttggggccacaggctaggcaggagagacaaggggtaggtgggagggtcccccagtccctgctgaccccagtgtgtctccccggagatggctcctagctgagtgggacccggcaggagttggggacagtgctgtcccccacccctgcacacagccaggccctcaggctctgcggtcactcgcctccctgctggtcactggtcttggtctggagttatattttgatgccatgaagacactgtttatatctaatgtttatatattttaaagatttgtgccaagagagtatatttaataaaaacttaaatgacttcttctcctgctcctggctcttctttggttctgaccgcccccccatcttcccccatgaacccccaaacagggttgaagtgcttttgacacatttgtgataaaagttctgaataaaagtcttgaataaaagaagtttttaaatgcaaaaaaaaaaaaaaaaaaaaaa

SEQ ID NO: 239000 - DNA, 769 bp, Homo Sapiens
acagactgcacagggcatggattacttacacgccaagtcaatcatccacagagacctcaagagtaataatatatttcttcatgaagacctcacagtaaaaataggtgattttggtctagctacagtgaaatctcgatggagtgggtcccatcagtttgaacagttgtctggatccattttgtggatggcaccagaagtcatcagaatgcaagataaaaatccatacagctttcagtcagatgtatatgcatttggaattgttctgtatgaattgatgactggacagttaccttattcaaacatcaacaacagggaccagataatttttatggtgggacgaggatacctgtctccagatctcagtaaggtacggagtaactgtccaaaagccatgaagagattaatggcagagtgcctcaaaaagaaaagagatgagagaccactctttccccaaattctcgcctctattgagctgctggcccgctcattgccaaaaattcaccgcagtgcatcagaaccctccttgaatcgggctggtttccaaacagaggattttagtctatatgcttgtgcttctccaaaaacacccatccaggcagggggatatggtgcgtttcctgtccactgaaacaaatgagtgagagagttcaggagagtagcaacaaaaggaaaataaatgaacatatgtttgcttatatgttaaattgaataaaatactctctttttttttaaggtgacccaaaaaaaaaaaaaaaaaaaaaaaaaaggg

SEQ ID NO: 239001 - DNA, 823 bp, Homo Sapiens
gtctcaaactcctaacctcaagtgatccgtccgccttggcctcccaaagtgctgggattacaggcgcgagccactgtgcccagcctacaatcatgatttctaattccaaaaatcagactttctaattctcaggtagatggccaaagctgattttcaagttttgtgtctttttaaacagaagaaaatgaaccttattaaagctgaatgactcattcaaggccatatagctggtaggtggcagaagtggggtttgaacccgtttttcttctataccacacaccaattactgtatagaaaaatagctgaattgctcctattagccaaatttcatttttaaaaccccacatgtggtttattattctgttatggcaatgtctatgttgcatattaataaaaaagaaaatccttgtgtttagaaaacagtgttatcacagataacaataagctattcttgttcctagttccaatgattttgaacctatttctcagaacaagaagccctctgattcaaatatgaaacagtattctatttcgtcacaaagatctgaaaccccatttttgagccatctctgtatataataagaatccagcctgcatttgtcagtgatagagagtacagtaaataagaagtccctgaagaggtcagagtgttgacaaaattcaacatgatggtggagtccacacaaacacaggaaacaaagctcggcctttccatacagccgtctgtccttggaatggcttcgttttaagtcaacgtctcttcatgccgcacatattccccaatgtctgcttgatgaaataccacaatcgccatggatcccgg

SEQ ID NO: 239002 - DNA, 851 bp, Homo Sapiens
tcaaggctacccaagcacatgggcaaaacacttaaaaaatatgaaagattatttaagtaaagcaaaatgaggaacagaagaagacagtttagattcatgtacacatacatatattttatttgggtatattacctcagaaaatcaacaactgtcattttcaatcttatctcaagaccaaccttcagaaatgctagtaagtgctacagtaatattaacattatattgagtttaaaagaaattaatatatttaaaatcagtctaaggttttaatgctgtatacccattttcataatcattcaaaaacatcaggccgggcacggtggctcacgcctgtaatcccagcacttcgggaggccaaggtgggcggatcacctgaggtcgggagttcaagaccagcctttggagaaaccccatctctactaaaaatacaaaattagccaggcgtggtggctcacacctgtaatcctagcactttgggaggccgaagcaggtggatcacctgaggtcaggaattcaagaccagcctggccaacatggtgcaactccgtctctactaaaaatacaaaattagccgggcatggtggcgcatgcctgtaatcccagctactcaagaggctgaggcaggagaaccacttgaacctgtgaggcagaggttgcagtgagccaagattgtgccattgcactgcagcctgggcaacaagaacaaaactccgtctcaaaaaaaaaaaaaatcattagtagcgttctctgtcagtttattgtggaaagaaatcaagtaaacaaattctcaaaaagatttgcttcaaataagagaacactgtttaggtggaagatctccttttcaatcccgg

SEQ ID NO: 239003 - DNA, 509 bp, Homo Sapiens
gaaaccatgttgtacatcctgatttaatcatagtgagtcaccaaaagttcttgatacaataaccatttatgagtaccttctgtgtacaaagcactttactaaggataccaaggggtaaattttcagtaaataaatatccaataagtagtacctatcagtaaatatgatcttgcctcctaatttaccttcgcttcctagtcacagtcactgttttggaggctacttgccatggcataaatttatataaatattgccaggaattcattgtatcagagttgaagttttaaaactaaggattctgatacttgtctaagctcatgattcatcagaaagtcatcctgtctattcaacttgcacttttcttgaagattatcacttgaatctcaagaaaaatatttcaaggcctcagcatatctgaaaatgccagccattgagttcaatgtcctgattggagtgatttgggtacaacttggccaaaaaacaagagtacaatttggcaaaaaaaaaaa

SEQ ID NO: 239004 - DNA, 554 bp, Homo Sapiens
cagagcaggcaccgccattctcctttcctcctcactctactcctgtcgttgtgattacagtttaggcattatctatctttgctgcgggaaatgctttattaatcttgcagtcctgtgtccatgtggagatgtggttctgccatccaaccagataggaagacagagcagaaaaagttgctggagaatttcatgaaggtcaaatttagaaaaaggacaatttggttcagttaggtgctttgcacactgaggaacatgcagagaaatcacttgctttatgggtttggattgggaaattatctatttatgtaatcacactgctttgaaagggaagggaattaattgctttaattaactccagtaaagactagattgtcacagggggagtgttgataaaatgtgctttgagtgatctgatacgctcttggatatagtggctggaaataatagctatctctgtaatcaatcattttcctttctctgggacctcactgatgatgttcctgccataaactaggctgcctagagggtcaaaaaaaggaaaggtcaaaaaaaaa

SEQ ID NO: 239005 - DNA, 503 bp, Homo Sapiens
caagactctgaaaaatttcggggtacctctcgcctaaccaagaggaaaggtttaaaaaaaataaacaaaataaataaaccaatacacctagcaaagcagacgccttgttttccagaacctcggactccggcagaaagaggtagagtaaaagtgctgctagattcagcttcaccttcttccctccatccttttctcttgcattttctttttccccaaaaacatgaatctggtttttctttctatagactgagtcagagaaagcgttaggaagaagccgcaactaatgtctgtgaagggaggaccatgaggcgagagtgaatacgattcgttccgctgcttctgactcatccggcagatcggaacacctgcatttctggatgtgtcattcccgtatgtcgaggcgcctccagaacccgaaataatgtgtagacagacctgtgtctaacatcccctcggagggagctccccggggtaggagcccctggctggaccgccgcggccgc

SEQ ID NO: 239006 - DNA, 524 bp, Homo Sapiens
ttattatttcattgaaaagaactgtcaagtgaaatactttttagcacagtaactggctttgtgggctctagagaagagttaatgaggcagtgcatgttcttggcccagagtaagtgcttagtgaatgctttctaactccgaaccccagccacatccagggactgggtgttgagcaaaaggggccttcaagatgttcaaggcacttggattttctcctgtctctcatcggcttttcttaacgggcctcagtgggtgcatgtgattatccacgtttcacctatgaaacatgaacagaggagactgacttatcagtgattcttccgcgggttcggacagggcctcgattctgttttaaactccagtagtccctagaaattgtagctccctctagttgtggcaataggtgtgggtccttgtgcttgcttttggcaagtttctgagctacacagggcctccattaccgtcactggtgaaatgcggctcacctcccagatttgttgtaaagattaaatgaactggtcagc

SEQ ID NO: 239007 - DNA, 499 bp, Homo Sapiens
aaagaaaggctttattgctgcaattagacatcccagtgtatagcacaaacccccctgtacagagaattattcaagtggtaatactgagaaacagtgaacacacacaaaagaatacaaaactagacatttagatcactagaaactttctaaggtaagaaaaatttcaaatgtgaagtgccttttagaaactacaccacacatgccagtgtaaatttggtttaacaatcaatttctataaacattgcatctaactgtgcactgatcaactgcacaacttcaacaattacttccaagacaaagataaatgcttttatttccctatgttttggtctttccttgggctagagacagaagctgcatgtttcaaaccagattcaaaagggaaagcacttcaaaacagaaagtacttcaattgtgtatttgccttcagccacatccagagacttgtggatctcacccggttggtcccagcccttctccaaccctgaagcccacagca

SEQ ID NO: 239008 - DNA, 423 bp, Homo Sapiens
gcaagttaaaaagatttattgctattccaggcttcaaatgagcccagaactcagggctggtgtgtgtttcagaagttgttatgatgtaacagggtggtagaaaaatccaggcagtttgatgtcgaggccaccctctcttccttggacccctgctccaaaagcagctgctggtgaggctctttcccatctgcctcattcacccaacaggactccaagactgaggcaggcagccttgtgatccccacagctcacaggtgagaggctgctcatacctctcctagcactggaagagccttgtccttgggaccggacactatggctttggccctgtggagggagaaatggtgccacaggagttgtcttaagaggacaaggcatgcacggtctgagatcagaggttgtgacgtggccacccatgagcca

SEQ ID NO: 239009 - DNA, 485 bp, Homo Sapiens
cagtcagcggcgagatttgatcctgtgggctacagtttgccgaccccatgcatgaggcagtaaaaggccaagagcctggtataaattcataacgagaaaccaaggctctgaatcagccccgaagtgtaagcagcagcataatgatctggagcagcatcttggcgttattaaattcaacccattccgatggctgcgtcagcatctattgctctgtttattgtttttccttaagcaagcagttccatttctagaaatttatctcaagcacataaatctagagggggcacatcggtgttatttatgacgggaaaactgggaacagacacagccctaggctggaagaggcacagagtgatgtacagcatgggccagtggttaggagcagactcaggagccaggggacacggctccaattctagctctgtgaacacactggccgtgtgccaccctcagcaagttacttaatctctctctcttagggaaaa

SEQ ID NO: 239010 - DNA, 343 bp, Homo Sapiens
ggggtgagattcaggctcaggtctaggggttggggaatattaaagtttacaagtacaatcttactccatccatacacacacatggagaagccaggagaggacgcggccagagatgggctcctgccctttaacccctgtgggggtggaagcaggtgcacaatgcttctttgagtatctccgtgtctgtggctgatatccaaatgcaaggctttttccgggcatccctgggaatgggagggcataaacatactggtcaaattacagcccagcctctacccctttactgaagatggaaaactgttttccaaagttgacttgcctaacatgatgtaactatcatgca

SEQ ID NO: 239011 - DNA, 556 bp, Homo Sapiens
ttcagggaccagcggaacgaggctttctgtcgttaataggtctcccctctgctattagagtgaagcaggagttccagcccagccagagttaccgctatggcaactggtatgcgcgacagcacggctcttaccttctttctggccacagctatggctgtgcagtggatggaaatggaaaggactgtttttctgcgcatgagacccctgaacacacagctggaactttggttaagcctaaagtacccccttgtgccatttgcctgccatcctgctgggtgtcccctgttgggaagctgctgagtgaaattaaagatggaaaccacacctttagctgaaaaccaagatgaagacccactagaagatccacatcttcatttgaatattgaggaatcaaaccaagagtttatggtgaaaagtgaagaactctacgactccctcatgaattgccactggcagcctttggacacagttcactccgaaatcccagatgagaccccgaagtgaagcaaggtgttcattaaactccgcaattatcatactaaaaaaaaaaaaaaaa

SEQ ID NO: 239012 - DNA, 386 bp, Homo Sapiens
ccaccctctaagaccagagccagtgtcctattcatcttttgtctctgcagcgttcagcatggcactgttcttggcttacaaaatctgctctatgcttgctgactgctgaatgaatgaatgaatgaataggtagtcacaaagaatgtttagaatgtttctcagacaggctgagaaaaaacacaacgaaacattatttccgtttggaaagtttttttatttttgtgttcagtactgaagtaaaacaaaaatctgaataacagctgcaccgttaaaaatgaaattaccaatatatgaactctaggcatcatgcatatataattttttgtagataacttttcttctcattttccttctcattctcttcatctttttctttttgtttgagc

SEQ ID NO: 239013 - DNA, 410 bp, Homo Sapiens
atatttggtaacaaaggccttcatgctgttcccggaagtcgccaagttccatccatcattgttaataattccttttgctcgctcctcgcacaagaactgtttcttctgcttagtgctttgcctactgattccatcttgtcatttaagtctcggctcaaatgtcacctctgcaaagaacccttgtctgaccatacatctaaaatagccacaaacactctataaagacttggccttgctttatttccttctcagcactcatcactgtctgaaacaatgttttggatttgttgcttattatcagtctcccttctcaagaatgcaagctttgtgagggcagagtcgtaatcttttttaaggctgtatccccaatgcctgggtaagtatacaataaataatttttgcatgaaaaa

SEQ ID NO: 239014 - DNA, 513 bp, Homo Sapiens
cttgctaatggtagtgtctttgtttgcttgggtcctttggccactggacagcctaaaaatacgaactatgatagatctgtgatctatgataggccagaaacttccagaactagaggctaaagttaaaacctgacttctgggagggtgtggacctaagatcagccacataggtcatctgtgattgtgtcccagtaaagtaagaaagtacacatatcaaaaaataaatttcggctgggcgcggtggctcatggctgtaatccagcactttgggagaccaaggtgggtggatcacgaggtctggagatcgagaccatcctggctcacaccgtgaaaccctgtctctactaaaaatacaaaaaattggtcgggtgtggtggcaggtgcctgtagtcccagctactcgggaggctgaggcaggagaatggcgtgaacccaggagacggaaattgcagtgagccgaaatggtgccactgcactccagcctgggtgacagagagactccatctcaaaaaa

SEQ ID NO: 239015 - DNA, 589 bp, Homo Sapiens
gtttttctaaggtggagccatgatggcaaattctttgcaagaatgaccctggatacgcttagcatctatgaaactcctgtaagtggcctcagtgatggcaaacgccccgtccggtccttgcttgtaaccggggtgtggtgcctttccttatttgtgctagaagaggaggaggaggtttcacagatgcataggaaaggcctgtctcctgtgcctttttaactgcccctgctctgggcagagctcttcagtcactcctgcccacctggcgcagccgtgggaagtcctggatgggagttaatgcagtgggcttcagaactgcagttctgggtggcgggtgggtggatgggttcactgtcacgctctgtgtgcactgccccctaggcaaactcacatcagactcttgtttccttttgtaaaaagttaggtgtgtttctgagacactgacatgatttgactcaactgcagccttccttttttttgggcagtctatgggtcttttggacaagaagagtttgaagatctctgggataaagtgagtattcttatcagtttggtgtcttagtgtgttcaggctgcttaacacaatacc

SEQ ID NO: 239016 - DNA, 636 bp, Homo Sapiens
tggcaaaacaagagcaaaaagcacttcctcccatgaccttacagtaaccatactgattgaatccccagggacattccatcattgcaatagctcagatttttcttcctttttctttgcacaccagctctactctttagtaaaattgtaaaaggctgccattatggacattaggtatcccaacataaccatctggagtgtgtccagtttgttcttcataggaccaatttttatttgcagcttgagtttttatatgaagttgcattattgtggacttggctgtcttgtgatgaatttttttcatatgtattctgtgccatactattgttaaaatgaactgttgctattgtgagatggattttaactgacctattaagggtttctttcgaatggcactactttagggacattctagtatttgcttctattgtttgggccttgtggataatgtacagatttaaaaacaaatcttgttgctgatttgtccatttctttccctgcactttgttacatctgggatacagtctaactcatctgatttaatatgcatttaaaaaaatgccataactattaaacaccttgtttacagacagatgaaataaatttattccacccaaaaaaaaaaaaaaaaaaaaaaaa

SEQ ID NO: 239017 - DNA, 478 bp, Homo Sapiens
acaccaaaacacaagtagcagttttttgttttgttttgtcttgtttcaagactctatcacaaaaaaaaaaaagagagagagagagataaagaggtatattgggacaattagtcatctttcctacattttctctttttttcagagcccagaatccttgcatacattttctcattctaaaatcctacctatttagtttgtagaaatgatttatgtagtaatcatagactgctaaaagctagaactccggcctccttttacagacagttactaaggcttagaaacatccttcagcttttcagaggttgcaacatacaactggtctttttccccagcccagttctctttcactgatagggccgttcatcttttcctattccttaaaccccctttcaagtgttaagatttaacctcttgttctagtattctagtatttgaagaacaaatttatttcctgttacacacttcaaatacatttaaa

SEQ ID NO: 239018 - DNA, 521 bp, Homo Sapiens
cttttttactttcacagcaatagtgcagaatccagaatggatgtcctctttgtagccatctttgctgtgccacttatcctgggacaagaatatgaggatgaagaaagactgggagaggatgaatattatcaggtggtctattattatacagtcacccccagttatgatgactttagtgcagatttcaccattgattactccatatttgagtcagaggacaggctgaacaggttggataaggacataacagaagcaatagagactaccattagtcttgaaacagcacgtgcagaccatccgaagcctgtaactgtgaaaccagtaacaacggaacctagtccagatctgaacgatgccgtgtccagtttgcgaagtcctattcccctcctcctgtcgtgtgcctttgttcaggtggggatgtatttcatgtagaaggtggaagaaggctgctatgactctttggatgggagtctggcaagaggaaattggaagataaaataaataataagtgaaataataaa

SEQ ID NO: 239019 - DNA, 670 bp, Homo Sapiens
gctggtaaagttggaagaataaagttaaccaagcaggccaggcacggtggctcacgcctataatcccagcacttagggaggccaaggcgggcagatcacctgaggtcaatagttcgagaccagcctggccaacaaggtgaaaccccatctctgctaaaaatacaaaaaattagccaggtgtggtggtgtgcacctgtagtcccagctatttgggaggctgaggtgggagaatcacttgaacctgggaggcggaggttgcagtgagctgaaatcgcgtaccacactccagcctgggtgacagagcgagactgtgtttcaaagaaaaaaaaaaacaagcagccttttgcttggttggaatctgattttctgttgcgtgttccttgtagccatagatgtgattatgtccacaccgggctgccttaatctgtcctgcttggagagtgacttgtaagatgctgaattattcatgataatacagtgaatgttctgggtccatgtactcagataaacatgaagaaaataagcaaagaaaaatggagactgggaaagcaaagctgttttcatcctataattgaagtagtgtggagcattaacttgtggatgattcagagttaaaagataaaaagacgccagagttctcgctgaaaaaaaaaaaaaaaaaaaaaaaaaa

SEQ ID NO: 239020 - DNA, 657 bp, Homo Sapiens
gcattttttaaattttttttttaagaaacgtcaaagttgtgcccaacactgtggatcagcaaacacgatagaggagaccagtcagtacttcttggagggggcaggaggagagaggaaaagggagggcgagaatgaccacacaacacagccttggaccatgagcagaagcgtccgtgggaactccactggggtggatgggctgcctgcacagcccctggagagggggccaggcacaccctcagaggagctgcaagcccgtggcctggcctgctacatgccctgcttccacgtggctgccacgctgacacacccacattcaccaaacccacccgcgccctgggacgcagccacgccaggaggaggacacggccgccgagagcaaggcacaacctcgagttcttggggcgcagagaacttaggagagaagcacggaggagcccccggcagagcacccgcccccgggccccagccttccacctgtgctagcagcctggggcctccactctggccggaggaaggaccgcaggcagacagcctgggcctctaacagcttttgtccggagctagacttcgtgtcctttcagttggtaaatggttttctatagaatcaataatatttctttctttaaataaaaaaaaaaaaaaaaaaaaaaaaaa

SEQ ID NO: 239021 - DNA, 717 bp, Homo Sapiens
tggggcccagtcttgctcattctagagagagctaaagctcactctgggctactgggtggcacctcatttcaattctcttgcctgcctagacacagtgggcctccttgaagagtgaggacttgctctgtgcagacttgagccatccatgaatattcggttagagaatttaagtgtggaaacactgggttctggtttaagccaaataatgtgtgctgacctctgtacatgaagaaatgactgattagcgattaggaagagctttccgatcaagacggtaaggagaaagctagcagtctaagacagttgtggcccatcaaatctttctgaggtagccatgaatagtcacacaatcatccaaatcaaacagtagcaccagcttgacagaaacaggacagcagatctcagcagggtgggctcatctctatggacccgagggctggggtgacgagtgtccggtagtctagcccaaatgagactccaatgtacaacttgacaggcaaaggggctcaggccttccttcttcagaccattcaggtttgtgaggtgactgttgtgaggggcaggggagggcaaggggcagagtggcaggtgccaccctacaggcttttcatacacacctggcagcgactgactcgagtgtggagctgcccagctttcagcgtttcagacacaggcaactccccaaactgctgcctctcctccactgtggtcaaccag

SEQ ID NO: 239022 - DNA, 691 bp, Homo Sapiens
tccctaaagcagtgcagcaccggcccagggcatcactagacaggccctaattaagtttttttttaaaaagcctgtgtatttattttagaatcatgtttttctgtatattaacttgggggatatcgttaatatttaggatataagatttgaggtcagccatcttcaaaaaagaaaaaaaaattgactcaagaaagtacaagtaaactatacacctttttttcataagttttaggaactgtagtaatgtggcttagaaagtataatggcctaaatgttttcaaaatgtaagttcctgtggagaagaattgtttatattgcaaacggggggactgaggggaacctgtaggtttaaaacagtatgtttgtcagccaactgatttaaaaggcctttaactgttttggttgttgttttttttttaagccactctccccttcctatgaggaagaattgagaggggcacctatttctgtaaaatccccaaattggtgttgatgattttgagcttgaatgttttcatacctgattaaaacttggtttattctaatttctgtatcatatcatctgaggtttacgtggtaactagtcttataacatgtatgtatcttttttttgttgttcatctaaagctttttaatccaaataaatacagagtttgcaaagtgaaaaaaaaaaaaaaaaaaaaaaaaaaaa

SEQ ID NO: 239023 - DNA, 684 bp, Homo Sapiens
gagcagttcacggccatgttccggcgcaaggccttcctgcactggtacacgggcgagggcatggacgagatggagttcaccgaggccgagagcaacatgaacgacctggtgtccgagtaccagcagtaccaggacgccacggccgacgaacaaggggagttcgaggaggaggagggcgaggacgaggcgtagatgcccccgcgagacgggttagggaaagcggaggaggaaagcgagggggtggggggcttcccgggacgataacctggcagtggaaggaaagaagcatggtctactttaggtgtgcgctgggtctctggtgctcttcactgttgcctgtcacttttttttccttttttgtaatattgatgacatcaatgtaacatttgagatatttctgaattactgttgtaatggctaaaatcacataaacgtttgtgtcggaatggtgtcctctctttctcttcctttttctctttattaacgatttaaatgtaactttctgaacacattgcattgaattcttcctttaacaaaaagcaaaggcgtaggtaaaagctcaaatgaatttattctttcggtatggtaaaattgaaccaatcacagttaagatgagagatcaacctgagttttaaaatacctttaataaatattggtgaaaaaaaaaaaaaaaaaaaaaaaaaa

SEQ ID NO: 239024 - DNA, 600 bp, Homo Sapiens
taatgaggactatcattaaaagactgcacaaaaccacaccttgcacaaaggccatcacaacctgacacacacaaaaaatacttttatgaggacatttgcccagcaactccctgtccaatgtccaactggcaacatccttgttattgatccttgtagccaaggataattctctcaaaacaatcatttttgctttaaaaaccgttgtcttccttgacctcccggtatatgcacatagtttactgtggcacttgtattcttattgcaatgcctactcctgaataaacatcattttctttcagagagtctccctctctgttatttaggctgacaaggatatgccaagaagtagcttggatatagcagttaattctgcctttaggatatgtgtatggggatataagagttaattaaaagctgacctttgagttggtccttgaataaaagaagaatagattccaaaaataagaggaataaataatgatcctgagctaggagagtacattttgcagacctttggtttccatattaagaaattcagatttttatgtacaataaagaagttctggaattcaaaaaaaaaaaaaaaaaaaaaaaaaaaaa

SEQ ID NO: 239025 - DNA, 724 bp, Homo Sapiens
gctggacaaggggattaaagtcatctcctatggagatgactatgccgatcttccagaatatttcaagcgactgacatgtgagatctccacaaggggtacatcagcagggatggtgagagaaggtcagctaaatggctcatctgcagcacacagtgaaataagaggctgtagtacatgagcgagctagagaaatcaccaccgtttagaccaagctgtaaggccctactacagacagtgtttaacaagtaaacttacaagaacccaacacaattcccagaaagtaacaatagccagaggttgaagggcggggtagaagaggggggaatgttgcagcgtaatccttcataccacctggttcttgatattctgccgcctgttcaagttcaagaataaaagcgacagcaggacccaaatgcagctcccaacccactccccaggctagacatgcttgtgtccacacagcacaccaatgtgatacttccactgaccggctgcagctctgcatgaaggactcggggtctggatgccatggaatcactgtggctcttgttgcagttttgtactctatacttggtttttcaattaagcttaatggcttttttaaaacatgacttgaagctctagttttctagatcttttacagtgtacagtattttacataactaagctgtattaaaagcttgttcatttacttgccaggaaaaaaaaaaaaaaaaaaaaaaaa

SEQ ID NO: 239026 - DNA, 583 bp, Homo Sapiens
agacatacccagaagagcaccaaagaaaccattgacaagagctgaagtgggagaaaaaacagaggaaagaagagtagaaagggatattcttaaggaaatgttcccctatgaagcatctacaccaacaggaattagtgctagttgccgcagaccaatcaaaggggctgcaggccggccattagaactcagtgatttcaggatggaggagtctttttcatctaaatatgttcctaagtatgttcccttggcagatgtcaagtcagaaaagacaaaaaagggacgctccattcccgtatggataaaaattttgctgtttgttgttgtggcagtttttttgtttttggtctatcaagctatggaaaccaaccaagtaaatcccttctctaattttcttcatgttgaccctagaaaatccaactgaatggtatctctttggcacgttcaacttggtctcctattttcaataactgttgaaaaacatttgtgtacacttgttgactccaagaactaaaaataatgtgatttcgcctcaataaatgtagtatttcattgaaaggcaaaaaaaaaaaaaaaaaaaaaaaaa

SEQ ID NO: 239027 - DNA, 742 bp, Homo Sapiens
tgaaactgctaatattagcttgtcataattatggccataaactaatttttctataaaagacgtggaagaaagcttaagtaaacaataaaataaaacctatacactattttaagaaggggcttgagcatgacccctaaagctacatgtaaagttcttgtacaaaaaatggaatgataggttgatcagattcagtaaagttgatctgtatgcattttcccatctcaagcatataagttgacctgcatctctggaaggaccttgagattgatgcattttgagcaggtctcccttttactcttcccaactgggaacttggagctgaaaaacattggcactgaggccagatggccttgggtttaatcctggctcagtgcctcacagattgtgtgactttaggcaaacatacttctcctagctgagtattttttatcagtaagtacaaatacaatgcagagctcattttcagttaatattagtactttttaaatctttactctctatcttgaagcattagatgttaagactaatgtgtaaaaaccacgtctgagcttgcttttccctctggacactctgcttttgattgcctatccctataagtggctcattttactgtcttctgatcctggtggccttatttttgctatgttaaggttgtgttttttaatacttggatttattttcatatacttacataaacccgtggtgattgcccataaaaaaaaaaaaaaaaaaaaaaaaaaaa

SEQ ID NO: 239028 - DNA, 692 bp, Homo Sapiens
agtcacttaaggggggaggtaatatgcttgtatgttacattgacattgctctgcatgtctctactgggaaatatttggatttcaatgatagcttgactggttggacattgcatcaaatacacgccccatgtatcctttctgtcgtaaagttaagaacgctcttgcatttgatgtggaataaatatagatgatattactatctgctattctgcctttgttctgaaacaattgctttgtcagctaatttcattcaatatttgttttttagacgatctctataagttattaatttaacctgaaaccaaagtggtctccatttaaagttacttaatccctttgtaccacctatttctagttaaatatatgttgctacgcaaataggtaaagtgcttccttgccatgatggtaatggattggaactatgaaggctctcagtgtattggcttctgtaaagatgaggcgtctcctcagaaacaaaacttttcacatttctgcttactagacctgggttgatgtacatggtaagtctcaaacagatgcaagctatgtgcaaaaagtaactttagccaaatggaaatagctggatgctttgagaattacttggttgaagtaagaaaactgtaccatcctctatcctgtgtgccataataaaatagtaaaaaccctaaaaaaaaaaaaaaaaaaaaaaaaaa

SEQ ID NO: 239029 - DNA, 764 bp, Homo Sapiens
tcaagttttcgttagcaaaaacggagagattaaaaagaaaaaatctagcactggcaataaggtgaggctcaagggatatactgtgatttatcatcaaggactttattctcttggccactttgcagtcatgctagaagtttccagaatccctagtgcatatggtgtgcaaaagtcaaaacgtaagaaaagaaaactcctcccttgagagtgaagtctacagaaatgcaggccagaaaggtgtaaggtgttattccagtctgccgccgctaaggccgttgggatcgacgcgaaagatctcaatagtactaagaaccaaaaccagtcaacagttctgtgaggaagtctgacgcacggaatagtaggacttttcacacacaaaggacaaataaaccaagagttaattttggctaccaaactgcaatttggttttctaggtcattttcccccaactatttaaaaagaaacattagtgctacacatatgcaactttaagatgctggattctcctatcaagttgcactgagaagcaagtgaaataagcccctcggactgccgtccacctgcacagacgtcacatccattttctttgatttccattggcaacagcgggaaataattccaatagtgctgaagtaagcagccagtctgccttgctgagttcacctggtttccttcttcatcttcttccatctggctagggcaaggcataaagaatagacgtatatattttaaatatagttgagtgcatgacagtgtgtatgtgg

SEQ ID NO: 239030 - DNA, 481 bp, Homo Sapiens
gagggggaggttgcggtgggctgagatccctccactgcactccagcttgggcttcagagtgagactccatctcaaaaaaaaaaaaaaagaaaagaaaagagtcttagctggatgaccttctgtttcctcattataaaatgggcagaaaaccctctttggaggctgctgtatcagacatcatatgttcaagtggctggcatagagcctggtccatgatgggcactcaacttttaattatcataattattatataatgcatcccaaagccagtgcagtggtgtgtatctgtagtctcaggtacttaggaggctgaggtgggaggatcactggagtcctggagttcttcctaagttctcaaataggggaataacaccaagcctgaaaggaagaaattgatggacagagaagcagctcatggatcctgagcatgtgggtgctggtgaggatgtagggtgtggcatcgaaaaggctggcactaatt

SEQ ID NO: 239031 - DNA, 757 bp, Homo Sapiens
actggaccgcagatcattaccttgaaccacacagacctggttccctgcctctgtattcaggtgtggcctctggaacctgactccgttaggacgaacatctgccccttcagggaggacccccgcgcacaccagaacctctggcaagccgcccgactgcgactgctgaccctgcagagctggctgctggacgcaccgtgctcgctgcccgcagaagcggcactgtgctggcgggctccgggtggggacccctgccagccactggtcccaccgctttcctgggagaacgtcactgtggacaaggttctcgagttcccattgctgaaaggccaccctaacctctgtgttcaggtgaacagctcggagaagctgcagctgcaggagtgcttgtgggctgactccctggggcctctcaaagacgatgtgctactgttggagacacgaggcccccaggacaacagatccctctgtgccttggaacccagtggctgtacttcactacccagcaaagcctccacgagggcagctcgccttggagagtacttactacaagacctgcagtcaggccagtgtctgcagctatgggacgatgacttgggagcgctatgggcctgccccatggacaaatacatccacaagcgctgggccctcgtgtggctggcctgcctactctttgccgctgcgctttccctcatcctccttctcaaaaaggatcacgcgaaagggtggctgaggctcttgaaacaggacgtccgctcgg

SEQ ID NO: 239032 - DNA, 548 bp, Homo Sapiens
ggctgtggcgctcccgcgcgggtctccgggccctgttccgtagccgcgatgctgcgctatttccaggctgcgagcggggacttcactgctctgctgtctcctgcaagaactggctcaagaaatttgcctcgaaaaccaagtaatgcggcgggggcggtgtccctgggcgcggtattccctagggggcggtgtccccgggttgcggtgtccgctcatccgcgttcttgcgcccatgcggcctagctcgccagttcctgcctcctggggtctgcagcagttctagctctcactgtcaacatttgcagcttttgtgttcgtggacgtgtgtcgggttaagaaaacaaagtgacaatgtgtgtttattttgattcttgtcaccagacgtatttttcagaagattagtttcagaaaatgaggaaaaatgaaaaaatataagaatttccttgctaatgttgactttctgtgtgaatttgaagactaaagcttgtcatgataattagtgtttttaaattatgaaagataagtacaataaaatacattgacttttc

SEQ ID NO: 239033 - DNA, 617 bp, Homo Sapiens
  misc_feature (11)..(12): n is a, c, g, or t
  misc_feature (29)..(29): n is a, c, g, or t
gatgacagatnncccaagggaagggacanagctattgttttcccagcacatacaaccatagctttcagtgtttttgaactcttcatatacctggatggtgcctttgacctttgtgtcacttcagtgtcaaaaggaggatttgaaagggaagaaacggcaacatttgcactgctgtacaggttgagaaatatcctatttgaaagaaatagaagagtgatggatgtcatttctcgttcacagctttacttggatgatcttttttctgactactatgacaaacctctcagcatgactgatatttcactcaaagaagggacccatatccgagttaacttacttaatcacaacattcccaaagggccttgcatactctgtggaatggggaacttcaaaagggagacagtttatgggtgctttcagtgttctgttgatggtcagaagtatgtgagacttcatgcagttccttgttttgatatttggcacaagaggatgaaataaaatgaaaaatgaataccccgtgttggtgttttaggtgcagttgtgccacaaaccttccctaaattatctaggtttgctttgatgaattaaattaaaatgagaaaagcaaaaaaaaaaaa

SEQ ID NO: 239034 - DNA, 630 bp, Homo Sapiens
gaagtagtagcaagacatgcttagtgtgtatttctctctttgagacactgtaatttctaccagaaatttccagagcattatgtaggtagaaaaaaatgcaagcaagctgttaaagatcttggatcccattatatagtatgtatagctgaaatctgtaattcaatcactttttctcttttatcctctaaccaaaaaattgtttaattttgcatcccaaatgtttttaatctttgtatattttttaaaaatccttttctcctcatcattgccttttttgtggttgtaaatagacttacttgcactttgaagatgagttactccttgtcatcttacaaatatgtgatatggtaattttcataacagatgtcagttttgaaccaagaattggtgatttgtttataagaaaaaaactggcttcatttctgtgaaattgctctttgaaaatttctttttacacgtgtaagccaactgagataccgtgatggtgttgatttctttcaatgatgcttaccatctattttagccactgagccttttattatttgtctatttgtaaagtttatttgtcttaactcatttaataaatatactgtttatctgtttctgaaaaaaaaaaaaaaaaaaaaaaaa

SEQ ID NO: 239035 - DNA, 769 bp, Homo Sapiens
acataaaagcaccactgttctgttcatttcctagctgttctaattaagaaaactattaagatgagcaaccacatttagaaatgtttattgacaggtcttttcaaataatgcttttctaattaatagccaaagatttcatatctaactttgtaaccagaattatacagtaagttgacaccacttagatttaaaggcagacagttttgctttagtacaatagtatacattttataatgatgaacttataatgattaagggacatttctataaaaatactacaatagttttatgcacaacttcccattaaaaatgagatttcttatttgtttgtctgtttttactctgggagtaatactttttaaattacctttacatatatagtcactggcatactgagaatatacaatgatcctggaaattgcagtaacaaaagcacacaacgattatagtaactataagatacaataaaacaaataaatgtgaaagtagattcatgaaaatgtattcctttaaaatattgttttcctacaggcctatttaacaagatgtttcattttactgtatattttgtagttaatataaatgttgctctaatcagattgcttaaaagcatttttattatatttatgttgttgaactaatatatgaaataagtaaatgtagctcccacaaggtaaacttcattggtaagattgcactgttctgattatgtaagcatttgtacatcttctttggaaataaaagataaaagagcgataaaaaaaaaaaa

SEQ ID NO: 239036 - DNA, 716 bp, Homo Sapiens
ccagaccaacctggtgccctacccccgcatccacttccctttggccacatatgcccctgtcatttctgctgagaaagcctaccacgaacagcttactgtagcagagatcaccaatgcttgctttgagccagccaaccagatggtgaaatgtgaccctcgccatggtaaatacatggcttgctgcctgttataccgtggtgacgtggttcccaaagatgtcaatgctgccattgccaccatcaaaaccaagcgtaccatccagtttgtggattggtgccccactggcttcaaggttggcattaattaccagcctcccactgtggtgcctggcggagacctggccaaggtacagagagctgtgtgcatgctgagcaataccacagctgttgccgaggcctgggctcgcctggaccacaagtttgacctgatgtatgccaagcgtgcctttgttcactggtacgtgggtgaggggatggaggaaggcgagttttcagaggcccgtgaggacatggctgcccttgagaaggattatgaggaggttggagcagatagtgctgacggagaggatgagggtgaagagtattaacctgtgtgctgtacttttacactcctttgtcttggaactgtcttatttttgttctgtaaatgtctattgccgtaaattgttaataaaattgatgtttcccttttaaaaaaaaaaaaaaaaaaaaaaaaaa

SEQ ID NO: 239037 - DNA, 728 bp, Homo Sapiens
attaatcatggtcattcattcattcattcattcacaaaatatttatgatgtatttactctgcaccaggtcccatgccaagcactggggacacagttatggcaaagtagacaaagcatttgttcatttggagcttagagtccaggaggaatacattagataatgacacaatcaaatataaattgcaagatgtcacaggtgtgatgaagggagagtaggagagaccatgagtatgtgtaacaggaggacacagcattattctagtgctgtactgttccgtacggcagccactacccacatgtaactttttaagatttaaatttaaattagttaacattcaaaacgcagctccccaatcacactagcaacatttcaagtgcttgagagccatgcatgattagtggttaccctattgaataggtcagaagtagaatcttttcatcatcacagaaagttctattggacagtgctcttctagatcatcataagactacagagcacttttcaaagctcatgcatgttcatcatgttagtgtcgtattttgagctggggttttgagactgcccttagagatagagaaacagacccaagaaatgtgctcaattgcaatgggccacatacctagatctccagatgtcatttcccctctcttattttaagttatgttaagattactaaaacaataaaagctcctaaaaattcaaaaaaaaaaaaaaaaaaaaaaaaaaa

SEQ ID NO: 239038 - DNA, 637 bp, Homo Sapiens
tgtgtagccatagagggctgttatgaggattcagtcaaatgacacatgatgtcttgggcacacctggcgtggattatggcgcctgtaggagcaggagggcttcctggaggagggggctagttgaacagagtctagaaagtatagattgggaagagcactctgggaggcaggatcaccatgtgcaaaggctcagagaatgccacccactacctcctggaaatcaaggggattctgtgtgtccaagggcattggtggtctctaggcccccgacctgtgtctgggaggtgtcaaggggaagccagatccgaggcccacacttgcatgttttcaggtgaggtccagagatatatccagagaggagtggaagggctcggagacctacagccccaatactgcatatggtgtggacttcctggtgcccgtgatgggctatatctgccgcatctgccacaagttctatcacagcaactcaggggcacagctctcccactgcaagtccctgggccactttgagaacctgcagaaatacaaggcggccaagaaccccagccccaccacccgacctgtgagccgccggtgcgcaatcaacgcccggaacgctttgacagcccgttcacctccagcggccgcttaataa

SEQ ID NO: 239039 - DNA, 590 bp, Homo Sapiens
tggcttggattcatttcatgtttttaatataagaatgatctaatatttttttaaagtaatagctatcagtaatagctgagtgttttttcccctaatattttccttgtgcaattcagacttaagcatcgagtttttaccatcttccactttaagctaagttatgatacctattccattcacaattggtgttctttttaaggtttgcaaatttcagccaattttgtagctaagattgttctgatcagctcaaaaagatttggcttagtgttttcattgcaaattataattgctgtagagccacacacaacttttgaacttttaattataagtgttatggctaaagttatttactgaaaatttcagtaaaatgtgtgaatgtttctttatgtattaacctcatagcagtaaatgacttgctgttgtttaatttttctaaggcatcttaatagacttctgttgaaaacttcagtgttaacatttttatagtttgtactaaatttaaccgtgatataaaaatgaattttatgcatagatcagaattttaaattaaaggttttttctttaaaaaaaaaaaaaaaaaaaaaaaaaaa

SEQ ID NO: 239040 - DNA, 530 bp, Homo Sapiens
ccacccccacccactgtccgcaggactcgctgagcggagtcgggggagacgtgcaggaggccttcgcacaaggtacgaggagaaacctccgcaatgacctgctggtggcagctgactccatcaccaacaccatgtcatccctggtgaaggagctccattcaggttagcagaggagccggacacagaggaagctcaggcacagaggacgaggagcaagctggcgccgacatggcgaaggcaaggtcttcccccagaggcacattcctctccatctttccaccgcacacctggaccaggcttgcaggctgccagacgtcactccacccgccagggagaggggagccagagccggtgggaagcggggaggggctgcgtggcacagctagtgggcctccccctgcacagccctgcatgtactagcaccttcatcactcccctcagggcatggtctcatctccgcatcaggaattcacctggaggttgaaaagagaaaagaaaaagccccaaaaaaaaaaaaaaaaaaaaaaaaa

SEQ ID NO: 239041 - DNA, 593 bp, Homo Sapiens
agcatgccatcactgctggggatgaggaaacggtgatttcaggactgttttttctgtctcttcagtgcctctttcagtgatctgaggttaaaaccagactatggaggattcatcaacagaccaggaagcaacagcctgggctccagaattgaccagtagtccgtgcacagacgaggagaggtcccatgaaacttcggcgcagtctgggaaccgagctctttttgtaacaagttgtttgtcaggaggcccggtcatgaaagcccttcctgactgggctcaaggaatacaaaaaggacaacttgtttttgccattgtctgttgtttttcaataactagttctccgaaacagcactggatgaatgcctcaaggggctcacacaactcgttccaggacttagtgaccattgtttctgtccctgttcaatagagttcaaatttaatatttaaattttgctccacaatgtgccatattatctgtatccaacctgtcattgggcatttaggttgattccatgtctttactattgtgaataatgctgcaataaacatttacgtgcttgtgtctttaaaaaaaaaaaaaaaaaaaaaaaaaa

SEQ ID NO: 239042 - DNA, 725 bp, Homo Sapiens
tacaatatagtgcagagctggggagtgctcattggagactctgtagccattcctgagcccaacctgcggcttcaccgaattcagcacaaaggaaaggactattccttttccagtgttcgagtggagacgcccctcctgctagtggtgaatgggaagcctcagggatccagcagccaggctgttgccacagtggcatcgcgaccacagtgtgaatgacctttgacttgcatgctcaacagggagtggaggagaggagacaaggctctggacagccggtccagccacatccagtgattcagcagggatgggaggaatgttttaaatgaagactttctctttccctgcctgtattacacttcgtatctcttctctctcctctgtcctcatcatgttccagctctctacagggccacatactcttctggcatatctctcctgtctcttccactgctctctatgttttaagcaaagagcatggaattggtagaagtcttgggatcttgccatgggacagagtccccaaggttcctgttgttgcctccttcctaagcctcatatgtatatatcagttcagtatttattgctaaaggagggggcttaattttgtaatggcttttatttttagcaatttttatttttatttttgaactttaggtccttcctcttctttggggctggaacagaattaaatttgttggaaaaaaaaaaaaaaaaaaaaaaaaaaa

SEQ ID NO: 239043 - DNA, 730 bp, Homo Sapiens
atcccagtttcttgagatgctgaggcagaggaattgcttgaacccaggaggcggaggttgcagtgagccgggattgcgccactgcactccagcttgggcgacagagcaagacgctgtttcaaaaaaagaaaaaagttttttcttttcaggctttcttctagtcaagatgagtgataaaccagacttgtcggaagtggagaagtttgacaggtcaaaactgaagaaaactaatactgaagaaaaaaatactcttccctcaaaggaaactatccagcaggagaaagagtgtgttcaaacatcataaaatggggatctcctccaaagagcagatttcagcattgcctgacagtcttggttttaggcttgtttttttgtaaacctgtgtgtttgtagagatttcagacatcttctgatttcttctcacctatattccctggttaagaggtcaggggtagtgaatgtttccttaagttcctttttaaacttcccattggtatgtaaattccaaatggcagatgctgtcaataaccttgccatggatgacctttgtgtaggtagtccttgcacctcatgcaggataagccaattttaactttctacaatgggtgcctcaatagtttcataatcttcatgaagttgcatcctttggcagcttcttacagtttattttcacttccaatgtagcaataaaataataaatttaaaaaaaaaaaaaaaaaaaaaaaaaaaa

SEQ ID NO: 239044 - DNA, 716 bp, Homo Sapiens
gaccagcttgggcaacatggcaaagccccatctctacaaaaaacacaaaaattagctgggcattgtggcgcacaccttgtattcccatctagtcaggaagctgagatggaagaattaattgagcccacgagttcaaggctgcagtgagtcgtgattgtgccactgcactccagccggggtgacagaagagaccttgtctcgaaaaggaatctgaaaacaatggaaccatgccttcataattctagaaagttattttcaactgataaatctatattcacccaaataatcaagggtgaaggtaaaataatacatttttagacaagcaaagactcaggggttacctccatgtgccctttttagggaagctgttggagaaaatactccagcaaaatgaaggagtacacaaaccagagaatgacatgaatccagcaaataggatccaacacaggcaatattccagctatggagctagctttaaaaaggaacagtaaaaatattaatcggttagctgggtggaatggcccatgcctgtagtcccagctactcaggaggctcagcagcaggacgacttgagcccaagagttccagaccagcctggccaccttagtgagatcccttctcttaaaaataataacttattgccagatttggggcatttggaaagaagttcattgaagataaagcaaaggtaaaaaaaaaaaaaaaaaaaaaaaaaa

SEQ ID NO: 239045 - DNA, 672 bp, Homo Sapiens
taggttccaagaaggatctgagtacccctgctcagtatgcgctgatggagaaagacgccctccaggtggcccaggagatgaaggctgagtactgggcagtctcatctctcactggtgagaatgtccgagaattcttcttccgtgtggcagcactgacctttgaggccaatgtgctggctgagctggagaaatcgggggctcgacgcattggggatgttgtccgcatcaacagtgatgacagcaacctctacctaactgccagcaagaagaagcccacatgttgcccatgagggctgaggagactgttcagagactgcccagccctagggcactgtgccaccctcattcctccagagcttgacccctggacatttgcactgactttatccagaccaaagagctgcctcttggtggcagtattcccacagaggggtagctgggatcatgctagtcacttcctgcccccaggcaccgtgccaaagactggatgccccctactcctcaggggactgtccagggcgcccagtggtagtgagggagagtgtctctgttcttttgctcagcctgctgggccctttgtgtttgaggatgcttaatgattccagcctctcactgtgccttatgcattaaaatttctttgttacgagcaaaaaaaaaaaaaaaaaaaaaaaa

SEQ ID NO: 239046 - DNA, 765 bp, Homo Sapiens
agtgagacttaaggaaatgtttggttggcagatgagcaccaatgactgcagcgtggagtgacgcactgcatggtctgtttattctctaattccaatatgtcttttgcttccagaagcaagaaaagtttcttctctcccctccttcccacccttttttcaaaggcaccacaagtatagacagttgcactacatcaaatctttttttgacacttgtagaaaccagtacacttttagattagacagtatcttcttttaatattttgatttgttttcctttagtttgaaaagttgtataatacttaactgactgtagcaaagttttatatgtggtagcatacctttaatttatcctattacaaaactgttctgaattttcttttggtttttaaaaaacaaaacttgttgcttagaagccatgaattattttattttacttcaactgtcgaaacttccttgttttaaaaaatgatcatttgggttcactcaggaaatgcatgtcaggaaacttgtattataagtttattagttgtgatgtatcagtaactgctgttacccctttttcaaagaaatgtaattgattttgaagttttctagattgtcacatgctttgtgactaatgcaagaaagcaagtcctgtgttgtatttgttctagtcatttttattcaggctatatattgtagcttaatttttatttgcaattaatttatttaaactaagtaaatacttttcaaaatacttaaaaaaaaaaaaaaaaaaaaaaaaaa

SEQ ID NO: 239047 - DNA, 373 bp, Homo Sapiens
ttaagtctaccattaaatttgcctgtcctggccaggtggggtggctcacgcctgtaatcccaacattttgtgaggccaaggcgggtggatcacttgaggtgaggagttggagaccacaccagcctggccaacatggtgaaatcccgtctttactaaaaatacaaaaaattggctgggcgtggtggtgggtgccggtggtcctagctactcaggaggctgaggcaggagaatcacttgaacctgggaggtggaggttgcagtgagccgagattgcgccactggactccagcctgggagacgagggaaactgtttcaaaaaaataaaatgaaatacataattaaaaaaaaaaaaaaaaaaaaaaaaaaaaaaaaa

SEQ ID NO: 239048 - DNA, 603 bp, Homo Sapiens
ctcccagatgggctgggcctttgggccctcctcagagtatgcctgggtacaaacctcactgttcagatgggctgtaagttctcacttcaaagctatggaatggattttagcccctttaaaaaaaaaaaaaaactttgacttttaatttatatagtgatatgctgacaggctgacacgcagatggttttgtcctgttttctgcgttcagtgttgaggcggctgcttacaagaggcactggttttgtatataaagacactcgggttgttttgtagctctttttcttattggctgtactaacgcttgctgaggttatctgtaataagggaggtaacaagtggcaaccccctccccaccaaccatcccctttgctgctttctgtgtctttcttgttcagttaccaaaatagctgtaagcctatctaatgctaggtgtgtggacattgtgctaaggtagtttcagtgtgtcaactttatgaattgaaatataaaccagtaaaattgtattactgtttcttttgtgggttttattttaacagcatattgattaaatattttggtccaaccaaaaaaaaaaaaccaaaaaaaaaaaaaaaaaaaaaaaaa

SEQ ID NO: 239049 - DNA, 529 bp, Homo Sapiens
gatccccaacaacgtgaagacggccgtgtgcgacatcccgccccgcggcctgaagatgtcggccaccttcatcggcaacagcacggccatccaggagctgttcaagcgcatctccgagcagttcacggccatgttccggcgcaaggccttcctgcactggtacacgggcgagggcatggacgagatggagttcaccgaggccgagagcaacatgaacgacctggtgtccgagtaccagcagtaccaggacgccacggccgacgaacaaggggatttcgaggaggaggagggcgaggacgaggcttaaaaacttctcagatcaatcgtgcatccttagtgaacttctgttgtcctcaagcatggtctttctacttgtaaactatggtgctcagttttgcctctgttagaaattcacactgttgatgtaatgatgtggaactcctctaaaaattacagtattgtctgtgaaggtatctatactaataaaaaagcctgtgtggaaaaaaaaaaaaaaaaaaaaaaaaaaaaa

SEQ ID NO: 239050 - DNA, 786 bp, Homo Sapiens
attgtaggtcatttttttttcagcacagctctaatttttaaatatttggtataacagcttctggcatgtgacctagttaatgttgaaaattaactgatgaaaacccttgtagatctgctaaacttctctataaattgctagaaatatacagagcaatgagatatagaaaacaccttagcttgttggttattaatagagctctaattttaactgtgaaatcatggagtttctttaaatgttttcctagagtgtttgttatcatgaacattagaaatagcattattccttttcttctaccacatgtcttgaacattcacatgggttaaagaagatggaaactgatactactgacaatcaagctgctttctgactttcataattttctttatattgtggatagcattttgaaggtgaccgtgattctgtaggaagagctgtaatcaatatttttcaaactctaagagtacagaggttagtaagatttcttttttttttactttttgttacgtcaagtagcttattaagaaaaagattcatgacttaaattcttaattctcagttgatacaaaggcttataatcatgtgttttaaaattttgatttcattttcgttccttgaaggttaaagaatggaaactggggataaaaattaatacactgcagctttgccaaggtctgtgatatggttgtaaccttttaaagactactaaagtcataatttgaaatttttactaaaataaaacatatgtgtctatggttttcaaaaaaaaaaaaaaaaaaaaaaaaa

SEQ ID NO: 239051 - DNA, 702 bp, Homo Sapiens
cttgctttgtgaatttggctttgttttacttatacattaactcatgtaatctcttaaatcttacaagcattgatccatttcaacaaaaaggtaaatttaaaatgcagactttgttatttgccaaagaagattcatgaaaaatttacgtccaattattttgcaaatagttaatttcatttggctttttaccatgttccttcctttctttttcccgcttccttaatgtaatttaaaccctggcaaacattctttagaaaccaagaggaaagaaagaacaaatatcaaaaaagacatagaatttaatattgatacaatttcacctctaaaatggatttgaagaaatgcaactttatatcaaaaaatgtcatctgatttcctttgtttcttttttaaattatgtaatcagatgattttatgtttttttttcaggggagcggaatattggtttcttttacttgttgttttcagttttctctgccattcatgtttcttttttgtgttcagtgtttcaaatacaatttgtatttaaggattttaaaataccaaactgtaactgagtacagtggatcgttttctgttaggatgttaatattatacaatgaaatctataaagtgttgtcaatttgattattgacacatataacatgtttacaaataaactgtggtattgatcaagtaaaaaaaaaaaaaaaaaaaaaaaaa

SEQ ID NO: 239052 - DNA, 698 bp, Homo Sapiens
aggatgccatgctggtggacattgaagacttgaccagacatgctgaaagtcagcagaagcacatggcagagaaaatgcctgcaaagtgaaaagaagccattcaaccagagaacaagctagaatttattttgcttctgtggttgtaaaaatgctgttgctaaaggtggcgcagaaacaaatatcagtgttagtcattgataatgtctgaagcttaatgtccagtgattggcctttgcttcttaatttattttaattttttacttgtgccacttaatatcaggcattttaataaaatattgttacaaaaaatgtacagtactgacaccaccacaaatcatggttaataaaagagagtagttttaactttatttttatttgtttagagattttaagttggaacagtattttcccattgactacttttcattcttcactgtagttttaaagaagaactgtaaatgacggtgctatacaagtcaaaaaatacatgcctgcctcgtagtgaagttgtagctctccgtaatatgtatattttactcagttttcaacattttgtgaatgttgactacctgaagttcctttttagatgtgctattaacattctgttggattcagagggttccttgaaagttttatgtataaatatgtaaaataaaaattaaaactttgtttcaaaaaaaaaaaaaaaaaaaaaaaaa

SEQ ID NO: 239053 - DNA, 706 bp, Homo Sapiens
atgaacagctttctgtagcagagatcaccaatgcttgctttgagccagccaaccagatggtgaaatgtgaccctcgccatggtaaatacatggcttgctgcctgttgtaccgtggtgacgtggttcccaaagatgtcaatgctgccattgccaccatcaaaaccaagcgcagcatccagtttgtggattggtgccccactggcttcaaggttggcatcaactaccagcctcccactgtggtgcctggtggagacctggccaaggtacagagagctgtgtgcatgctgagcaacaccacagccattgctgaggcctgggctcgcctggaccacaagtttgacctgatgtatgccaagcgtgcctttgttcactggtacgtgggtgaggggatggaggaaggcgagttttcagaggcccgtgaagatatggctgcccttgagaaggattatgaggaggttggtgtggattctgttgaaggagagggtgaggaagaaggagaggaatactaattatccattccttttggccctgcagcatgtcatgctcccagaatttcagcttcagcttaactgacagacgttaaagctttctggttagattgttttcacttggtgatcatgtcttttccatgtgtacctgtaatatttttccatcatatctcaaagtaaagtcattaacatcaaaaaaaaaaaaaaaaaaaaaaaaa

SEQ ID NO: 239054 - DNA, 652 bp, Homo Sapiens
tcgttttgaagtttgggcctcagcagacttgcatatatttgactgcaattgcagcatttgcaagaagaagcagaatagacacttcattgttccagcttctcgcttcaagctcctgaagggagctgagcacataacgacttacacgttcaatactcacaaagcccagcataccttctgtaagagatgtggcgttcagagcttctatactccacgatcaaaccccggaggcttcggaattgccccccactgcctggatgagggcactgtgcggagtatggtcactgaggaattcaatggcagcgattgggagaaggccatgaaagagcacaagaccatcaagaacatgtctaaagagtgagcttctgcctctcctgccctgaaaaggaggaatgattggggccagcaactttgctctccctgccgtgcctcggtggtgctcctgaatgtggctgacctgggctgctggttccgttgactagggtcatcttgatctctgcagtttgctccagctaccagtttctttaggcagctctttgtcctccctctgcccagattttgatgtagtctaattgacatccttctcttcccaacttttgtgtgatcttttaggaaaaaaaataaatatttttaacataaaaaaaaaaaaaaaaaa

SEQ ID NO: 239055 - DNA, 866 bp, Homo Sapiens
gccagcatttggcaaataatttccaaaaaagtatgcatttaaaaatactttctttaatatgatacatcaggcacaatacttttcatatatattttttcttataagatttcaaatgcataaaatgtttgttgttattcataggatcatcaggtgtcagatgcttcattaggtaagaaactaaataatttcaggtttgtgactttcctcttagaacctttgacacggtaaaggttggaatgtgactcagcgtctcagatactgaggtcggtgctacattctttgtaaggtcgccttctctgctccgggggatgtctggaacttctgccggcatcctgtttcagattcgcctcttccctttctcggtggctggctctgtcctctctgttccttttgtccagggaccgctctctcctgcgctcgggggagcgtgcgcgcctccggtcggtggacttggccctgcgctcgggcgagccccctctcctgcgctcgggggacctcctctgctccaggagtctctccagagaccgtctccgccggctgggggagccgtctctcctgcgggtgggtgaccgctctcgcctccgctccggagagacgtctcgtctcttctcgtgcttctccctcctctccaaagtgttgtcggcgctgcgggtgccctccctccgcttctctggggaccgcctcttggggccgttggcggctgccgcgcgctcggcctgcgcgtccctccgtccctccggcgcccggtccttgggtcggcatgccccgctgtcgggtttcctcgaagtcccattccaggtgtggtgttcattgggttgtctgctatactctctgctgcctttcggatcccttgcgtgtgcccgctt

SEQ ID NO: 239056 - DNA, 715 bp, Homo Sapiens
gggctcaagcaatgctcctgcctcagcctcccaaagtactgggattatgggcatgagccactgccctgcacccagtcagaaatgcttctcttgaataagcagttattagaggaattaaacattcaagaaccctaacatgcccccaaacatcgtttcaagacttttaacaacttcctaaaatccttcaaggacttttggagacaagatctcactctgttgcccaagctggagcacagtagtgcaatcatagttcactgcagcctcaatttcctgggctcaagctatcctctcacctcagccaccagagtatctgggactacaggcatacaccaccacacctggctaatttttttcttctttggtagtgatgaagtttcgccatgttgcccagactggtctcaaactcctggactcaagtgatccacctccctcagcctccccaagtgctgggattacacacataagccaccgtgcctggccaaggatcttaatttttgaagtttattttccttgaggttattgaggacatacccgtgccagccatagaatagaaaagcagctcccaccttactcatgctcagcccctaagatatttataccctcattattctctcccacatcacacatgtgatttcctcaataaaagtgtacttaatatccaggtttctgctacagctggagtgctccaatgctcatccccctactggacgtctaa

SEQ ID NO: 239057 - DNA, 734 bp, Homo Sapiens
agcaaatgaccaagcatgaactaaaggtaaagatgtttacagattacttttcttacaaaaaaaatctagaagacactgtgtttaaatagatatttaaatgtttttgagatttagtaactgattttttagacactgcctatcgcatgaactgtaaagctgtgtgtattaggtgtaaaatatttataagatatatggactggggaatttgattattcctccctttgaaaaaatagtcctaataatttgaacaaatatgttagtaatgatggaacagatcaatgaaaagtagatatagatattgtgaaaataggctgtttaacaaacagattggaataaagcctattctaccagttaaactactttaatacacattcatttttaaagaaaatgtttgttttaacataaataaacaaatcgtatcagtgtttgtgaataaaatacaaaaatgattgttaatgattggtgctcttaaagtgagcttaaaatttatccaagacgtatatccaaatttgtcctgtagtaatagattaatattcatagattgttggtgtttaaagatctgaagtgtgagtagaatgtattcagctgtttaacatgtagtttagatattcaaaagtatgcatgtagaatttaaagaatatgttaaaaattattaattttaatattttgtttggaaaagccatgttataatataatgttttcactttaaaaaaaaaaaaaaaaaaaaaaaaaag

SEQ ID NO: 239058 - DNA, 757 bp, Homo Sapiens
gatgtgattaagacccggatgcagggcctggaggcgcacaaataccggaacacgtgggactgcggcttgcagatcctgaagaaggaggggctcaaggcattctacaagggcactgtcccccgcctgggccgggtctgcctggatgtggccatagtgtttgtcatctatgatgaagtggtgaagctgctcaacaaagtgtggaagacggactaagcctagagaggccgcaaggggaccgccccaggcaccgccagagtgtcctgctacctttgtctcacgattccagtgcagtagtgccaaaaggccccttcccacgtccctcgagctctgtagcctggtctgtgcattgtggctgtcaaatccatgtgtcccccctgtggtctgtgtgtgacaccaccactgtgtcccagtgtctggcccagccatggctggatgtgcatctggcctatgaccctgtgcctgtgtttcatgttctgtgtcacgtgaccctgtgccccgcctcccggggtgcccgtgtggcctgggtcctcggccctgtagccctggcccggtcccagtccggtgccttccaccctgccctggcctaccacagctgcctccgggcctcggcctggcttcaccgcattccaggggctgcagccccctgcttctcccgccattggccttaactggccctcgggccctctctccgccccggacagggtggcacccaccactctcaggaccaccctgccaaggcagaataaaccggatcctg

SEQ ID NO: 239059 - DNA, 627 bp, Homo Sapiens
cattccccgctgcccaatcatttgcaatgccctaattagggcatcctgcccctcgccttttaggctcaggacggaaggtcagttgccatggttaccgaggaccctggttactctggtgctgtcctgttttactggaccccgcctcccagccccaggggtgcctgtgggggtccatttgggtacgtctgggcccccactttcaccagtttctgcggccttccaccgggcctgaaccacagcggaggagctccgctaagacctccccacccccgctgggggtgggggcgggtgtccgtccggaaatgaaggaatagcccgaggaccgggctggggtttatttaaactgttctgtgtgggtctggggagggagagcaccttaatattattggggttggttggggtggggcaggatctcagccataaagtgccagtttgcttagttctcactgtctcctggtctgtgctgccctgctctggggatgcacggcggcagggtgggggagggaggttcctcgcaggtctcagcccgggacagggtcttgcaagcagcctcctgggcagtcgtaagggttgcggcgtgatgtcttcaataaattaagttttattggaaaaaaaaaaaaaaaaaaa

SEQ ID NO: 239060 - DNA, 730 bp, Homo Sapiens
aaaggactacagattatttttaatgactaaattggagtgatacttcttacactaaaaattatttcttaggcattctgaatctgggatgagaaacaggattgtttcacaatagtaagcacataatttttaaggccaaggcacatttgactcctgagatgaattttttgtggtcataatcaaatacttagttgtttttgatgccccaaaataaagtgagaatggtaatttgccaggaattcttcataacagtatcttacaaaaaacgtgttgctctcttcacagtattatgtgtaaagtcattgtttaaagcacgaatgttccctctggggtacttgttaaagctaaatttattttgcttccctccacttagaagtgctgcacactttacagcagcttcctttctttccatggcactgcctagttaacagaagtcttataaaaatttaaaaagacacatttcttacaaaaaagagttgaatgaggtaaaatggcattagatggctctatattttttaaagctatgtaattgttcagcgtcacttttctaagtacttatacatatctaaacatgtcttcatggtttatattttcacttatatatgctgggctggattaagctttgttgtgattgtgaccaacattcaggccacgtgagcactgtcttatcacatcgccaattagttgtaataaacgttcaacgtccaaaaaaaaaaaaaaaaaaaaaaaaaaa

SEQ ID NO: 239061 - DNA, 761 bp, Homo Sapiens
agctggtgcacattaagccggaccaatccaatgtgcggcgcatgcacactgctgtgaagctcaatgaagtcattgtcacgcgctcccacgacgcccgcctggttctcctaaacatgcctggcccacccaggaacagtgagggcgacgagaactacatggagttcctcgaggtgctgaccgagggccttgagcgggtgctgttggtgcgcggtggtggccgtgaagtcatcaccatctactcctgagcccagtgtcatcttgtggcctggagtcgaggtcttggccaggacataacaagctgtggtctggggtaacagcctcttcccagcacccacctgccagccctgcttgcctggccctgtcctggacccagctttgctaggtctccttggaaaccaggcctgggcctcaaaatggagatggatcccaggtcttgtgggaccctgggatgtttggggactttactatctagcaccccagtaggcctgtcctggccagagaagactggtaggggccgagtggggtttgaaggcagccggcccggcccagcccaggagcgctatttattgcatatttattgtttggatgtcaccatcagagacgaagggaagggtagccagggagggagtccagcccagctgcctgcaggaagatctggctcagtctactatgggcagggccccccaccaagctgagccgaatggagacagctgagctgaggcctgactttttcaataaaacattgtgtagttctgggaaaa

SEQ ID NO: 239062 - DNA, 808 bp, Homo Sapiens
atgacaaacactccagacatgaataaaaatgtggccaaaccttcaccggtggtgggacagctcatagacctgagctcccctctgatccagctgagccctgaggctgacaaggagaacgtggattccccactcctcaagttctaagccgaaccaaatcctttgccttgaaagaacagccctaaagtggttttcaaccctcagaaacaagctttaggctggtcgcagtggcttacacttgtaaccctagaacttgggaggctgaggtgggcggattacttgagcccaggagttcgggaccagcctgggaaatatagtgaaactcctgtccctacaaaaaatacaaaaattagccgggtgtggtagtgcatgcctgtagtcccagctacttgggaggctgaagtgggaggatggcctgagctcaaggagatgcaggctgcagtgggctgtgattgtgccactgcactccagcctgggcaccaatgtgagaacctgtcttggaaaaaaaaaaaaagaaacatgttttagtagaagttttatttgaaaaagaaaaataagcataaatatattcccagtgctggagagggtgggctgagggactggggccagcacggaccacccaaggcctctgcttcccgccgccaccctcctcgctgccattctctgggctggaatgtgaagcctcagtcactctaaatgaagaattttcttttgaatgttttgtatgtaaaatagcaagtggctatttttaaagttaagtttgtataaatagttagatattctagatttacattaaattgtaaaataaatg

SEQ ID NO: 239063 - DNA, 807 bp, Homo Sapiens
ctaattactctcagaggcatttaggcagggttgaaaaattcaagatattaatttcaacacatctttagcatcacaatatcacagtaatttaaatatattttagttgtagctatttagctcactttattgtaaataataattatgctaattagcaacgatagtatgtttaaccaattaatcatcagattaactttcggtcagaataatggacttcaatttttaagtcaaagcaatgtacaggcgtcccagtcaccatatttcacttctgaattccaagagagaaatggcgttgcgccttactgacgcaaatatgtacctagataaagtaagacgctttcatttcaggtatgtctaacccacgctatccttgctttgttccagggcactctcgcagggaaaacgccgcctctgactacacttggggtggttaagacgagatcttcaaatgaaaattctcaacgctaccgtccactctctcatacgcttgaattccgaacaccccaatactggccaaaagactccatttctcatgcttggtcttgcttttgaggtagctctaactcagaggcacgatttttagagcctgggaagtcggctgctgttcagtccttcctagcctcctcaggcgggagccgcggcccactcagtcagttgcggcccactcagtcagttccggccccagccccgactacctgtcgccttgttgggggaaggaaggcagataccgcagcccagtcagggtaagccgctgacccagaggatggaactgcggctctggagatagaaagaggaggacttcgccgcgtt

SEQ ID NO: 239064 - DNA, 705 bp, Homo Sapiens
aagtcagacttgagtgacagatatttccgagtggacgcggacgtggagaggttcttcaactactgtggactggacccggaagagctggaaaacctgggaatggaaaactttgcaagggctaattctgacataatatccctcaacttccgcagcgcaagcatgatcagctcagactgtgaacagtctcaggacagtaacagtgaccttagaaatgatgacagtgccaatgaccgcgtgccgtatggcatttctgccatcgaaagaaatgctagaatcatcaagtggttatatagcatcaaacaagctagagagtcacagaaggtctcccatgtgtaagacagtgcgtggaaaggagggagcgtgggtctctgtgcttacgcagttgtgaaggttgtgaggtctccttgaagtgttgtgagcttctccactctttgtgttgcttgttgtgcaatgttttcaagttgcatgcttgtcaacatggggactgacctggcttccacgtcaccatcgctacagagcctggctgaacacgcgtcatctgccaaaagtttcaggccagaatctaattagggctttgctcgtaagcaaaactgtttacatgaaaatggtatacaacttcttcgatatttatgtggttcttgtgtttttatatcccgcgctattgtgtcttaattaaaagttttatcaactggcaaaaaaaaaaaa

SEQ ID NO: 239065 - DNA, 850 bp, Homo Sapiens
agcctcttgagtggctgggaccacaggtatgcactaccatgtccatgcctggctattttttaattttttacgttgcccaggccagtctgaaactcctgacctcaagtgatcctcccaccttggcctcccaaagtgctgggattaccggcatgagccactgcacccagccaaaacctttaatttttttttttcttttttgagatggagtcttgctctgttgcccaggctggagtgcagtggcatgatcgtggctcactgcaacctctacctcccgggttcaagcagttctcctgcctcagcctcccaagtagctgggactacaggcacttgccaccacaccgggctaatttttttgtatttttagtagagacggggtttcaccatgttggccaggctggtctcgaactcctgaccttaggtgatttgccggcctcggcctcccaaagtgctgggattacaggcgtgagccaccacgcctggccaaaaacccttgctttttaacttcgattgacacttaacaaaaatcctccacatcccactttttgacagtttacattaaagcctgtggtctgaatatttgttttacttagagggggaccctttgggcaacttatttgcaaacacatctaaccttcctgggcttattccacagtattttcatagacctgtatatattagacatcacactgttctcttgggatttaaagtagtactgggtactgcatattgtgcagtaaatctggcttgctttcttaacctttttgctgccattctttcaaatatttttccagggcttaggggaaaccattaaatgatctgacttaacactgtcgtcttgccctccctccaa

SEQ ID NO: 239066 - DNA, 581 bp, Homo Sapiens
  misc_feature (17)..(17): n is a, c, g, or t
  misc_feature (52)..(52): n is a, c, g, or t
  misc_feature (139)..(139): n is a, c, g, or t
gagagcgccggctgcanagcgagcgcgagtgtcgacgcgtgcgacgcactanattgtgccgcgctcgcgcccgccagaccatgtcctcctggggaaaaagtttccctagtccccccagcaccgcgccccaccctacgcnccgctggaaaaaaaacagcaacataaaatcctaggcttgaacattctgtgcgtcccaaatttctaatgtcctcggcctgcccggtttgccgaagggagccgagtgtcgaagagaagtcgggaaaaggtaagttgtgcagacacttggggaagtttcaaggagaccgccagctcaagatggaaaccgcggcccgggcgctaagaacgggcttcagctcccgctggcaaaaagagaaagtcgagcccgccttcctgcccaacaaaaaacaacaacatgacaacaagaaccccggagggagtggaatgagtgacgtcacagccgcgctctgaggctgacaaaggagggggcgcgcccctcccgctctgcgcccgcgcggccccggagagggggcgcctgaagcgccgggtagggaagtcagccgacttgaaacttttcctcttaa

SEQ ID NO: 239067 - DNA, 818 bp, Homo Sapiens
gctagtaggactcactggtatagttaaattaccctacaattagtgattaattgaaactgcaactttctgggatattttcctcactatgaaaaatcaagtggttaagactgtggactttaaggatagactgttacttagacaagtaacttttctgtgcctccattctttcatctgtaaaacgggaatcataatagtattttcactccataagactgctgtaagaattaaattgtatgttacacattacctggaatgtggaaagcactccacaaattttgctcttatcattttcatcattaccattattcttgttatttttgtcatgcacactatgcaaaccaagggtagagtttactctttaagattagacgtggcccaaaaaatgtaagacagagaaagcagctgcagaatagcaggtaagagggatcccagacttgaccaaatagccagaactggctacggttctgagaaatctatggaagcagtcttgctatgggcggcagaggagagtgaaaacagtcttcaaaatttaatcgtagaataattctatcaaattaagccctttattagagctgaaaaaattgagtttaagagcacagctagtttagcataaagtgcagattatacagttttaaatttttgtttttattttttgtaaagacagggtctcactttgtttcccaggctggtcttgaattcctggcctcaagcaatcctcctgccttggccttccaaagtgctgggattacaggcatgagacactgcacccaacctataaagtgcagattatatagtgtttattctcagattgaaactat

SEQ ID NO: 239068 - DNA, 576 bp, Homo Sapiens
caacataagctgcttagcccagcgcccagtacctcacgcagacataagtgctcagtaaatgttgtctgtggtggggatggttgtcaccaacatctgaagtgcacttctaggtcatcaggtgacatgattggcgccaacacatggtactcttgatttagcacatctcagctgaggcacctcattgatatttgtttaaaaacaaaaacaaaaaaccttggtgattctgctgtgaagtcctggccagaaacctccagaccgctgatcaacacgcaacagaaccatcaccgttcacctctttgacatggtgccaggataccctggatctctagcttttgctatagttgctctaattagggaataatcttgtctttaatattcctttgctacattttttaacatttcttatctaaatggttttatgaatcagttttacagagaaaaaaaaccagtatttaaaatattcttccaggggctggtccaagtacagtagtgtttacaactatgtgatcacaaccagttacagatttctttgttccttctccatccccactgctttacttgactagccaaaaaaaa

SEQ ID NO: 239069 - DNA, 550 bp, Homo Sapiens
tcagaacgcatctgcggtcatggtgcatgtgtttttcagaatgcatctatggtcatagcgcatgtatttttcagaacgtctgccatcacggcgcacgtgtttttcagaacgcgtctgcggtctcggcgcacgtgctgcgatcacagtgcatgtatttttgcgaacgcgtctgtgattatggtacacgtatttttcagaacgcgtctgcaatcacagcgcacgtatttttcagaacgcgtctgtggtcacagcacacatattttgttccgtgcatttttcagcttacattttattgtatgaatatatattgtttctatgctattaaagggcctttatttaaataaatttgtatttaatctttgacctgcaatcccacagagtagaatggtgtccctaggtattgatcttagtgcttcaaagataaatataacttttatggtaaatattaacaaaacaatgattttattaacttttatattgcattgtgatacaatatatagtattactttatattaatcttaagtgttaataaaatctttaattagaaaaa

SEQ ID NO: 239070 - DNA, 502 bp, Homo Sapiens
gtcataagcaaggattttgcctgtgttctagattatctccaataaataaataactatgtacaaatattttgagtttacaaaatagaagaggaaaacctttgtcttacaaaagttacatttctatgatacatttatttccatacactgaagcaggatttcattcctagcttagctgaaccaaagaccttgcagaccctgtgtggcagtgtctagagctgtgtacctagccttttctaccaaagagcaaagctacacaaagaaaattcctcagtttcttgaaaataagggcctgacttggcctgctacttataactgatctatatttcatgtattccagaaaattggaagcagtctggaatggttgtcctcaaattactgagcagacacaccccctgcagatcttgttaaatatagattctcatgaactggatggggtggagcctaggattctgcatttctaaccagctcccatgggcagggcagcttccaattcttgttcagg

SEQ ID NO: 239071 - DNA, 500 bp, Homo Sapiens
aaaaaatgaaattcctttaactacaacaacgacaacaaagggacaagtacacagaaccaggcacttctgggaaacttgtcttctcatccctttgccctcccttcctccccctttagtaaagctggttgggcacatttgctaggatctgtgggtttcatcacttcaagccttactgcttaaaaaaatgaggtaagaaatttctatcggaaaagtgaaactgacacataaaccaaaccaaggtcttccctggctgctgcggcagccgttattgctctaagttggagtgttctgtttgcttttattatgtattcggagtccttattgccattctggctggcctcgtcgttggccaaggagaaatgatggggaaggagctcggtcgcctgctcccagctgctcagtcccaactttctgcccgcatgcggcccgtcctacccttgctgggagccagctctggttctggggcccccagggcggctctaacagctgggagaggtggt

SEQ ID NO: 239072 - DNA, 500 bp, Homo Sapiens
aaagaagagagaagaaggcccaacaaaaagaatttattggtgtctgataacagagaaatgaatcaaacaattgcatattcttttggggaggtttgtcaataacacgttaaaaggagaaaggtacaaaaatatttacaatatgactacaactcttacaacaacaaaaaatcctatacggaggggagaagtgacaaaatactccacggaggggagaagtgacaaaatactccagtgtgaaggaacttggtttagatgataggaaagtgattccttctttaaaaaaaaaagaattctatattcttttttatttattgagcaaggattttgcattacaatcgggaacaaaaacagacctttctgagaagagaaggggctcctgcagtagcctaggaaaatcacatttagaatccactcccgggatgtcattctaggctctgctgactacaacagcctgagtgaggaggaaagaggcagcagcagacagcggatgtggagcaagt

SEQ ID NO: 239073 - DNA, 501 bp, Homo Sapiens
accaaaataaaaccagctctactggtcttgtggaattgggagcttgggaatggatcctggaggatgcccaattagggcctagccttaatcaggtcctcagagaatttctaccatttcagagaggccttttggaatgtggcccctgaacaagaattggaagctgccctgcccatgggagctggttagaaatgcagaatcctaggctccaccccatccagttcatgagaatctatatttaacaagatctgcagggggtgtgtctgctcagtaatttgaggacaaccattccagactgcttccaattttctggaatacatgaaatatagatcagttataagtagcaggccaagtcaggcccttattttcaagaaactgaggaattttctttgtgtagctttgctctttggtagaaaaggctaggtacacagctctagacactgccacacagggtctgcaaggtctttggttcagctaagctaggaatgaaatcctgcttcagtg

SEQ ID NO: 239074 - DNA, 497 bp, Homo Sapiens
gcttttgtggctttaatacccttttggttttctgagcaagctgaatacattccctgataaacaccaccactggacaaaggatctaaacattgagatttttactaaatcaaggttttgagttggcacaatgttcctactaagtcaagtttcaattagcacatctttccaatgtcaggagaaaaaaagacaaggactactatgtcctacaaagaatggtgaaatattcctaaagctgtatatttatgaagaaaaggtgattgtccctttttatgcatgtgtagatcttgttttagccactatgccagaaaagtctcagtgtagaggtctacatttcagataaatgtctctgcatttgcctacattaagtttagctatttatcctgtccagaattataaccacagacattgagatgtagctctcagatctgaaaatgtctttattttttagaaaatggattccaggaaggttaaaaagcaacaccagagggtataggtgc

SEQ ID NO: 239075 - DNA, 500 bp, Homo Sapiens
caaattttaatcttcattgttttaattctgaagcataacgtgccacagggaaagtgagtttctttactgtttgccagcagcaaggacaaaaagtgaatggtgggggcccaggagctcccagcttggagagaaggcccttccagacccaggaacccggggtttggggcaggaggcaggaaggatgggagggtgtgatcaccgacacacacacacacgttctctctcttcagggaagggttttccagaagcatttgcccatactctgaatgaagtattttcatgccaagccaaacctcctgaagagaagtgaattcatggctgagggagccacgtgccctggctggggatgcacctgaacgctgctcttcagcaagtgagttcatagcatccaccagagcttcccagctcctcaagctgaagacaggctgagcaaaaaccaggcaggccatgaggggattcaaagaaacctaataggattgggtgcggtggctcacacctgt

SEQ ID NO: 239076 - DNA, 500 bp, Homo Sapiens
gtacagcgggagaaacacaaaatagtataactgaaaacattaacattcagacacactcccttctgccttccggcttaaagctgtggatgatccacgtttttgtttttttaatgttaaatgtgtaactcagtattactgaaaaggtacccacattttgaatagtagttatcactcttaggtcagacagccatcagaattctcccacaccaagtgcatgtcagttgtggagaaaacatagcaaaaagagccgtacgctctttacagatactaatgtcaagagttaaacctcctcaggttcaacctgtgataaaagactagtgcttcccagtacttgcatggggttcactatttatagttttcttgggagtatcacaggaaaatcacaattacaccactttagaccctatgtgtagcaggtcacaacttacccttgtgtgtttagatgtgtatgaaatacctgtatacgttagtgaaagctgtttactgtaacggggaaaacc

SEQ ID NO: 239077 - DNA, 615 bp, Homo Sapiens
ttttttttgaataaaaaaaggagatgaaaaacttccacttcttctcagtggttactgtagaagatgtctctttactaaaaaggggttttctacattttaaatgagattcaggctatcttagggaatgagcatttgtcttttcatatgattagtgtctaccccaagaatagttccattgatgaagattttctatattttttcatatctagctatgctatttcctcatgaaagtccaagactttttatgactgtggtaattttagaatatacatgaatgatctttcagagtcacaattttgccatatcgttaaaaaaacttattcccgtttcatagtctctgtattagccttctcctggtctatactaatccatagattagaaagaagaaatctgcttattggtgccatacaagcaaacaaacagataccagagttaatgatccttctgaagtcataacgaaaatttgtgagaatagaaggaacgttaggctttaataacatcccagaggtcaatcaaaattattcaaggctgtcaagaaaacatacgctatgagataataataactcattaccagccatttgtgttgttgtgtgaagatgattctttgactctgat

SEQ ID NO: 239078 - DNA, 335 bp, Homo Sapiens
ggggaaccacgcgttttaatcaacgtatcgataaaaaacaccagggcacggacacttccaggggaaatgcttattgagtaaagtatccgaggaagtgatgcagggcaggtaaacagctggtgctcagcagcgagaggacgcgtcactctgccgttctgcagggtgacgccctccccgtacctcgctgagagccacctgcagacacagcaggccacagcagaatgcacaggtcactgttgtaggggaacaaatcgtaatgcccagagaaaacctgatagtgaaatgtaaacagacaggacagggtggttccaggtggccaccaccgccaggccctt

SEQ ID NO: 239079 - DNA, 536 bp, Homo Sapiens
  misc_feature (464)..(464): n is a, c, g, or t
ttttttgcaaagagtaaaggtcaaatttatttaatacaacatccacgagggtccctgcagctgtgtcactgaggcaaacaggaaaagtgattttggctaggcgtggttctcatctgtgaaattccacagcgcaatgacagcaacctctctcccacccactcaagacactgtcaggaatgtcttaagacctcaggagaccacttctttagcaagcaattttgttttttgtctttttttgagatggattctcactctgtcactcaggctggagtgcagtggcgcgatctccgctcactacaacctccgtttcctgggttcaagcgataatctcacctcagcctcttgagtagctgatactacaggcatgcgccaccacgcccggctaattcttgtatttttagtagagacagggtttcatcaggctggtctcaaactcctgacctcaggtgatccgcccacctcancctcctgaagtgctgggattacaggcgtgagccaccttgcctgccctggcaaggaatacatttttaaaaatt

SEQ ID NO: 239080 - DNA, 454 bp, Homo Sapiens
ttttcctcggttatcttttttatttttttttgagacggagtctcactctgtcacccaggctggagtacagtggcacgatctcggttcaccgcaacctctgtctcccaggttcaaacagttctcctgcctcagcctcccaagtagctgggactacagatgtgtgccaccacacctggctaatttttttatttttagtagagatggggtttcaccatgttggccaggctggtctcgaactacggacgtcaagtggtccacccgcttcggcctcccaaagtgctaggattacaggtgcgagccactgtacccggcctgtttattcagttgtctggagttgacaggacagtcctgagtccagcaggctgtggctgtggcccctggggtgagtaggcagaatgaggtaggtggtaggaggggcagcctcactgtctcctgagaggccctggggtctccg

SEQ ID NO: 239081 - DNA, 499 bp, Homo Sapiens
ttttaagcttcagttacatatggccaaatttaatggcactgaaaaggctaacatattaagatggaaaaaatttacaagtaatataaacattataatctcaattttgtttttaaaaataacataactttacaggttaggataaaatgcaccaaatttaacagtgattacctgaaggtaacagaatcatagcaatctttattttttccttgcgtacatttttatgatatatacagtattttttcataatcagaaaaaaaggcttgaaatttataatttttaaaaagcctctcctacaaataagcacatgaaaaaaatgttcaccatcaacagccattagataaatacaaattaaaaccacaatgaggtattactacacacatataaaaatggctaaaataaaaaaatgacaacatccaatggctagcaagggtatgaagaaaccagattattcggacattgctggtaggaatgtaaaacagtatggacaactctggggaaa

SEQ ID NO: 239082 - DNA, 434 bp, Homo Sapiens
ttttttgctttgtaattagtatattaaggagacaatacatttcaagaattgcttaaattctgatacccagatttaagcatgtgaacatatgagacttttaaacatacaattaaagctattcatcataatttgctatactaccaacataactttggagcgaaagtcaaatggtttaaagtaatcctgtaacatacctaaagaacaccttcctatattacgcatgcaaattctccacgtaaaggtcttttcactttaatttctgttacccagctctgaagtcactacttgggcttatcatggtccacagacaaggaggggagcaaatgaccaggactggtcaagattatatatatatatatatatatatatatatatatatgaatggcacagtagaaggaaacacaattctggaagtgcaagccttcaagaagcag

SEQ ID NO: 239083 - DNA, 439 bp, Homo Sapiens
  misc_feature (185)..(185): n is a, c, g, or t
  misc_feature (254)..(254): n is a, c, g, or t
  misc_feature (285)..(285): n is a, c, g, or t
  misc_feature (353)..(353): n is a, c, g, or t
ttttaccaggggatgaagaccaaatatgtatttattataaatcacaatttcacagctaccacttttttgttcaatctatagatgacaagataaatgctgctagaaacatctctacactttgacatatggaaaatttttttaaagatcctgtttcacatgtttagaagctgtgattaaatggtagngaagaactttcaaaccaataaagtttatgggctgcattattcaaagcaaaataaatctatatttgctgngaacattgcaagaacttgcacaaactaatgngcactaggaaaaccaaaactataccccccaaaattaaaaacaaaaaaaaattctgagaaaagggggcnctggaattatgtacttagtaagtttaatatcagaagagtatagcatgtttacacacgtggaatttaaaaatagatatctagcatta

SEQ ID NO: 239084 - DNA, 569 bp, Homo Sapiens
gcaagtaaagattacttttaattataaactggccataaacccaaatgaggatatagtcattgtagagcaaaatgatacaatgcacccaacccgatatttacattaaaatatttccagtcacattaactttcaaacaaaaagacttaacgaatttacaaatttttccaagacgtgagaagtgaaaaatgtttttgaatgccatctgagcaggatagtaaaatcactagaatagtctttttaagttctcagttactggactgaaaagataaagctgatgaaaattggtgaacaatttgttcctttccataactactatcagattaatttaaaaaagattatttttaaatctatgccaactatgggagtagatcacaagacagtcagttccagtagcatgtgattaggtggggggaggaaagggggttataaaggaatatttctttgtttgggtgacacaaagatgaatggtctattgtcttactgtctgaaaagaaaaaacaactcaacagctcgtgccgaattcctgcagcccgggggatccactagttctagagcgggcgccaccgggg

SEQ ID NO: 239085 - DNA, 438 bp, Homo Sapiens
ctctatttccagttttattctgtaccaagtgcacaatcccttcattttacttttgacataaaaaaaggacttcatgaacaagacaaaataacttatgattatatgaaacataactgtgacaaatcacaaaactatacatattaatagaaaaaagtgtacctaattctttaaaagatttatgacaataagcaccagatgtgcctctagagtaaaatcggccccatatccagtatgatatatgcagttcatttctctacgtgagtgtatataactatgtacaagagtctgtgtgatttatggaaaacagatttccacttttttcccccaaagtgctttatgtcagcaacattacacaggatactttgctgtctgtacaaaataaatctctttttacactcactatttctccaatgagtgcttttttttttttgcttcatc

SEQ ID NO: 239086 - DNA, 639 bp, Homo Sapiens
agttgtgtgccccacacctgggtaattttttgtgtttttagtagagactgggtttcaccgtgttagccagaatggtctctatcttctgactttatgatccacccgactccacctcccaaagtgctgagattacaggagtgagccactgtgcctggcctgttttttgtttctttaacaaaaagttatagagacttctatgagtattgtaccgaatctaaatcacaattgggtatataatcattgagcgatattcatttttccaatcagtatgggatttatatctatttatacatgtttttaatcattttgatcaatgtttatagatttcaaggtacaaacctcactttttatgtttattcctaaatatttcttactttaagttctttagcaaatggaattggtttttaattttcttttaaaattatttattgttaatgtatggaaattcaactaatttttggtgctgttattctattctgcaaataaactgaatgtgtttgttagttccagttgcattttggctgactctttgtgattttctttacagaaggtcatgtcatctacaaacaaataaaatttgacttcttctcgtgccgaattcctgcagcccgggggatccactagttctagagcgggccg

SEQ ID NO: 239087 - DNA, 496 bp, Homo Sapiens
ttcagattatggaataattgcattatgtacttactggttgagcatcccaaatctggaaatccaaaatgctcaattgagcttttcctttgagcagcatgtcagcactcaaagttttggatttgggggcatttcagatttcagagctgggatgctcaaacctgtaaaacatttcaatatttctgactgcataaagttttttaaaagccaaaaaggtaagatggaaggatgctccatcaacaactcatgttgtttcctcccatgtacagggtgttacagttcaaacatctcatcccctttacccctccttcccggggtagctggaacaacttatctaagaggtaaatctgaatagaacaggcattcacagctcagtgacttccctttattctgttgggaaagagctgcttgaaaggaggagggattctctgctcctagatgcttatgtcttatgtaggcaggttgtaaaacatgggaggcctgctccagcccagcattt

SEQ ID NO: 239088 - DNA, 471 bp, Homo Sapiens
gtttcccaattcaactgtattaggtttggcagcaaacacaaggtcaaacagaaagcacatatgtttgctagaaggcaaatttcaacagcaagcagaccaatttacctgaccttaataaggtctttacaacacaaaacacctagagagtataaaaacagcccattttaaaagtctggtagactttcatttgcctgattcctattagaagagtgagattagaacaaatatcttcctctttacagcttcgtaaattgagattgtatgaaaatcaggccaagaagcccaaatgttgaactaaaacacaggagaagcaggtaataaaacattaaaaaagaaatatttgcctaaatttatttccccagatattaattccttattggctaaatgtataaaatacaaagtttgaggattctaagcctcaataatatatctaatttatttctaaatctcaaatcacagtccaaagcattg

SEQ ID NO: 239089 - DNA, 501 bp, Homo Sapiens
gaaagtttgaaagatatttatttaaaaacagaacaaaaaagctttggtatttcaaaacctgacaatcatcaatcactagaaagttaaacacctcccctgaagccccaaagtacaaaaccacagatgtccacaggctcctaaaaaagggcgtgcaaacccgaggatgacagcacaacccgcaccctcctacaggcagcagcacagccaccctggggggccccggcccagcctcgggaccgtggggcctccgaacgccgagatggacatcaccgccaacactcaccatctacaggggatgcaaaagccatctagcaaaatctcaacaaaaataaattaaaacttcattaagaaagaacacgttaaattaggaaaaggacacaacttttcctagacaagagtcttttcaaaagatgatctatttcctgggacagaagaaagggggaaagtggaaggagtgagttccatttcaagtatttgccatacaggttcattttattgagt

SEQ ID NO: 239090 - DNA, 501 bp, Homo Sapiens
caggaaagaacatgatctcccagtctgaggtgaccggaaaatgcttttaaaaattccctgctcctcccccgcatacactcttccatcacagtatttgacagacaaacatcatacaaacgaagtgtacgtcaagacgacctggcaacttctacacggaatttaggggtcgttttcaaagcagcagaaggggagcaatgtttttatgtggtcgtggttcttgaacattaggactgcacgctgttttcaagcatagaatagggacaggggctcttcaaaggcatccatccaattgttacaagaccgactttcagaaggcagtcactccggagcctgcttccctccggcggtgaacaagaaacgccttgtagaaccctagctggagccgaacactttccctaacaagatgtgtattgcgaggacgcgcccctgacttcaagggtaagactaatttctttcaacgacagacactttaaaaagcaattttttttaaagcatccggcc

SEQ ID NO: 239091 - DNA, 500 bp, Homo Sapiens
cgggtacacaaatagtcacagcatctttatttataacagcaaaacactggaaacaacccaaatgtccatcaacagtgaatggatacacaaaccctggtgcatccatttaaaagaatactaactcagtaacaaaaattaaaactatttagacacctaacaacttggatagatcttaagggtaatttgctgagtgaacaaagccctatctcaaagcttgcgtaccttacgattccattttaatagcattcttgaaataacaaaattagggtaatgggatcagtggctaccatgggtcatattgggaggacagtgtgagtataaagaggtagcaagaggaggccaggcgtggtggctcatgcctgtaatcccagcactttgtatcattttcatgagacttttttacttcatgaatttcctgatcctttttaaagttactcttcatataagttttatttctgtatgaagtaatgatgatgaggcagcatgtatcactgaaatcc

SEQ ID NO: 239092 - DNA, 500 bp, Homo Sapiens
acgcttttactggttggtttaatgagagagaaccacttttggccattatcaccttacgttactacaaatcctgaaaggaaagcagctttgagtcttgggctcggctgaaccccctgcatggaccggggctaacagtaccctctacgactcccacaggtctctctttgtgtccagatggatggcgactgtgagtcagcaacgccagccaagacttcctcgcctttaccgtggcattggggcagtttttcaggctctctacggagagagaagtgggccagtaagggagagggctagagagaggacaccagtttacatagggttgactttcacttgtgtgtagtagcagttcagaatttaaaagaaatttccttgcagaaagaatgtcttcctcttggcccctcttaattttttatgtttttatttatttttaatctttggcagcatagaactgattgtggtcctccgatgcatttctggtgtcgagaacttcctttctcaac

SEQ ID NO: 239093 - DNA, 501 bp, Homo Sapiens
gaggaatgagcaatttatttcaataaagagaaagcattaattttgctacagtgggaaaaaatgaactcaagagttgctacatttaactgtatccccatttatctctgcacgatgtctttatctcagtgtctcaattcacactaaaatattgaatgagaaatacaccacgttggctgattgcttgacatgtctgatttagggagacttctacaaccactcctctcttttttctcccagtaaatacttttgactttgacacctaccatattggaaatgacaggtgcccgagggcaagtgcatcaaagcagttaggattcgaatgcttgctaaggattatttttttaatggagcagttctattgaatcctgaaaatgcagaacccagtgaatctcctttattgtgaaacagaacaattcaaatgattgcaagccccagaacctaacagagaagcacttaaacatttagaacaaacatacctatttttcaaactttggcattttt

SEQ ID NO: 239094 - DNA, 501 bp, Homo Sapiens
ggcaatcacgccgtttattcgcacttggcagcaagacaatggatgatgtgggaggtgccaggcccctgggttggcactaatttggagtatggttgagacagggctggagagaggcatcttagaggtggcccccaaatccgcaatcgggagaaaaaggcaagaatcgactagagattgtcaggataaagggaggcactgcccacccctgctatgtctgtctgcccccacaggggcttctttaatacctggggttccctgggtgatgaatgtcctcctaccctggcaaggggccatacctgtcgccgtggccccataggcaaccctgatgaaagagtatcatttccaagggggctttggtttctgggtggccccacctcgtcgtggggtagatggcactgaaatgctaactgagcgagccctggaagtcaccagggggctccggaaggtcacccctgacgtggaaggcctgagatcctgaggcccatttgtgtgggggggcac

SEQ ID NO: 239095 - DNA, 500 bp, Homo Sapiens
gaaatgatttattcacctgggaaagtgatcacaacttgctgctaattaaaaccaacaatagaacagtgagtacaattgaagtccatcattgttattatcataaatatgcacccaacaaaaaacaaactaaaagaaaatacactcaaaagcacacagtgggcacattttgtctttgggtagtggaagtgtaggtaatgtcagtgtttggggtttttctttgaatttttaagctgttttagaaataagttttgttattaggaaaattatttttaaagaaatatacatctgagggaaaagagaacaaaggcatgataaataaggggtccttggttggagatgatgcatccagaacattttggataaataagctactttgagttaagggccttctcggcctcctacatcaacacagaatctcaccccaccctcctagtagacactttcctcccaaccccctatcagctacaaatactgtcagcttacacagcaggccttattat

SEQ ID NO: 239096 - DNA, 459 bp, Homo Sapiens
catttaagtttgtaaatttctctatgtgaggctgaaaggttaggtcctggaaaattgtgattggtctgtaagcaccagaaatgtccaaaagtatatatcccctttgttaactgcacctgagcctgacatcctaccattcacatttggaatatataactcaaaacattgtccatatactgtttggtagaaatggtgtatcaagtttggtacagaaatatgtctgtcatgaacagcggcagcaatgaaaaccaggaggaggttaatgagagttctatggaggttttacgccactgtgataactttttataacaagggcctgagattaggggaagagtgagttgccagttcattaaattcttgtccattaaaacccatttctctttctggccgcttgtctacagtcatcccattctcagatgtactcatcccagcacattctttttttttcattgtggcaaa

SEQ ID NO: 239097 - DNA, 442 bp, Homo Sapiens
  misc_feature (61)..(61): n is a, c, g, or t
agcccgccagaggcccctgccaccccccatgggggtatgggcccggcctcgcctgccctcntgggccagtcacccctcccccagcccacccaaataaaggattatttaactgtctgagctcaggcctcccggcagcccctcccctcccacactgcaggggccgttccccggcttctggacaagacacccagctccgagggggcaggggcttataggaggggccgaggcgtgcgctgccctctcagccctggtggcaggcgggggacaatggccactgtccctacctcactgtgccttcctgtgctccaggccatctctggttgtgtctgtgccgactcggtgttgaatcaaatcaggtgtgcgtcaggagccggctgtgtccttcctgccacactcggggattcattccttagaaactgaaataaattctaattttggaaaa

SEQ ID NO: 239098 - DNA, 454 bp, Homo Sapiens
gcggcggggcggcggctgcagctgcagctccggcgcgagggctcccttgccgggccctcttccccgacccctggggcgctccgacaaggaagagccgtccagcgcgcgtccgtcctgagcgtgggcctagaaccaattacagagtcaaacccaagagccgaagaaagtgaagactcgcagcttgccgcagccccctcctcggcctgcgcacctcacattgagggcgtcctgatttaaacgcgtgcctcctgcatttctgcttctgccccaggctagagcggcgaccaggaacgctggacccacagagatctgtggcaatgtctgtcgaaccatggtgttctttggggcatctgactagagtattgtttgataaccagaaagaaatcaaaaattggtgatcacaaggctaatgtcacttttgctgcagtggaaaatcatgatcattaagtttaaa

SEQ ID NO: 239099 - DNA, 455 bp, Homo Sapiens
cacgttaaaatttcaggggtaagacgtgaccttttgaggtgactataactgaagattgctttacagaagccaaaaaaggtttttgagtcatgatgcaagaatctgggactgagacaaaaagtaacggttcagccatccagaatgggtcgggcggcagcaaccacttactagagtgcggcggtcttcgggaggggcggtccaacggagagacgccggccgtggacatcggggcagctgacctcgcccacgcccagcagcagcagcaacagtggcatctcataaaccatcagccctctaggagtcccagcagttggcttaagagactaatttcaagcccttgggagttggaagtcctgcaggtccccttgtggggagcagttgctgagacgaagatgagtggacctgtgtgtcagcctaacccttccccattttgaataaaattattctttggaaaa

SEQ ID NO: 239100 - DNA, 442 bp, Homo Sapiens
tggacatataaatttaggaatgcctctcaagtgcctgcatagtgattctcattttaaaattacctttggtcaaagaaagagtagcaaagaagatggacacatattacgccaatgtgaaaatccaaacatggaatgcattctttttcatgttgttgctataggaaggacaagaaagaagattgttaagatcaacgaacttcatgaaaaaggaagtaaactttgtatttatgccttgaagggtgagactattgaaggagccttatgcaaggatggccgttttcggtctgacataggtgaatttgaatggaaactaaaggaaggtcataagaaaatttatggaaaacagtccatggtggatgaagtatctggaaaagtcttagaaatggacatttcaaaaaaaaaagcattacaacagaaagatatccataaaaaaaaaaaaaaa

SEQ ID NO: 239101 - DNA, 406 bp, Homo Sapiens
tcgtggaagaccccgatcctaacccatgcagaatagcaagagtgggcgtaagaaccagggcacaataaatggtgtgattggctccatccctacaggctctcattgtggaaagacctgtcggcacagacccctccagaggtctcgctggcaggcaggcagacacccacctgcagctcaggaacatacacagctctcccctcgggtacgagggccagtgttgcccttaggcagaatcctcggggagattcgggagtgcttccttgtcttggattccaggaaaatggaccctgagatgaggatttaaggatcagtgtgtttggtgctgatccaggaacctctgctgggggagtaggaggcgaatctgcaaagggaataaagagtatgttgtcaagaaaaaaaaaaaaaa

SEQ ID NO: 239102 - DNA, 518 bp, Homo Sapiens
  misc_feature (265)..(265): n is a, c, g, or t
tgtaatgtgacttcctaacttcattaatttggcttcacataacatatcccttagaacagatccaatagacaactcttaatatcagcttgcaactgttgatctccctggatccagaaccacttttatttccaagaggaggggcattcttggggggtgttcatggggcctggacttgcaatcccttcctgggtcccatcttacctggtgaccaccatcattgttttccccatcctcttcctcaacacacatacatgcacaacacatntacaatactagtgatgtctaccagtcctgctacttctggggtgcctgtctcctggaatggagctggaggagcaatgctgttggtgaataaatcagtctactggaactccaaggactggatgtaagcagatctttttttcctatagatgtctcagatgttcagttttcctgtcacaaggcttccagtctgtattagttcattttcacactgctaataaagacatacctgaaactgggaaaaaaaaaaaaaaaaa

SEQ ID NO: 239103 - DNA, 568 bp, Homo Sapiens
  misc_feature (232)..(232): n is a, c, g, or t
aaataggatatggctgctcttctcattagctgttgctgttaataaatcacttcacaacttagccgcaaatgacagcaatcattgcattaagtctcatggttgctgtgggctgggatttgaagaaaggcgtggctggtttgttttggctcaggatgcaaacaaacagtgcaatcagtgatgcttgccacagggcggctgggggtgctggacaagtgggcatctctctgtggtntcagggcctcccccaccatatagtctctgcactggccagcttgggcttccccacagcatggctgcctcaaggtagtcaaactttatatggccgctgaagacccaggcagaagctgcatggccttttctagctcattttgggagttccgcaacttcacttcagctgaattctgttggttgtatgcaagtcaccaaactgcacagatttgagaggagggtgccatagaccccagctcttgatggaaagagtatcaagctctcattgtggaaacacacatgggatgaaagacactgtcacaacatggcaaaaccccattcctacaaaaaaaaaaaaaaa

SEQ ID NO: 239104 - DNA, 618 bp, Homo Sapiens
tgttttcctcagcactgtgtaggtttcagcttatgagttctgtccatgttttgtgagatttatagctaagtatttaccttttcgaatgattataaacaacatagtagttttaattttagtgtctacttgttttttgttactatatagaaatacaatcgattttcatatatttatgttgcatcctctgtgcttctaaactcactagttttggaagctgttttttgtttttagattccttaaaattttatatatgggcaatcatgtcatttaataatcaacctgtatgcctaaaataatcaacctgtatgcctaaaataatcaacctgtatgccttttattgtaagaaaatccctaaatactgggattacaggtggtgagccaccgtgtccaacctgaaactttttttttggtgatttcaaatgaacttgacttttactgtaattatacctaaagtatttgtaaacaattgtttagaacttctatttgtcatggacttttgagtttattctttggatcatataaaaagactttttttttttgtttttaaagttataaatctctgtatgcactttgcttttcttaattaaacataatccaaagtaaaaaaaaaaaaaaaaa

SEQ ID NO: 239105 - DNA, 592 bp, Homo Sapiens
gttgctgtctggtgtttgctggtgaaaacatgagcagtagttatgtggggctgagagtcaaaagggaaagcctaattaattcaactaatgtttattaagctcctactctgtgcaaatcactctactcaagaggagctcacataagagtgcaggataaagaaaggagatggacagttatatgtaattatataaactttgtgtattttgtttctcatgaaaaaacccctttggcaccctgctgattgatttggaagaaatctgatagatttgtggcctttcctaaattgcactaggaaattatgtagttagaatatttggaacctgcattagttccagcaatgaaagtaagacacacagcatatgacataagacacagtgtgaaataaatgagtttaaaaagcatatgagtcttagaaaatcttttatttaatataaaaatattctaccggtcaattgaagaatgtattatgattctatcattttggattgatcaaaaacatttgggtttactacgatattaagcattcactttacaatactaaatagttaatgaaataaacacattttgcttacccaaaaaaaaaaaaaaaaa

SEQ ID NO: 239106 - DNA, 576 bp, Homo Sapiens
ggttagccttgggtatctgcagtgcctggcacaatgtaaattttaaatgaatgaacacaaatgaattgtatttccacaattttgaatcttggtatagtggaaagaatattactctggaggtcaaggggctgtagttcttgtcttctccatgaatattctttatgtgccacttctaccatctgtgaaatgagggatgggagggggaacttgaggaagtggtattagatgatcattaatagtcctgtcagcatattattgtagggttttatgaatattataattgcattttagaccataataaccaaacattacatattgatatatttaatttttttatttaagtggtacatgatcagcattgtccacatttacaatcgatggagaaacagtgaaattcagtgttatgttaatggacaactggtatcttatggtgatatggcttggcatgttaacacaaatgacgtaagtctttatttttctgtctgtgttttaatttgtttgagagtatgatctatcattacaaaatgaattgaataataaaatagtttggtagaaacttaaaaaaaaaaaaaaaaa

SEQ ID NO: 239107 - DNA, 403 bp, Homo Sapiens
atcctgaccgtcctcagttttgtgaagcaacagcctctgtgcctctttctctgcatgctctgttgacggtctagtcttgagagagaacctgctgctgtcccgtctgtcatagccttcctagcaactcttaggcctgcgtgctgtgttttcatgatctcccccaaagcggcactttgatgttttttcagagtcaaagtatcactgtggatatttatcccaaacaaaattgcaaactgatcaaatgttatgtcttttgataccaaatcaaaaacgattcttggtggctgatcaggttgtctcctaaaaatttgccttttgaacctatactgcctttatgagatgattatgaaagtagaaaatagcctgtgaaaaatggtacctttgctaaaaaaaaaaaaaaaaa

SEQ ID NO: 239108 - DNA, 452 bp, Homo Sapiens
agcctgctcctgcagagggatgcaactttccgacccactgacatctgtcttggtcatatgacttgctttggtcaatgaaatgtggtgtaaaaaggtggaggctttgagagccattgcctggttctgccttgttcttttctttgggtcacaaggacggcagcttcccaggtacaatctgctctctcagtgtgcatcttgatatgaagacatcatgaaggaaagcagagctgactgactggcaaaaacataactgtggatagaacccaaagggaaaacaaagcccaaacagtctcagctcctttactttatgcgaccaatggcatttcaacctccctctacagtttgataccttcttctatagttacagaattcttaactttgttttgacctggatccatggccacccaaaataaagactatatttttaagcctctgaaaaaaaaaaaaaaaaa

SEQ ID NO: 239109 - DNA, 467 bp, Homo Sapiens
tatttttgaaagaatgaatacactctctgtcttaaatccgctcttaacaaatgatctcttctcagaatactacatctgtattgagagtacagacagcccattggtcactacaccttttgcaagacagcgaaacggatgcatcaaattgcattgatacatcatcaccatcaatcttttgcactgatttttagacttaatcttcttatttgaaaataaactcatttttaaataaaataaaaaatattttagggaaagctctataaaattaaaattacagaattatatgctttttaaaatttatgcaaaaatgtgcagacaaatgtattctgtattggtttatgtatcactttgcccttgtatattttgagattattaagatttgttgacttttttggtttgatatttatcatctgttaaatttttccttttaaattattaaatgcaaagtgcaagaaaaaaaaaaaaaa

SEQ ID NO: 239110 - DNA, 437 bp, Homo Sapiens
cggcacgaggagcagctgggatgtatatattcctgcaaggaaagaaaaggaaatggcttcacattgctggatgggagcagtatgtgtgttgtttctgggtataatcttcctagctgcacttttcccatacatttctttctactaaaaatcatgaaagtttgaattatagttcctctcacaggattgaaagcaagtatcagaggagtcatccattcaaaacacagttcttccactgcagtatccgatatgttttgtatgtgcgctaggctgtcttttcattcagtctacaatacagttcaccagtgtggagaccttttgccctgcctgatttgttttgttttgttttactcactcttttcaatgacttttggttttggccagtatgaagagtaatggatgttggaataccttctgccagttaaaaaaaaaaaaaaaaa

SEQ ID NO: 239111 - DNA, 479 bp, Homo Sapiens
gaatgtggtgtttcaaactcctgggagtatgagcttcttcctccacaacaccctcttcctgacttggagatgaggtctccatagcatttctacacaagaggttgaatttcccctcttgtttcattttagtttttgtctcctgagatttaaaaacatttttaagtaccacatttctatgtattcattagaatgcctggaaattttgtttcctgatagatttctctctgattatgttgtagctaaagcagcagggaaggtggggaacgaccttttctgcagggcagcagggagcattggacatgtcagctgaaagtgtgagggaaagaaccttggccttggagatggggagccctgggcaccggctctgcctctgtgactcacaatcacattcggccagcatactttacctccctgcttctcagcttctacatgttcaaaaaaaagaaaagaaaagaaaagaaaaaaaaaaaaaaaaaaaa

SEQ ID NO: 239112 - DNA, 435 bp, Homo Sapiens
tattttattggtagggtatctaaaagccacgtggtgcactaatgactccaggtaaaaggcaggagcatagaactcttgagaagcaacaacagccagtgttcaccaaacacctaaaatgtgcctggcactttctatttagtatttccgttaaatctcctaacaacactcaagcttgacactgataattttctccattttacagatgaggaacagacagattgattactcaagggcatgctggtaacccatggaactagaactcctggttcctacgctgagaaagaaagacatctccacctttacctgtccttctcagtggtgcaactgtgcagtagacatttccatgcaaaagcaaaaccttggtagcacccgatctgtgaatgtgaaaaatatttaagagtgaaattaataagcaactagctacacttctcgtgc

SEQ ID NO: 239113 - DNA, 406 bp, Homo Sapiens
ctcccaaagtgctgggagtacaggcgtgagccaccatgcccggtctataactttttcaaatgccaacgtgatgctcaaaagaaatgctcactggagcatttcagattttgaatttgggatgctcaactggtatgtactctgtgaatattccaaaatctgaaaaagtccaaaatccaaaaaactgatccaatacatttcagatatggcatactcaacctgcactgtgaaagttttctgttttgttctgaaatttaagaagaaaagttttaggtaataaaagaacttatgaacatctagaaacttgaagacataccacagttatctagaccaacctggtagtagaagagggttgtcttagaactttaaaagcatagcaaaacaaaagtagttccattaatcctcgtgc

SEQ ID NO: 239114 - DNA, 445 bp, Homo Sapiens
gaaaacattttttttgtaatttttctttgcaaagaaatgagcataaaaatgaatactccaaagaaaaggaattattatggcaaattaaaagggacacggtactatgatttaattactgtcttgtctttttaaaatgtcatctcttgttttaccctttttttaaataaaagctttaaaaacatgtctttgggtattattctggaggtatgtttcttttatataagatttcaagtttaaacatttacaataagtaataatatttaaattcttataacaagtaatgaaatatttggtttagtaattagcttagtctatttttaaaaatcattaaaatttactttgtttttaagaatgccatactacaaatgatgttatttggttttaatggtgttttgtgtttaagatagaataaatagagtttgaagaatgtgaaaaaaaaaaaaaa

SEQ ID NO: 239115 - DNA, 572 bp, Homo Sapiens
catcatggtacattgctaagtccatgcttgtgtgtgtgacaataggcttgataatttatcttaaaacacagcagcattgaaatttaggaaaagaatattaaatgcctttggaaacatgaaacaaagttaggagccagtaagaaagtgacagaagcaatgaatgtcttaatgcagtatagttaaaatggcttcccacagggtagataattatccaggatccttccttttccttcttcctccaggtttttcaggggtcacttcacatttctaaagaaagagtgaataggctgggcatggtggctcaagcctctaatctcaacgctttgggaggctgaggcaggaggatcgcttgaggccaggagtttgagaccaccttgggcaacataacgagaccccgtctctacaaaaaaaatttaaaaattagctgagcatggtggcatgtgccagtagtcccagctactcgaaaggctaagactggaggatcgcttgagccaatgagttggaggctgcagtgagctataatcacgccactgcactccagcctgggctgcagggtgaggtcctgtctctgg

SEQ ID NO: 239116 - DNA, 484 bp, Homo Sapiens
tcgtcatgacagcccttcactcccccgcagcagcctcagcagccgtcacagacagtgcgtttcaaattgccaatctggcagactgcccgcagaatcattcctcctcctcctcgtcctcctcagggggagctggcggagccaacccagccaagaagaagaggaaaaggtgtggggtctgcgtgccctgcaagaggctcatcaactgtggcgtctgcagcagttgcaggaaccgcaaaacgggacaccagatctgcaaatttagaaaatgtgaagagctaaagaaaaaacctggcacttcactagagagaacacctgttcccagcgctgaagcattccgatggttcttttaaagcagtagtatatcttattttcaaggcatttggaaatgaagggcaaactaatgtcttgttttaagaaactgcttagtccaccactgaagaaaatatccagaaattattttcattttacgaataaggctttcttc

SEQ ID NO: 239117 - DNA, 542 bp, Homo Sapiens
aagaagggggaagccagtgggagttccacacacgtggtcagtgctgtaagttcccggatatcagtgtctctcacatcaacacagaaatagggcacttctcaacattaattttggaattattcaccatttaaaaattgtcactgctctttttcattactgtagataactgagagttagctgttctaggaaaaggccatgtttcagttagtgctatgacttcttttttcgattaaggttgaagcagtgttctcttagtagcctgaacacttctcaaagcgacttatcactagcggctttaatattgagcttctatatcgttgtgtccacctcactttttaaggctgttcatacctggcaatattcacttactctgctatttttaaaaactattttaaagttttaagcacaatgttgactcttctgtaatttcctaaaattatattgttttcctacagacagctcaactttccttgatatgtaacactttaggaaaataactgccttgtaaaataaacgtgattttttttttcttttaaaaaaaa

SEQ ID NO: 239118 - DNA, 371 bp, Homo Sapiens
ggatttatttctctagtttacttattttctactttaataataactcaatgccaaaatatttctatgcttgtttcttggcataatacattttaaatcaaacctgttcgtaataaatcatgtgccacatcttgtcttacacataaaagccactgcttttaacatcccattgtacatttaacacataaatggtgttaacatcccattgtacatttaacacataaatggccattgtctttgtctcagtaaagtgtaggtggacaatcttcctgtgatatgtagtgacattggtcatgtagctagataattatggtaattgtgacaattaaagagaaataaattattgattatccttcagaaaaattaaaaaaaaa

SEQ ID NO: 239119 - DNA, 514 bp, Homo Sapiens
ttagttcatgctctgctcattgcacaggttaggataaactggtagtaacattgcttcctaatcatgtgttgagaagtcgtgaagatcagttagatgagatgtattttgtactttaaactttttagatacgagctttgtcaaagtacaaaattgatccctataaaatctatgacacagcacagccaaggccaactactgtggattctgttttgtaagaagagagttgaggactaaatttcaatgtgatgtagagttaatccgtagtaatgttcattgaccattggggataaatttttacatgcccacattacttattgtaaaccctgaagacctttagcgatgtatgattctgccctggaatatgtatttactcttttggatatttgcttatattatctagggaaacatagttgaaattatttcttccttggagctcttgttaacagcgctataaataagtgttctatggagttatttttgctctttgaaacaaacaggtaaaacctaaataaag

SEQ ID NO: 239120 - DNA, 441 bp, Homo Sapiens
ctgaagcctgaccacagggagcattgtgacacatttcttgacccattacaatctcttctacgggcaaagctgagggactgttgacatttagggatgtggccatagaattctctctggaggagtggcaacacctggacattgcacagcagaatttatatagaaatgtgatgttagagaactacagaaacctggccttcctgggtattgctgtctctaagccagacctgatcacctgtctggaacaagggaaagagccctggaatatgaagcgacatgagatggtggatgaacccccaggattggatttttcattactgtgaagaaaaacactggaattttgataaggagttctttaaatctacaggtcactttggataatatggcagtttcataatacttattctttcaatagaaataaaacattttaaaatttaaaaaaaa

SEQ ID NO: 239121 - DNA, 552 bp, Homo Sapiens
tcagcatttttatatagacaaaatcaagttaaaatgaataccatggatggtcttaagtgggcacagaaatccttagccttcttcagtattatggagggggctatctaacctttttttactttcttgaaggtagagctgattggggtgggcagtcagtggtgctagtatataagctttctgctttttttctttctctttttatttttattactattattattattatttttttggctgcttctctgagtcactgccaaagattgtaggacatcttattattaagatggggtgattactgaaattagctctaacttcacatggctctgcaagaattgggtgaagcgtgaaccctggagatagtcatctctttctcaagagtcagctacatgcacactggtctgaatgtgatccttcactttgtccaagggtaggaagcattagtccctttgtaatgatgattatttttgtttgagggtgggtgggtaattacttttggtgttcatattcttttattgaaaatgaaaatatatttgcttttagtgaatatgcctt

SEQ ID NO: 239122 - DNA, 521 bp, Homo Sapiens
aagattgcaacatcacccctgtgatattcctgctgaagatccataacctggatgtaatcatgaggatatatcagacaaacccacgtaaagagacatgctgtatacaaaactgtaatcttagaaagtgccaaggtcatgaaaatcaaagatagaccctggaactgttccaaactggaggggaccaaagaggcatgacaactaaacacaacacatgattctgaactggatctttttgcttgaaaggaagttacagggacagttggaaaagtttaaatggggcctacgatgccgtggtaatgatgtgtccgtgttaatttcctgattttcatggttgcctgttaagttacatcagaggatgttcttgtttgctggaaagtaaatcaatgtatttggcaggggataaggcatcaaatggtcaccttaatttcaaattattacagggaaaatgtttctctctgtacttaataacttttttgcaatttcttaaaatgaaagctctggagtaaaaacttcaaaaatcc

SEQ ID NO: 239123 - DNA, 639 bp, Homo Sapiens
gtgcaccaacacacccagcttactttttactttttgtagaggtgaggcttcaccatgttgcccaggctggccttgaactcttgggctcaaaatatagccttggcctcccaaagtgctatattttacgttttaaagatgtcaataaaaaatctaaaataggccttttgaatgtaggttttgttgaaacagaagaaacgaaaattatttaataaaataaaataggcctggttgcccatttttttaaatatacttaaatgtaaaggatagataagaaagaacaaaagaatgaataatgagtgaaaaatcttttaacctctgcaggcctagatctgaaaaaaaaaaaaatttttttaataaaattaaaataaaattttacaaaatatttaaccactatagttttgagatcttgtggtttcccatccaacatgtaaagaggttggaagttgtactcttatcctcaccaaaaaaaagaacaaactgaaaatcaacagctcttcttagatccatcaaagaatgaagacacgggacagaccactgcccccaaaaccagaacagacaaatacagagaatcacagattactgagtagaagccgcagctagagccagcaactggtaggaacacttcaagggcgattgact

SEQ ID NO: 239124 - DNA, 511 bp, Homo Sapiens
ggttttttttttttctgcttccagtttaagaagttcttcctaaagggagtaggatcaggaagataatcacattttctaaatatgtttcaatcacattttaatctataattccacatatagtttctacatcaagtcgtcatcctgttgcattaattttaaagagcatgcttctagtgtataaggttgaaaagcattcttccccttatagattactaaagatttattattaatgggtatactgattttctttagtcttactttttatttatcctttttaagtcatcaacaaactttttctgagtatttgattacctttctttcaaaccgtacagtatctcctggatttgtttctctttttatttaggtactttctccaaaagtgattttagtttgtatggaaaatcttctgatgctttgatggtacatattcttattaatgccctcacattagaataactattttcagaacataaaattgtaggttcaaagtttttttcaggttcaatttcac

SEQ ID NO: 239125 - DNA, 678 bp, Homo Sapiens
gggattaaaaaaattcttagaaaagcttatggtttaaaacagggtcagcaaaatatggcccaaaggccaaatccagtccaccacatgggtttggtaaataaaaatttttttagaacatagctgtactcattcatttacaagtctgtggccgctttcacgctataattacagaattgagtccttgcaacagagactacataaagcataaaacatttactatctggccttttacaaaagtgttggtaactcccccaccactctgaaaagtttagagccatagagagacagattaaccagaaatactgaagttgtataaaggctgggcaaaacccacacttctggtaaagaaaaaggaaattaaccaataactacacactataatgctacttacaggtaggcagcatttatgaaaacgcttaccatacaacacaggcattgtctaagtttcctcataactgtacaaaaggtattataatcatcatgcacataaggaaactaaggttttgtgactttgagcatacttggccaaggtcagatagctagttatggctgagagatctgaactcaggaagtctgacttcacaggttgtacccttagaaactgtatgactcaaatatattctttagcagtgatttttaattcaaatacagttgcttcttcacattatacagaaatgc

SEQ ID NO: 239126 - DNA, 753 bp, Homo Sapiens
acatggtgaaccccatctctattaaatacacaaaataaaaattagccaggcatggtggcacacgcctgtcatctcagctactcaggaggctgaggcaggagaatcacttgaacccaggaggcagaggttgcagtgagtggagattgcgccattgcactccaacctaggcgacagagtgagactccgtctcaaaaaaaaaaaaaaaaaaaagaggctactgtacttatttttatatttgactacattaggtctttttcacgggaagctgttgttttctttccgtctcattactgtataagagtttccttaccctttatgtattgaaaaatatataaattccaaacttaaattatttggataattaagtttttgcagatcttggaagtaaagataatgttttgatcatattaatgaataaagttaactgtttcatttcacttacataagttaactggccaaattggaattatatgtggtttcatccattggttctgtcctggccaagttgcttatgtcatccatagacaggataattctttcttcaatcacaagtaggttaatgttcttatttgagaagttgataattgtcaggtagtaattcacactggtagtaaagatgtgcttttgttttcttaccaaatatttttatgtgtttccagagttcttttcaatagaaatattttcaataaagtgttaatagtgtaagataaagtattgtataaaccatggtttgtgcaaaaaaaaaaaaaaaaa

SEQ ID NO: 239127 - DNA, 575 bp, Homo Sapiens
tacttggtagactttttgaaaacatcttttcctatatcgtcagtaaagaagtaacttgtttaggcaaagcacgttatggctttttcttgcctagtttaggtctgtgcttaatgactactggaatagcagcaaacataacatcctgataacatttgggaggaaaagccatatttgaaaattggtgaaatgcaataatctttaaaccaggaatcatcagtttgctaataaaaggtatatggctccaagttacgtattttgtcagggtcctctggcattttcactagtcattttgctagtgtgtacaatgattcctatcttgctgtaaaacttggtgatttttttatattgttgaactaggtgacatgaatattgagtcagatcacataatcttagagtaacacataagtgattatgtagcgttgtgggtggaaacaattctggataaaaagtgcatgacagttcagaactactgtgcaggcagcctgtctgaaatcaggtttaaaaattggccctgtctccagctgactcgttttgtcagactgagtcataggattaacccttgacatgttccttta

SEQ ID NO: 239128 - DNA, 280 bp, Homo Sapiens
  misc_feature (165)..(169): n is a, c, g, or t
  misc_feature (218)..(218): n is a, c, g, or t
ttaatttactttgccaatgtattattttcaataagtaatacattcacatggttgagaattcgaactgaaaaagtatacgatgaacagacctttttccactcttgtgttcttgtctccacagaaaagcagtattattagtttcatgtggagggggttgatgcttannnnnbcatacacaatatatatgttggtatgtbtgtttcatatatgtatgtadnyctattctaatatataaatatatgtatatacaacgtgccggaataccactgagcgccggtcg

SEQ ID NO: 239129 - DNA, 151 bp, Homo Sapiens
  misc_feature (31)..(31): n is a, c, g, or t
  misc_feature (34)..(34): n is a, c, g, or t
  misc_feature (50)..(50): n is a, c, g, or t
  misc_feature (60)..(60): n is a, c, g, or t
  misc_feature (66)..(66): n is a, c, g, or t
  misc_feature (68)..(68): n is a, c, g, or t
  misc_feature (142)..(142): n is a, c, g, or t
aattgagaccctacgctatagcagagcctanccnagcttcacttatcaanaagaatgcancagtantnaggtttctaagcagcataaatgaacccaagacctcttcccaagcagtgtgacatgatattaaaaccccaaattncaggtgatc

SEQ ID NO: 239130 - DNA, 516 bp, Homo Sapiens
ggggagaaagtcgctaatcttggggcagagatgccagtggcaatggtagaggaggggtactgagactgggagggagcaagggccgagcccttgggttcgcggggtacaacagagtcacgttccctttgaatctccatcctccaccagccagagggtatctggcaccagataaggatggctggtagcctcctcctctctcagcactttgaatgcaagacagaagagccctcaaagggctgggtaggaatacctcatcctctggttgggtaggaatactccatcctgtagtggaggaaaataagatcccctaggggtttggggagggcatggcatgagaattttgtggttgtcctctggatataatgcaaactggcctccaggaatatctaggggctgggtgtggaggttcatgcttgtaatcccagcactttgggaggattgcttgaggccaggagttcgagaccagcctgagcaatatagccagacccccgtctctacaaaaaaaaaaaaaaaaaa

SEQ ID NO: 239131 - DNA, 738 bp, Homo Sapiens
  misc_feature (164)..(164): n is a, c, g, or t
agagggcatgctgagttgccacctcttgcagccatttaacaagaaattcaggagactgaacaagcaattgaagcattagaatcaatgtgtaaaagcctaaataagcaagatgataagcagttacaagaacttgcactggaagaaaggcaaaccattgatcaaanaatcaacatgttgtacaatgagcttttccagagccttgtgccaaaggagaaatatgacaaaaatgatgttattttagaggtgacagctggaaggactactggaggtgacatctgccaacaatttacccgagaaatatttgacatgtaccagaattattcgtgctataaacactggcaatttgaacttctgaattatacaccagcagattatggtaggcatattgaggaatttgcctgtaggagatactgaaaattattttacctctgatcttgattagaaccatattgtcccatttttttttgaaacttttggtgtatatctactaaacactgtggcatagggctcatcaatcacagtggcttactattatagcagagttgttagctaggagaagacagtagaaaggagggaagcatttgcttagggagaaatatgtgaattagagaaaattcccctgaggaacttagatacgtatcttgcctcaaaatcatttttctctattattgaaagcaaaggtatattaaggtttttactttaaataactttataaaataatataagtattactaatta

SEQ ID NO: 239132 - DNA, 521 bp, Homo Sapiens
cagatgctcccagaagcaaagtctacctaccacacacacaatatgcagaagggaaaaacccaagccacaagtccctaaacgcctgagtcgtgactcatggaggctgtcctccacccctgccaagtataagaaatgatttctacccacccacttctctaaggagatggtccctcattcctctctcccgagcaggcttcacagcccccttcatagagatgaagccctagtcattaaatgcccagtgatgttacgactgccaaattctatgactatttggaaagttttatcagccttcagacttggcctgaaacattggtcctccttgggttgtgagcctgcaggtcctcagactgaaactatccatcagctctcctggttctcaggctcctggattcaagctggaagtacacatcaggtctcctgggtcctcagcttgatgactcgagatcttgggaattctcggcctctataactgtgtgccccaattccctataataaatctttgtctttctctctaaaaa

SEQ ID NO: 239133 - DNA, 407 bp, Homo Sapiens
gccctctgcggaaactttccttggtttctttttatttgtgtaaaggaggttaagacgtgtcgcacttttcagttgtttgtattcaaatgacgattatttttctactcaatgtgaatatccctggccagcctttccacggcgcccaccgcagtgccgctgcctggccctcagtgtctaccttccgccctctgcgactccagtgctctggcccgggactcccctatccgcccctcacttacccttaaacaggtgatcccacctgtcttgtcaacctcgccgcttttcgcctccttaatggcactgtgcactcaactagagtattaactgtaaaaagatttgtgaagtttggaagctctattcgctgtattttttctttaatttataaacttttagtttaacatgcaaca

SEQ ID NO: 239134 - DNA, 674 bp, Homo Sapiens
agacgatggggaaactactgtaagagtgccagctactgttcaaaacatccccaaatttggtaaaaaaatcgatgggagggcaagtaagaagagttttgttgtgaagattgtatgtccaaattaacagttctgttttatcagatggccaagtgtgatggttgtaaacgacagggtaaactaagcgagtccataaagtggcgaggcaacattaaacatttctgtaacctattttgtgtcttggagttttgtcatcagcaaattatgaatgactgtcttccacaaaataaagtaaatatttctaaagcaaaaactgctgtgacggagctcccttctgcaaggacagatacaacaccagttataaccagtgtgatgtcattggcaaaaatacctgctaccttatctacagggaacactaacagtgttttaaaaggtgcagttactaaagaggcagcaaagatcattcaagatgaaagtacacaggaagatgctatgaaatttccatcttcccaatcttcccagccttccaggcttttaaagaacaaaggcatatcatgcaaacccgtcacacagaccaaggccacttcttgcaaaccacatacacagcacaaagaatgtcagacagatttacctatgcctaatgaaaaaaatgatgcagaacttgattctccaccttc

SEQ ID NO: 239135 - DNA, 172 bp, Homo Sapiens
acagggagtgggaagatgaatgtcttcagtgctgacataatatttaaaaagctgtcaatcacctaaacgcccagctgtaggggactgcagaaatgcatcgtatgaaactcatccactgcatgaactactcttgccatcagcagcattcaaaatacattttcagagaaaaagt

SEQ ID NO: 239136 - DNA, 452 bp, Homo Sapiens
cagccggattcagtgggaagggggttaaactccatctcttgaagggagagtaccaaggttaagaaaggcaggagagtgtggtggccaactctggttaaaaaggtctacaagtatgccagcatttacctttaaatactgtgtatccccacctgtgcttgcaagacaggaagaggaaggcagggagagaggctgcacatgtgggagctgacccactagacacaatatttagatgtagtttaaatcctggctctgctcctcactgggtctgtgattgtcagaaagaagattaatgcctggagggtccacgttccatatatccagtacaccagtgaaaaggtacatgacgctgggcacagtggctcacgcctgtaatcccagaactctgggaggatcatctgaggccaggagttagagatcagcctggggaacatggcaagatcctgtctggaaaa

SEQ ID NO: 239137 - DNA, 464 bp, Homo Sapiens
cattaaaagccagatttcttcattcaattctgttatctctgttttactctttgaaattgatcaagccactgaatcactttgcatttcagtttatatatatagagagaaagaaggtgtctgctcttacattattgtggagccctgtgatagaaatatgtaaaatctcatattattttttttttaatttttttattttttatgacagggtctcactatgtcaccctggcttgaagtccagtagtgcgatcgcggcacactgcagccttggcttccctgggctcaagcagtcctcccacctcagtctcccaaatagctaggactacaggcatgcgtgaccaagcccagctaatttttgcattttttgtagagatggggttttgccatgttgctcaggctggtctcaaactcctgagcactagcaatccacccacctctgtttccaaaaaaaaaaaaaaaaaagggcg

SEQ ID NO: 239138 - DNA, 439 bp, Homo Sapiens
ctaagacttgagttagtatttttgtgtacatcagatacaacactcttctcatcttttttgtcattatttttcaatgttgttttaatctttccactgttgtttcatgtcatgcactttgttaatattctttaagttattcttagtttttaccaatgatacttaagaaagacttaatagggctatagaataggtactccctattccccaaccctgggaacacaatataacatattagttcatttgtatttaagatctatcttgtttacgcctcagtttagttattgctcttacctttcaaacagttaatattttgtatctagttctgtgaaagcaaaaagcaactttattctttcttacaattccccttttacttaatcggaacatttctttcctgtttgttcattagtcactctcagataaatgaatagtctctttttct

SEQ ID NO: 239139 - DNA, 509 bp, Homo Sapiens
atgtattcagaatgtagtttataaagataggaggctccatagataagatggagagactttatgcatagtgtttcctatagcaacgataagctttattcctctttctctaagatagtaggtaatacaaacaagcttaaataatttaaagcaagcccctctttcagtaattttatttttctgtcacttaaaatgatactggtctgatcagtagtggaatcacacctgggaatagccactgctttccagcttaggcaacatagcaagaccctgtctcttaaagttttaaaacaaattattatacatgtaaaggttagtacattttaaaagtgcctggaacaaagtagggtacataatacctaatattaactacagtcatcaaaatttagaaatgcatattataaaagtgtaagaaaaatgaaaaagatgaacttccttttttgttaggtgagcaagttaaaagtcctatttcctgtaatctaagcttgttgatttggggtcatatttataca

SEQ ID NO: 239140 - DNA, 577 bp, Homo Sapiens
tatgagcaccttcacatggatccacttgaggaaagaaggtggaccgaatttgtaaacggtgtgcagcaatatatatcaattcgttctgagataatcgccacttacgctctctgtggttttgccaatatcgggtccctaggaatcgtgatcggcggactcacatccatggctccttccagaaagcgtgatatcgcctcgggggcagtgagagctctgattgcggggaccgtggcctgcttcatgacagcctgcatcgcaggcatactctccagcactcctgtggacatcaactgccatcacgttttagagaatgccttcaactccactttccctggaaccccaaccaagggtgatagcttgttgccaaagtctgttgagcagccctgttgcccagggtcctggtgaagtcatcccaggaggaaaccccagtctgtattctttgaagggctgctgcacattgttgaatccatcgacctttagctgcaatgggatctctaatacattttgaggtcagccacttctccagtggaactctgaagtacagatgctgaattttctgctttggaaagaaaaaaaa

SEQ ID NO: 239141 - DNA, 493 bp, Homo Sapiens
agactttgttttttatattgctgattatatatattctaaggaagattttctcaagaaagcagtttttgcaccatttagaggacctttaaaatttgtataattttcacagttaaagctttcttaaaccctagcatgtagtcttattatgcctttaaaatatgagtagttataaggtcacattgctttcaaaaagctattgtcctcatgttactttactatgtttggatctctaaactagctcttttgttagtatcgtctcacaaactgattattttcctctttctttggtaaggtcaataactgggagatggacaaactagagatggaagatgcagtcacatttttgaagactaaaatctattcagtagaagctcttcctgttgctgctgtaaatgtgcaaagcacacaataaagtgaaaatcaaccttttcatattaggagacatgcatttgtaaaaattaataaagatgacaagtcagttgtcaaaaaaaaa

SEQ ID NO: 239142 - DNA, 302 bp, Homo Sapiens
ctgggaggtggaggttgcagtgagccgagattgtgccattgcactccagcccgggcaacagagcctgggcgacagagtgaggctctgtctcaaaaaaattaaactaaattaaagctatgagaagaaaataaattttcctggtatagtgtccttctctagacctcatgtcctacagtctctgtgaaactgggccaaagatagaatttttttttctgtgctttatacagtgactcagacaaacctatgacctcacacaaatctgtaacttcatgtatcacagtctctataaaactatatcaaag

SEQ ID NO: 239143 - DNA, 655 bp, Homo Sapiens
  misc_feature (115)..(115): n is a, c, g, or t
tgcccccaaggccaaaaaaatgcacccagggtagacatgtggcctttagaattccaggatcatttggttctaagtcgcccatattctctcaggttcacacaagggatctccattntaggtgcaagagatgtagaaagggatttaggcaacagagtgagctaaaaagcatatgaagacaccagtggcaggaaagtgtatcagtgtgagtactgtgagtatagcactacagatgcctcaggctttaaacggcacgttatttccattcacacgaaagactatcctcaccggtgtgagtactgcaagaaaggcttccgaagaccttcagaaaagaaccagcacataatgcgacatcataaagaagttggcctgccctaacaatacttctacagaacgtttgtagagatattggccttgaagcagaaaattcattttaaagccaatcagtctcattcacatacaatactgtatattgatttatgctgtgtacaaatagaattattacttctagttgacttttttttaaatatacattttgctcagtagtgtgttctgaattctattcagtttgtttaataaatagggaaaactggcaacatgctagttacttttaataaagtaatccctgattctataccgaaaaaaaaaaaaaaagggc

SEQ ID NO: 239144 - DNA, 473 bp, Homo Sapiens
  misc_feature (50)..(50): n is a, c, g, or t
ggttgtgaagactgaatgaaaacacaggtgtcaatgatatgttaactganaaaagtaagattaaaaacattaatggatagtataagtttcttaaatgccaacaatgcatgaggtgaatagaataagacttttttttaaagaatgtaatttttgacagtctgaaaagacaggccttatatttatattgagaaaaatgatcctgacatttaatgagacactaaaacagtttttattttttgcttacttattctgttctagaatccaaactctacatactgtttaatagagcattattgatattagctgtattagatgactgtatgaagagtcctgtttgctagaatcctactttatcttttaagttttgctaattaccctgcaatgaatgttgaacataaaaaatttgactccctttccatgtgtccactgtttccttgtgccttttgattaataaaactttatttttaagtgag

SEQ ID NO: 239145 - DNA, 468 bp, Homo Sapiens
tctgtttttataggttgtctggtctggggcattttctataaatggaatgaatcatataacgtgaagttttgtgatgagcttctttcacttaatgttttcaaggtttatccacgttaagtacttcatatatagcatgtattatggccaaataacattccattttatggatataccaccttcatcaactgatggacataggggttatttccactttttggctactatgaataatgctgctacatacattcatacatgagctttagagtggatatgtgttttcagctctctgggatataaaagagtagaattgttgggttaaaactccatgtttaacattttaagaccaggcacaatggctcacacctgtaatccccacactttgggaggctgaagcaggaggatcacttgagcctaggagtttgagacccaacctgggcaatatagcaaaaccttgcctctacaaaaaat

SEQ ID NO: 239146 - DNA, 397 bp, Homo Sapiens
cagtagatttttcaggtttgcccctggccttgtcactttacacattagcagctactgcttccatgtggctctgctaatactccccccttaaaaagattaatatgctacatgcttatatagagacagtatagtataggaattaatagcatgggctctggaataagaatgcctgaattcagaaactagatttactgcatattagctgtgcttttctcatcagtaaaatggatatactagtactttgggattgtcatgaggttgtcatcatcattaaaatttcagtaataggctgggcgtggtggttcatgcctataatcccagcgctttgggaggccaaagcaggaggattgcttacatacaggagttcaagtatgtgagaccgtgtttgtataaaaaa

SEQ ID NO: 239147 - DNA, 466 bp, Homo Sapiens
gagggatggggcaggggactgttaggatgcattataaactgaagaggcttttaaagattacatgtattaatatatgtattcacttgaaaaactaaaaaaatagtaattttttaaaacccatggaggtaactaccagaaggaaaaactaagagaatgaaaagtgctttcctctggaaagaacaagtcgcaggactgttttcattgtaagacttttggagccatttgattttacttaaccattttcatatatttctttaataaaaataattctatcttaataaaaagttacactcattcattaaaaaaagaattttaagactgtaataagaatcatagtttatttctgttagagaaaggcaatgtgttatacttggaaagaggtcatattaattttatcacatttttgggactcagcatctttatattttctgattttaaataaacaactttgcttatgaaaaaaaaa

SEQ ID NO: 239148 - DNA, 495 bp, Homo Sapiens; identical to SEQ ID NO: 88410

SEQ ID NO: 239149 - DNA, 451 bp, Homo Sapiens
taattatcttcaggacctcggcaaaacctgagtcctgtcctctcgctttcctccccgtacacagcgagcttcaccacttgctccgcaccttctccatcaactactacctgtccctgggatctgtccagtcgcccagctaaagtgctcagcaggtcagcagcgcggcgagcttctatgcaggcgtggggtctggggctcctggatctctgtgtcccatttcacagagattgccacctactgccgcctgctagaagatggggaggacttcaatcttggtggtattctggacagcagcaaatacctgtaaagcatccaaaagaccaacacccacaggatagtggacggcaaagtggtgtctgagaccaacatcacagacgtcttgaggtgctaaaccagcagaagcaaggtccctttgcggagcaggagggcaataaaaacttctgtggtcaaa

SEQ ID NO: 239150 - DNA, 374 bp, Homo Sapiens
agagatagagtttcccatgttggccagggtcaatcctcgcaaccctcaggtgatcacctggttcggcctccaaagtgctgggattcaggtgtaagtcactgtccccggatgcatgtcaagcacattggaaagttcttacaacaattctgatggaggattttctctcccatcaaccaaacaccacttaagattaacctgtggctcagtctacttaaataaatgccatatttattttacttatcatttagaatctgccattctcaggaacaaaactttttgtacattggaaatggaaaacattgcagtttggtcttaatttccacatgaatatcaagtgtaatttttaataaattatttggagaaaaatgtaaaaa

SEQ ID NO: 239151 - DNA, 482 bp, Homo Sapiens
tttttatctttgaaaagtgggccccaaagttttttggggtacaaaaagacatgtatgagaaccatattttctgtttctctttttcactctctaaactctttttgtataaataaggattatcctgggcataattcatttgaatatgaaaccaacatactttctttcatttttgtgaaaaaataaccaaaaacatgtattaatgtgatacaaagaaagtctcattcacacaatcaacaatgaggctaagaggtagctaccatgtggctaatgaatgtgcctagggtaacttcctgtttctattcaaaactgctgctttatttgtacattcagaaatatttttttcaactatgaaatttcaatatcaattttttaagccagtttctgcaaaaggaaatgacctgtcatttgatgtgttcatgtgtgttttgtgtttggatagtttatatcatgccattctataaaatgtatgttttcaaaccaaa

SEQ ID NO: 239152 - DNA, 494 bp, Homo Sapiens
agcggccagataataaataatgtaacctttgcggtttaagaggataaaatggaggatattattatgtgggtacctgtagtcccagctactccggaggcttaggcaggagaatggcgtgaacccgggaggcggatcttgcagtgagcggagattgcaccactgcactccagcctgggtgacagagcaagactccctttcaaaagaaaaagaaaaaagatgtaaaaaccatttttagtttgtgggccttacaaatcaggccactggcccattgcttgtagttagttgatccatgtcatgcaccctaaaaatggttctgtcactgtgagtggcttcagtaggattttgagaataagtttatattcttgctaggtaaaacaaaacaaaaacgacagtaataccaaggaatttccccccccttttaccctccatttgtgtttattgcatatccactataacaacattaaaggacctttaaaaggaaaaaaaaaaaaaaa

SEQ ID NO: 239153 - DNA, 514 bp, Homo Sapiens
atgaagactacatgatgtttttcttctattgaactaggagccgaagctaattttatgctgaaagttcatcctctgaagaaatatcctgtggatctttattatcttgttgatgtctcagcatcaatgcacaataatatagaaaaattaaattccgttggaaacgatttatctagaaaaatggcatttttctcccgtgactttcgtcttggatttggctcatacgttgataaaacagtttcaccatacattagcatccaccccgaaaggattcataatcaatgcaggtatccagggtttgatgtggatatgctaaattaattttttgcttataaaaatctcactttgtttttaatgtaaagaacttaccaaattttatatttttatcttataaaataagaataaaaatatttggtgaggtggggaggtttcttcatatctgaaaacttctgagatgaactgtagattgggctttttattttatatttctttaaatatttagtcagtttttatcacc

SEQ ID NO: 239154 - DNA, 606 bp, Homo Sapiens
agcattcctctttccttcactatttagcctatgattttgcagaggtgtcacactgtattaggatctgcatttctaaaactgacgtggtatcaggaaggcattttcaatcattcaaaatgtggagaatttaatggctaaatctttaaaagccaatgcaacccacccaattgaatctgcattttcttttaagaaaacagagctgattgtatcccaatgtattttaaaaaatagggcaattgattgggccattccgagagaattgtttgcaagttttgggttttattagaaaatatttgaaagtatttttattaatgaaccaaaatgacatgttcatttgactactattgtagccgattttcgattgtttaaccaaacccagttgcatttgtacagatccacgtgtactggcacctcagaagaccaaatcatggactgtacaagtctctatacaatgtctttatccctgtgggcagcaagcaatgatgataatgacaaacaggatatctgtaagatggggctactgttgttacagtctcatatgtatcccagcacatgtaattttttaaatagtttctgaataaacacttgataactatgtcaaaaaaa

SEQ ID NO: 239155 - DNA, 544 bp, Homo Sapiens
atgttgatgcctaagaagaaccagattgccatttatgactcctttttaaggagggagtcatggtggccaaggacatccacatgcctaagcacctggagctgtcagacaagaatgtgtccaaccttcctgtcataaaggccatgcagtctctcaagtcccgaggctacgtgaaggcacagtttgcctggagacatttctactggtaccttcccaatgagggtatccagtatctccgtgattaccttcatctgcccccggagattgtgcctgccactctatgccgtagccgtccagggactggcaggcctcggcctaaaggtctgaagggtgagtgacctgcaagactcacaagagggaaagccgacagagatacctacagacggagtgctgtgccccctggtgccgacaagaaagccgaggctgggactgggtcagcaactgaattccagtttagaggcgaatttggtcatggacatggtcggccacctcaataaatttggagagggttattttgcattgtataaacatccagccaaaaaagctt

SEQ ID NO: 239156 - DNA, 573 bp, Homo Sapiens
tgagactgaaaagtttgggaaaaacaaatggaaagagatgactgcaggacttatttgagcccgttacacattcccatgcaggggaatccaggctgtgctgtttcccagttgtgtttgctggtgagaacgttttttcaggcaggcaagtctgctcggaatagtgttctttggaacatactttgggaaatgctgacatgatggttaagagcgctggctttggtgtcagacccagattcaaattcttgctctgacgcttcctggctgtgtgatttttgacaagtcacttaacccctctgagcctcgatttcctctttctgtcaaatggaatgatcatagtactttcatcttaaagctgttgtgaggattaactacgagtgaatgcagtgtttcccaaagtgtgtacattcagcgtcagtgatatatgggatgatttcaggtcttacgtgagtaaactttaaaaaatagtcctgagttagcttttgtgaactttagaaagctgagtgtcatgcctcagccccttgatttcacacgcgattgcttagggggaggctaagttaaaaaaaaaaaaaaaaa

SEQ ID NO: 239157 - DNA, 543 bp, Homo Sapiens
gaaaaaaatacccagagaaaaaactttccttcttcccccttcctgatgatgagtgagaagtattgagaactttcggggtcagtgcccttctaaactccccttcccccaataatgcagctgtataatgaatggtaaatgcaccggtttggattcaggcacagccccagtctgcctacagcagacaactaaactggtaggtggcagcagaggaaggaattcttcagattgatggttactgacttaaagtctgcataggagaagagatagagcatgacataccaagtgaagcaagggggacaaaaatggaaacaggactaagattcctgcattttgactctaaatggttcttttgaagtaaccagtgatcttttttgcttaccctcatcaacagaatggatgaagatagatttgactgtgtgctttttcaagtggagaatatgaatatacagaacaagaaagcaataacgccaacctgtttgattccgtctgttttgtaaataaagacactatgcgctggaaataacgtaaaaaaaaaaaaaaaaa

SEQ ID NO: 239158 - DNA, 555 bp, Homo Sapiens
ggcaaaaagaatttcacagatgacaacccttactgatgggaagcagaatcctcacgctgggaagcgtcagcctccaccactgcccagcgagtagacagcaggactcctgtgcgctgagctgagcactgtggtttttgttattttgttttagatctcctctggcaaacacgacatataatatttttataatggatggaaagacatggtggcacaattctgaagaaaaaaatttcacaaaacttgcaaaaaaacagaaacagttgaagagcagctcctgtgtctaagccaggtcgtggggccgtcaaaccaggacttgaaaccacaatgcgaggacattctccatctgcgcaccacagggaggcaattccatttctgcccgggaggtgtattctacaaaaacgtctgcttcccatcccaatttgaatggaccaagaaaaactgctttaccataggacacttgtggcaatatggcaccgatggctggcgtcggtgaacccgacagactatggatttatcatttaataaagcattgattcctaaaaaaaaaaaaaaaaa

SEQ ID NO: 239159 - DNA, 546 bp, Homo Sapiens
ctgtctttgattttggaggctttcttcaaatttgtgatatatgactgcctattcatatttaagggtaaagcactaaaatgctcattgaaagctctttggatggtctagatttgttgactggtagacttccctgtagggtaattgttatctacctggacttttgttggggtacctgaaatggcggtgttttggtaggtgttttttcgagtcatttactttagagaaaaatcctccaagttccttcatggaggatatgagtctagtgccagtgtactgagaacaaattcggggaagggcatatcgttaaggagggaagagacaaaaaacagaggacttggttgaaagtcagtaaaccaagcataataaggtgaagtcttgcttcctgaaacatatttcaggccagttgcagtggctgacacctgtccccagtactttgggaggccgaggagggagaatcacttgagcccagcggttcgagaccagctctggtaacatagggagacttcctctctacaaaaataaaacgaggaaaaaaaaaaaaaaaaa

SEQ ID NO: 239160 - DNA, 424 bp, Homo Sapiens
gaggggatttttcaaacacaatttcaaaaactaagtgaatgactctgacatggtaaattaaagcttgagcctaatgactgcaagctaaggttaattttgagccagcagacggaggttattaaaggcccagttagttccttctggaaagcctttcctgcagatgtcccagcctgcttaccgcagccatggaagaagcctctatagtgagagaagctacagagccctggaaagctggggccccacaggcagatgcagttaaggttaagatagaagaggtttgggggtgtcttacggaaccctaaacctaaccctaaactgaaccctagccctaaattgttaaacagtaaattgttactgttttgaggcagattcgagaggttttaaaataaaccagttagacgtacattaaaaaaaaaaaaaaaaa

SEQ ID NO: 239161 - DNA, 515 bp, Homo Sapiens
agatactcaataaatgtgcagtgattcttagccttttttcctagaactttaatattaacatggaaaattctgaaatggacaacaaaaagataacactttgtgtatggggaagaatatcatgcagttgatgacggtacattaaaattcacacaaaaggacattttgactagcattcagaaagagtccattgattataagattatctatgaggttttggaccgggcactacactaccgaattatggctaactttggtttgtgatctagaccaagtcacccaatctatcttggattttagttttctggtttatgaaattaaggagttaagctaaatgacttgggtttcttttcgtgtatcataatcaaaatgctgtaacttctctagtgaattcatagaacactgactcttacaagtatgtcatgaaatactttatgctgtgagcaggtatacatgtataatatatgtatagctatgaacaaataaattttaaataaatgcaaaaaaaaaaaaaaaaa

SEQ ID NO: 239162 - DNA, 531 bp, Homo Sapiens
tatttaaattagttgatactcttggttaggtaatgaaaaacaatggttttatctccattatgctgtgatagggaagagtaacacagttcaaatggcaaaggcatacctgacaattaaaatgcatagttaaaggctaatacttcctgaacacaagaagacaagtctctacttgatactactctccacagttaaatcattgatactttgtgccatacagtgaaaacagaaccatctaggtgttcacggattgtatttttccttatgaaaggtagaaggttagagaaaattattcccaatacaattaatacaaataaaattggttattaggtgccttttaattaggcagtaagggcatatgaagcttcattacctatgagaattttgtcaaaattatttcccagttaccatgttttaaaacagcctctcagaattccccacttctaatttctcctttctattctaccaattttactccatacctttttgctaaataaacattttcttccaactgtggaaaaaaaaaaaaaaaaa

SEQ ID NO: 239163 - DNA, 603 bp, Homo Sapiens
  misc_feature (38)..(38): n is a, c, g, or t
tggaagagcagttgatttaggtcagttctccttgattntagaagcaagcggtagtcaaccacctccaattccgccaatctcttgcccccatcatttgtctctgacaatacttggtgttttccctggttttctgtcactggcacaggagggtacagttgggagagtgcgttcctggagctcagtcctgcatttgttcacgtgcctcacagcaggcctttgtgcccttgaatctcaaacatggggatctgcttggtacccagagctctggtcattgtgtccaaccacacaccccaccccatccgtgtcctccatctcacccagaaccacagggtgcccactagtgtcagggcccaaagtgccagccttctcttctgccttacctagtctacctatttatttcctccactttttatcttaaaagtagctaagccatgctggtgcccatactccaagcaggctgcctcagctcagagaagtggtcagagagtagagcacagaacctgtgatgtggggacatttggtttcttgcagatcatttaatgaatcctcaaggactaatgaaataaatgctagactgctgaagatgaaaaaaaaaaaaaaaaa

SEQ ID NO: 239164 - DNA, 449 bp, Homo Sapiens
accaaaacagtggccacccgtcttcctcctgtgagcctaagtgcagccgtgctagctgcgcaccgtggctaaggatgacgtctgtgttcctgtccatcactgatgctgctggctactgcatgtgccacacctgtctgttcgccattcctaacattctgtttcattcttcctcgggagatatttcaaacatttggtcttttcttttaacactgagggtaggcccttaggaaatttatttaggaaagtctgaacacgttatcacttggttttctggaaagtagcttaccctagaaaacagctgcaaatgccagaaagatgatccctaaaaatgttgagggacttctgttcattcatcccgagaacattggcttccacatcacagtatctacccttacatggtttaggattaaagccaggcaatcttttactttgaaaaaaaaaaaaaaaaa

SEQ ID NO: 239165 - DNA, 536 bp, Homo Sapiens
aagaattcggcacgaggcctcgtgccggccctggtggagacacttggggagccatcaccacggaacaaagaactgaccctgcaaacagccagaaggcatcacccaaaaagatgcccaagtcagggggcaagagccgcgggcccgggggcagctgtgagttctgcgggaagcattttaccaacagcagcaacctgacggtgcaccggcgctcacacaccggggagcgcccctacacctgtgagttctgcaactacgcctgcgcccagagcagtaagctcaaccgccaccgccgcatgcacggcatgacgcctggcagcacccgcttcgagtgcccccactgccatgtgcccttcggcctgcgagccaccctggacaaacacctgcggcagaagcaccctgaggcggccggcgaggcctgagcccaggaaagcccccctcactgtccctggtaccgctgccaacacccattgacctcctcgtttttgcccgccttctccaagtaaattttcccttttatttaaaaaaaaaaaaaaaaa

SEQ ID NO: 239166 - DNA, 775 bp, Homo Sapiens
tcctaatgtccgggtggccaacgatgctcgagagctggtggtgaactgctgcactgaattcattcaccttatatcttctgaagccaatgagatttgtaacaaatcggaaaagaagaccatctcaccagagcatgtcatacaagcactagaaagtttgggatttggctcttacatcagtgaagtaaaagaagtcttgcaagagtgtaaaacagtagcattaaaaagaagaaaggccagttctcgtttggaaaaccttggcattcctgaagaagagttattgagacagcaacaagaattatttgcaaaagctagacagcaacaagcagaattggcccaacaggaatggcttcaaatgcagcaagctgcccaacaagcccagcttgctgctgcctcagccagtgcatctaatcaggcgggatcttctcaggatgaagaagatgatgatgatatctgaaattcaccagctgagtttctatttcttctataaatgtttttccctgcacaacaaaaacagtgaaagaaatgcttatctgtaattttgtatgcatcttggtggacttgtcattggtattctagggatgtctgctattaagtttcatctattgtgtgctatacatgtaaaaactgtctctttgaactattgaaaatttaaggttcagtataatatcaattttgaatttttaatggtgtttatgaaattttagatagcagcgagtccttcgtttgatcaataaacagtgttacggataaaaaaaaaaaaaaaaaaaaaaaaggg

SEQ ID NO: 239167 - DNA, 812 bp, Homo Sapiens
caaaggtcatatgttttcacagtcattcaaattatatcccaaaaacttttcttgtattctctatcttttgacttttttttcaaagaactgattgcacagtatacagaaatcctgttatactttactacttaaggtggagtctaattttttttttttaatttatcagtgcttaaaaatcttcaaaatagcttagtgaggctcatgacagtgctggccccatggaaatgtagccttttgttgcgtttaaacactgtcacaccatctatgactgtcccattggtctgaagtgtagtggcaaactaagcatcctataagacaagctaaagcttgctttttgccagtcagttgaaagtcttgcatctcttcactgatgcactttctttaggtattgatagtcagaagcacaaagcatttattatgcattcaatcatgtagctaaacaaaaaactgaagtctcctgaagccatttaaaccagccgttccaaaatctcctgcgaccactttgttagtaccgtcaaaaactttcccaactataaatgaaagaataaatggtagtgctgctctccagatactaggcactgctccgtatttttgaacatttgatttaactaataactgtgtcaaaagcctcaaaaaaccctgaaattaattttccagctttactgtcaccagccagaagtaaaaatcttaatttgcctgttagctgattgctgttaaattttaaatttattttttaaaaaactggttggacttctatcattataaagtatataaaattttcaaaaaaaaggaacaattttctttcaatcccg

SEQ ID NO: 239168 - DNA, 830 bp, Homo Sapiens
ccaagtagagctgatacagagatctgtgaatattgtgatagaaattctttggtattcatacatttcagctgcaagtcagcaatttcccaggtaccatgtaagctataaaacagtcattcttaaagacagaggatagctgtgactcatgggatcatgaggtccatggctggttgcaggttccctttttccttcctcaggttttgtctcttcctgtgttgtccccagcaagggagagactgtggggtggattgggagaacagattaggagtatagcaaatgaacccagaatggaacagtggggagctaactgtgaatgaggagagtacctgctgcaggacctggaggtcaggtgtgaatgctgtattggcacagggaataaatatcctggcgtctggagccttcacctctccgtcaagtccttcctgtgatactgccatggcacaggatctgagttgcagctctgcaccctaaatcacaccctgggcattgtctgggctgcagggctgccaggttctgtacttgtgtccagctgtggccctggatgctggagctggagggttttctgtgctcagactgtagcctgtagctcttggcctgtgtagagccccctcctgtgccctcagtggctgtcgtttgttaacatcatcaggaagatgggaaaggtcaggcagaatttttctgccctacaaagggtggaagagaaaggacacagtattttcatgaatttaccatatatctttgtttttcttcaacgaaaaagttaattgaggcaatgtcatctgctcaaagttgagtggtttattcacaataaactgtaagtttctgattat

SEQ ID NO: 239169 - DNA, 411 bp, Homo Sapiens
aacctccgtctcctgggttcaagcgattttcttgcctcagcctcctgaatagctggggctacaggcatgtgccaccaggcctgtctaatttttgtatttctagtagggactgggttttaccatgttggccaagctggtctcaaactcctgacctcaagtgatccatccgcctcagcctcccaaaatgctcggcctccccaaatctgttttagtggtacaggtactcatgcacatgagtaccgctcctggccttggcactctttatacgttgtaaacattgattgtttttgtctttaatatattttagaaatattttccctagtctttttgcttgtccttttaaagataggcccctgttatcatttgctgtaaatgtcatcatctgcatagaaaatccaagattatcagttg

SEQ ID NO: 239170 - DNA, 631 bp, Homo Sapiens
gaaagggtggttaagaaagaagatgatttaatgtctgcactagtttcgttaaggaccagctggccagatacccagcaaagagagcaaagtgcttatgaacaggtgaacaaagttttgcaaatatctgaggaagccaattttgaaaaaaccaagcacccttcacaatagcaaacgtaaacgatggaattgatggaatcaaccgaaattgacggaatcaatctaaatgttcatcactgacagattgtgtaaagaaaatgtggaacatggacaccatggaatagtatgcagccataaaaagaatgagatccgatcttttgcaggaacatgcatggagccggagacagttatccttagcaaactaacgcaggaagagaaagccaaatactgcatattcttacgtataagtgggagctaaatgataagaacttatgagcacaaagtaggaaaccacagacagtggcatctccttgaggatatagggtgggagcagggagaggagcagaagagatcactattgggtactgggcttaatacctgggtgataaaataatctgtataacaaaaccccgtgacatgagtttgcctatgtaacaaaccttcacatgtacccccgaacctaaaataaaagtta

SEQ ID NO: 239171 - DNA, 622 bp, Homo Sapiens
actctgaacaacattaatgtgataaaaaaagccatggttgaaagcattgaatatagaagacagaatccatctcgttgctctgtttcccttagtaatgttgaggcaagaagatttttcaacaaggagtttctaagtaaacccaaagcatagttcatgtactggaaatggcagcagtttctgatgctgaggcagtttgcaatcccatgacaactggatttaaaagtacagtacagatagtcgtactgatcatgagagactggctgatactcaaagttgcagttacttagctgcatgagaataatactattataagttaggttgacaaatgatgttgattatgtaaggatatacttagctacattttcagtcagtatgaacttcctgatacaaatgtagggatatatactgtatttttaaacatttctcaccaactttcttatgtgtgttctttttaaaaattttttttcttttaaaatatttaacagttcaatctcaataagacctcgcattatgtatgaatgttattcactgactagatttattcataccatgagacaacactatttttatttatatatgcatatatatacatacatgaaataaatacatcaatataaaaata

SEQ ID NO: 239172 - DNA, 403 bp, Homo Sapiens
ggaacttttaaaaaaaaatttttttttaagagccagagtctcactttgtcacccatgctggagtatagtggtgctatctcggctcactgcaaccattgtctcccaggttcaagcgatactcctgcctcagtctcctgagtagctgggatcacaggtgcacaccaccacgcctggctaatttttttatttttatttttagtaaaggcggggtttcaccatgttggccaggctggtctcaaactcctgacctcaagtgatatgcctgccttgacctcccaaagtgctggggttacaggcatgatgagccaccgcacctggcctgacctgcaacttttatgatctctggtaaaacatgagaaatacttgtaaaaattatgggagcaaagtaaataatttatttttt

SEQ ID NO: 239173 - DNA, 427 bp, Homo Sapiens
tccttaagcctttgtttgtgtatctgcctaaactcattgagagttgggactatttcacacatacagtgcctggcatgtagaagggacttaatgttgaaagaaggggaggcattttaaaatccacatcaaaaaaatgttgttctgtttgggagtggtggctcacgcctgcaatcccggcactttgggaggccaaggcgggtggatcacctgaggtcaggagttcgagatcaacctgagcaacatggtgaaaccccatctctactaaaaatacaaacattagctgagcatgggggcgggatcctgtaatcccagctacttgggaggcttaggcacttgaatgagaatcacttggccccaggaggtggaggttgcagtgagcaatgattgtgccactacctgggcaacagagtgagactctgtctcaaaa

SEQ ID NO: 239174 - DNA, 500 bp, Homo Sapiens
tgaagatcaaaggggatctgttgtaatgcctggcatgcagtaggtacttaatagtagctcttgttgcaaaaccaagcagtgaacatgtatctgactttctataacccccttccttggggcctccactcatgaggcatgggaaggtgttttttttctttgtttgtttgtttgtttgaatgcagttgactttttttttgttgtattgttgcaaaagtaatccatgtgattgatgtttattatgaagaaaacatttaatacagatgaaccaggagaagaaaatgaagttcatccttaatcccagcacccagagataaaccactgttaacattttggaatgtgtcctgtcaggcattcgtttatacacacatatatcttatttgcaaattggggttactggtgcaatttttctaacctgctttttctcccccatttaacagcgtagtgtatccatgtttccatttcaataaatatttttctacaacatcaaaaaaaaaaaaaaa

SEQ ID NO: 239175 - DNA, 445 bp, Homo Sapiens
tctatgatctagggactgggtattctcattgttcctggggtatcactgcttctagtcctcagtggacagcactaggaaatgtatgtgtatatacacattctaaatttgtttttacttaatagagatgaaatagagtcatgcagcttttaaatatactactaaagttattatttctttcatcacatccaatgcaaaaatttaaaaattctgcttttagatgacatggatctcattcatgaaacattttgaattgaaagaagatttatgttaagatgtaatcatagcatgcacttgtttaaaggatataggaatctgaaggagtgcagcttcttcatggtttctgagtacaaagattctttccaagtaatgttttatcccaaattatgcattaacagtgtccagcagtatgtatgttttgaataaattttataaatataaataaaaa

SEQ ID NO: 239176 - DNA, 413 bp, Homo Sapiens
ctgtgttggcctcagtgagggttgggttccgcttctcaagacggttagggactgtttctctctgtttctgggctctgccatccatattgttagcattatcctaattctggctctgcattatggtgggctgttcactgtccacagcagggaatgtttggaagaactttctcagaaggcccagagggccggatgccaggagtttgagacccgcctggccaacatggtgaaactccggctctactaaaaatacacacacacaaaattagctggccgtggtggcgtgcgcctgtagtcccagctactcaggaggctgaggcgggagaatcgcttgaacccgggatgtggaggttgcggtgagctgagattgcaccattgcactccagcctggccaacagagcaagactccatctcaa

SEQ ID NO: 239177 - DNA, 562 bp, Homo Sapiens
agaactggtgtagcaatgatgcttcatattctagctgtagccacagagttgagggtagtttttgtaggtctaaaataataatctataaagatgtccaaagttaaattttcaacaatacaaatctagagaagtgacagcctacattacttcattattactcttcttttagtctttagtctttaatattttaaagtttactctataaatcagcattttgtaatcctttataaactcatccagatttaaatgctactttttcatgaagaaaggataactttatagacagtcagtgcaacacacacattttatctcatcaccgtcttactgcctccccatccattgtctcataaagccctcagctgaactaagataaataatacaatggaaattattttcagttccccttgcactgtcaaagtaaaacaagaaaactgaaaagctgcacccccagcaagaaagggaagtatgctgttgtatgcatcattactcaacaattaccctctaactaaacatcctgtttaagagtttaattcaaacaacagccagactgttaagaaaaaaa

SEQ ID NO: 239178 - DNA, 546 bp, Homo Sapiens
  misc_feature (333)..(333): n is a, c, g, or t
caacaaattacattaatagattttcactgttattgtttatcctgggagaaagcatacttgtgaacttttttaggtactgtgctttggaaccaaatttggaagtgagatgaaatgtcagctgtactctcctggttaggtatgatttcagggtcaggtatgcctgataaatgaagtgagatgctttaactttgttctagaatagtttctactgcatgggaatgatctgttccttgaggatttgtcacagtctgcccacagtggactggatttggcatgtaggatgttaatttctatttactttgcaagaaaaatacagtttagcaagcaacaganacatactgaacatgaacctcaccgtccctctctcagctgtagctccttctgcgtctgcaacctggcttgttcccacgacaaaggaacatcatattttttcaaatcgtttttaaaaaaatacacacatatctgaccatcttcactcagcgcctctgagaaaacaatacaaaaacagataaagaggccagcctggccaaccctgtctcaaaaaaa

SEQ ID NO: 239179 - DNA, 565 bp, Homo Sapiens
  misc_feature (90)..(90): n is a, c, g, or t
gggagtaccatggtcagtctttccacggcaggagggcctgcccagaagctccagggaaatggcgtggctgggagtcccagtgttgtcccngcagctgtggtatcagcagctcacatccagacaagtcctcaggctaaggtcttgttgcacatgacggggcaaatgacagtcaaccaggcccgcaatgctgtgaggacagttgcagcgcacaaccaggaacgccccacggcagcagtgacacccatccaggtacagaatgccgccggcctcagccctgcatctgtgggcctgtcccatcactcgctggcctccccacaacctgcgcctctgatgccaggctcagccacgcacactgctgccatcagtatcagtcgagccagtgcccctctggcctgtgcagcagctgctccactgacttccccaagcatcaccagtgcttctctggaggctgagcccagtggccggatagtgaccgttctccctggactccccacatctcctgacagtgcttcatcagcttgtgggaacagttcagcaaccaaaccagacaaggatagcaaaaaaa

SEQ ID NO: 239180 - DNA, 600 bp, Homo Sapiens
  misc_feature (25)..(25): n is a, c, g, or t
  misc_feature (41)..(41): n is a, c, g, or t
  misc_feature (58)..(58): n is a, c, g, or t
  misc_feature (104)..(104): n is a, c, g, or t
  misc_feature (123)..(123): n is a, c, g, or t
  misc_feature (567)..(567): n is a, c, g, or t
  misc_feature (570)..(571): n is a, c, g, or t
  misc_feature (586)..(587): n is a, c, g, or t
  misc_feature (592)..(598): n is a, c, g, or t
gtgtgtgactggcatccccaattgntccatcaacgaagacntgcttcaacatccaggncggcttccgctgcttggccttcgagtgccttgagaactaccgccgntccgcagccacccgctgtnagcgcttgccttgccatgagaatcgggagtgctccaagctgcctctgagaataacctactaccacctctctttccccaccaacatccaagcgcccgcggtggttttccgcatgggcccctccagtgctgtccccggggacagcatgcagctggccatcaccggcggcaatgaggagggctttttcaccacccggaaggtgagcccccacagtggggtggtggccctcaccaagcctgtccccgagcccagggacttgctcctgaccgtcaagatggatctctctcgccacggcaccgtcagctcctttgtggccaagcttttcatctttgtgtctgcagagctctgagcactcgcttcgcgtcgcggggtctccctcctgttgctttcctaaccctgccctccggggcgttaataaagtcttagcaagcgtcccacacaaaaanggnnttaacaaaagggccnnaaaannnnnnnca

SEQ ID NO: 239181 - DNA, 542 bp, Homo Sapiens
tagacgcttacggggcctcggaccccggcgccgcggcgacctcggaggaaccggctccttgcgtcccgcctccctgggagctccgcacgggatttgcagatttacagaatggctgcacattaatggaaagagaagcataaacctatcttctttcattatggagggaggtttggcagatggagaacctgatcgaacttcgcttcttggtgatagcaaagatgtccttgggccatcaactgttgtagcaaacagtgacgaatctcagcttctgacaccaggaaagatgagtcagcgccaaggaaaagaagcttatccaacgccaaccaaagatttgcatcagccatctcttagtccagcaagtcctcatagccagggttttgaaagagggaaggaagatatttctcaaaataaagatgaatcttcactttctatgtcaaagagcaagtctgaatctaaactttataatggctcagagaaggacagttcaacttcaagcaaactcacaaaaaaagaatctcttaaggtacaaaagaaaaattacc

SEQ ID NO: 239182 - DNA, 560 bp, Homo Sapiens
gaaggaaattttcagatcgaagatgtacaatgttaaatgttcataccagttaaactgcactttcccaaggggacagctggcatctacttgaaatgggcatcaagagaccaccaaatgtttacagtttctgtggcccgtttaagtgtaaaatgcagaagtggctctgtccccccagagttaaggatttgctacactggtcctctggaagcatttaagtagaagaaaaggcttatagtcagaatcactttagtaatcgtcttctggtccttggacttttctgttctgtaatgcttgtaacaatgaatatggtgttgccaatctagtctgatatcattgttgacctgtacttactttgtggatggttctacctggggttgcactggcacaaacagagccagaacactggactttcaaaagaccattttgacttctacagtgtccacacacatgaatttaaatgcacttgtaactggttaattaccatgaagtaagtctaacttccacttaataaaagtttttgtgtaaaaaaaaaaaaaaaaaaaaaaaaaaaaaaaaaaaaa

SEQ ID NO: 239183 - DNA, 560 bp, Homo Sapiens
aaacctctgggggtatgaacgggtagatgaaattatttgggtgaagacaaatcaactgcaacgcatcattcggacaggccgtacaggtcactggttgaaccatgggaaggaacactgcttggttggtgtcaaaggaaatccccaaggcttcaaccagggtctggattgtgatgtgatcgtagctgaggttcgttccaccagtcataaaccagatgaaatctatggcatgattgaaagactatctcctggcactcgcaagattgagttatttggacgaccacacaatgtgcaacccaactggatcacccttggaaaccaactggatgggatccacctactagacccagatgtggttgcacggttcaagcaaaggtacccagatggtatcatctctaaacctaagaatttatagaagcacttccttacagagctaagaatccatagccatggctctgtaagctaaacctgaagagtgatatttgtacaatagctttcttctttatttaaataaacatttgtattgtagttggaaaaaaaaaaaaaaaaaaaaaaaaaaaaaa

SEQ ID NO: 239184 - DNA, 550 bp, Homo Sapiens
ttggagcaggtgacaggctcaggagccagtatcaagctctcagtcaagatccaaacagtctttcaaacctagatcaggatctccccaataatatgatttaccaagtcgccattaagtctcttcctcaagactggctgtggtgtgaaacctggtgtgatgatgaatccaaacaaagagccaaaacaattgatctgtgcaataatcccaaaacaaaagaatccaaactaaaagctgctgccagaattgtcccagaatgggtggagtatgatgctgagataagacaactattagatcatcttgaaaacaagaagcaagatacaattttgacacatgatgaactctagcactggtgtatatgagaaggaaggcgaaagcatgacaggaaacctgccgcctgctggggaagtctggagcccctgctgagacgatttggaagtctcgttaagatcagtgacatattctttaattttaaaaaattgtaattatttaaaacagttatttaatgtattgaatgagtttaagttatataataaatgaccattgagtattt

SEQ ID NO: 239185 - DNA, 551 bp, Homo Sapiens
tgacttagcctaaacaacctggtgcatcgaaatgtattcacctttcttttgtaaagagaccatcttctatcttctttccacctttctctgttttatgaaaccaactgttgacatacaaaccatgattgaaggagaacctgtccaacatgttttatgtacacaaatccctatgttgctataagaaaagtgaaagtaactgttttcttcttggtgctatgacagtgtgagactcaggttgtctgtagagaatgaaaggagcagtggcccgcgtgattgtggcatttaaggagcagtggcccatgtgactgtggcattttcggcacttttcattactttctgcttgaccggaagttgaggcttagctatgtttccatcttcagtttctgaagactagttatatattccttactagaaatatattcataatatataaaagaaatatatctgtgattttaaaattttgctaccaaagaatgcatgttctgtgtgccctgaaaatgttaccagtgttaataaatggatacttatcaaaaaagaaaaaaaaaaacaaa

SEQ ID NO: 239186 - DNA, 552 bp, Homo Sapiens
ggctgtggctgaggctgaagccagggctgagtggttccaacaccagcactggctttactggcgaacccagcaccagcacgggcttcagtagtggacccagttctattgttggcttcagcggtggaccaagcactggtgttggcttctgcagtggaccaagcaccagtggcttcagcggtggaccgagcacaggagctggcttcggcggtggaccaaacactggtgctggctttggtggtggaccgagcaccagtgctggctttggcagtggagccgccagtcttggtgcctgtggcttctcgtatggctagtgaggtttcagatttattccccatgtttacagataccgctaataaattgcagtagtccttcccatggagccaaagtacatccttggaatctttgtccacacagcagtcaaggcagttatggccaatcagctgagggtgtcatgtgatggaaaaatctgtttgctgttcctgctttattgtttgctttctgtgtgctgtcatattttggtatcagagttacattaaatttgcaaaatgaaaa

SEQ ID NO: 239187 - DNA, 545 bp, Homo Sapiens
aagcaaatagtgccctcagctactgcagaagaaaagtcccactgaggaaaagaaagtcttgtgatttttaaaggcaagttttcaagtgctctcatagttctatcctctaattccattaaatccatactaggagcgtcagtgagggttttcatagcttttggaaatactttggtctctgaactgtaattagcaagaagtaaaaacagaaacgtcaaacgtcaaatgtttgctttgttacctggaggactaaatgtagatgtctttagtatactttgtatgttcttaatattggaagataattttgtgaatctgtagattttattttttcagtcttaccttacaaatttcttttctatgaataatagaggaacttacggcactctgccatttgttaatgaaaggaagtgcagaggatttagaaaagtacatgatccccagaccacaacaaaccaaaacataaactcatgtctgtgtcccatggtcatagtcaaagattttgtactgctaaaattaccaaataatttaaataaagtggatttgaacac

SEQ ID NO: 239188 - DNA, 542 bp, Homo Sapiens
tttacataatatagaaagatatgcatatatctagaaggtatgtggcatttatttggataaaattctcaattcagagaaatcatctgatgtttctatagtcactttgccagctcaaaagaaaacaataccctatgtagttgtggaagtttatgctaatattgtgtaactgatattaaacctaaatgttctgcctaccctgttggtataaagatattttgagcagactgtaaacaagaaaaaaaaaatcatgcattcttagcaaaattgcctagtatgttaatttgctcaaaatacaatgtttgattttatgcactttgtcgctattaacatcctttttttcatgtagatttcaataattgagtaattttagaagcattattttaggaatatatagttgtcacagtaaatatcttgttttttctatgtacattgtacaaatttttcattccttttgctctttgtggttggatctaacactaactgtattgttttgttacatcaaataaacatcttctgtggaccaggaaaaaaaaaaaaaaaaa

SEQ ID NO: 239189 - DNA, 545 bp, Homo Sapiens
ttaaagttatccccttgctactttactgatacctttatcattcctgagacagtttgctaatttaaaaatgtagcattccatttgtatttatttctctcccttgccaaaaagattttctaatactgcttgtaccagccagagaaagatccaaaacactactcagctctcttgcactgaggaaatttttccccctacattgactcctggcctacatcagccaaacttaaccttggtggggtttggatttgatagccaattagttctgtgctggttgcaaagaattgatatttagatggtttttaatactcagcagattgtcttcctttatattgtgtcttttttatgttgcatgttgcttttgttatcagcctgattttttgctcagtatatgatagttctgctgatgttttgtttattgggcagacatatcttcattaagagtttttggaaaactcatcaaattcgatgaatacattttcttcataacccatttggaattattcctaataaaatgataaaatacgtaaaaaaaaaaaaaaaaaaaa

SEQ ID NO: 239190 - DNA, 554 bp, Homo Sapiens
accctgcccagggttggcatgactgtctgtgcaccgagaagaggcggcaggtcctgccctggccaatcaggcgagacgcctttgtgagctgtgagtgcctcctgtggtctcaggcttgcgctggacctggttcttagcccttgggcactgcaccctgtttaacatttcaccccactctgtacagctgctcttacccattttttttacctcacacccaaagcattttgcctacctgggtcagagagaggagtcctttttgtcatgcccttaagttcagcaactgtttaacctgttttcagtcttatttacgtcgtcaaaaatgatttagtacttgttccctctgttgggatgccagttgtggcagggggaggggaacctgtccagtttgtacgatttctttgtatgtatttctgatgtgttctctgatctgcccccactgtcctgtgaggacagctgaggccaaggagtgaaaaacctattactactaagagaaggggtgcagagtgtttacctggtgctctcaacaggacttaacatcaacaggacttaaaaaa

SEQ ID NO: 239191 - DNA, 551 bp, Homo Sapiens
agaaaagaaaactggaggctgggcgcagtggctcacgcctataatcccagaggctgaggcaggcggatcacctgaggtcaggagttcgggatcggcctgaccaacatggagaaaccctactaaaaatgcaaagttagccgggcatggtggtgcatgcctgtagtcccagctgctcaggagcctggcaacaagagcaaaactccagctcaaaaaaaaaaaagaaagaaaagaaagctggagctggtggcttaggccatcacccttcccttggctggaactactggacagacccttttgagatgtgcctgtggtgctgtggagatgtgtgtagtggtcttagctctttgttgagcttgtgtgtgtgttgtgtagtcttagctgtatgctgaaattgggcgtgtgttggagggcttcttagctctttggtgagattgtatttctatgtgtttgtatcagctgaatgttgctggaaataaaaccttggtttgtcaaggctaaaaaaaaaaaaaaaaaaaaaaaaaaaaaaaaaaaaaaaaaaaaaaaaaaaaaaa

SEQ ID NO: 239192 - DNA, 555 bp, Homo Sapiens
tgtaagtgcaaatgatgttaaccttgctgaaacatttgatggtgttatatatggctttaatgtgaatgcaggcaatgttatccaacagtcagctgcaaaaaaaggagtaaaaattaaacttcacaaaataatttaccgtcttgttgaagatttgcaagaggaactgagcagcagattaccctgtgctgtggaagagcacccagtaggtgaggcatctatactagctaccttctctgtaacagaagggaagaaaaaagttcctgtggctggctgcagagtccaaaagggacagttagaaaaacaaaaaaaatttaaactaacccgtaatggacatgtaatttggaagggctcattaacctcattgaaacaccataaagatgacatttcaattgtcaaaacgggaatggattgtggtctcagtttagatgaagacaatatggaatttcaagtgggagacagaattgtttgttatgaagaaaagcaaattcaagccaagacttcttgggatccaggattttaaaattacattaaaaatgtaaataactcaaaaaaaaa

SEQ ID NO: 239193 - DNA, 545 bp, Homo Sapiens
tcagttaatgaaaatgggctagtcacagttgcagattatatttctagagctgagtctcagagcagacaaagaaacctcccaagggaaactttggctaaaaacaagaaagaaatggcaaaagatgtgattgaagagcatggtccttcagaaaaggcaataaacggcccaactagtgcttctggcgatgacatttctaagctacagcgtactccaggagaagaaaagattaataccttaaaagaagaaaacactcaagaagcagcagtcctgaatggtgtttcataaactgaagaagttcctagtttacagttcttttacattacatttacaatagtgcttgtacaagcttgccaaagatagaatatggatcgccagtctttacatcgcactttcagttcctccatttggaattcaaaaaggggagggatcctgaagaaatcatatgttaaacatactttgacacctactgtgttataaaatatatcatcagatgtgccttgagaatagtatatgtaacattaaaaaaaagttgctggctaaaaaaa

SEQ ID NO: 239194 - DNA, 557 bp, Homo Sapiens
ttccagaagatgaggggattcattactcagagctgatccagtttggggtcggggagcggcctcaggcacaagaaaatgtggactatgtgatcctcaaacattgacactggatgggctgcagcagaggcactgggggcagcgggggccagggaagtccccgagtttccccagacaccgccactggccatctccacccccagctgcttgtgtccctcctgggatctgctcgtcatcatttttccttcccttctccatctctctggccctctacccctgatctgacatccccactcacgaatattatgcccagtttctgcctctgagggaaagcccagaaaaggacagaaacgaagtagaaaggggcccagtcctggcctggcttctcctttggaagtgaggcattgcacggggagacgtacgtatcagcggccccttgactctggggactccgggtttgagatggacacactggtgtggattaacctgccagggagacagagctcacaataaaaatggctcagatgccacttcaaagaaaaaaaaaaaaaaaaaaaaaa

SEQ ID NO: 239195 - DNA, 543 bp, Homo Sapiens
taaggcactgtagtgaattatctgagctagagttacctagcttaccatactatatctttggaatcatgaaaccttaagacttcagaatgattttgcaggttgtcttccattccagcctaacatccaatgcaggcaaggaaaataaaagatttccagtgacagaaaaatatattatctcaagtattttttaaaaatatatgaattctctctccaaatattaactaattattagattatattttgaaatgaacttgttggcccatctattacatctacagctgacccttgaacatgggggttaggggagctgacaattcgtgggtccgcaaaatcttaactacctaatagcctactattgaccataaaccttactgataacataaacagtaaattaacacatattttgcgtgttatatgtattatacactatattcctacaataaagtaagctagagaaaatgttatttagaaaatcataagaaagagaaaatatatttactattcattaaatggaagtgggtcaacataaaaaaaaaaaaaaaa

SEQ ID NO: 239196 - DNA, 552 bp, Homo Sapiens
ctttttattgtttttaattaatatttttgttttaattgatagcaaaatagtttatgggtttggaaacttgcatgaaaatattttagccccctcagatgttcctgcagtgctgaaattcatcctacagaagtaaccgcaaaactctagagggggagttgagcaggcgccagggctgtcatcaacatggatatgacatttcacaacagtgactagttgaatcccttgtaacgtagtagttgtctgctctttgtccatgtgttaatgaggactgcaaagtcccttctgttgtgattcctaggacttttcctcaagaggaaatctggatttccacctaccgcttacctgaaatgcaggatcacctacttactgtattctacattattatatgacatagtataatgagacaatatcaaaagtaaacatgtaatgacaatacatactaacattcttgtaggagtggttagagaagctgatgcctcatttctacattctgtcattagctattatcatctaacgtttcagtgtatccttacagaaataaagcagcatatg

SEQ ID NO: 239197 - DNA, 550 bp, Homo Sapiens
gaaccgagaagggacggtcatctgctccggaaggaaagagaacgggccaagactgggactattccccacccccggtcccccattgaggcccgccacccccataactttgggagcgagggcccagccgagggtggatttatcttctcaaagacctaagagtgagcgcggggtgggggagggatgtgaagttatccagcctctgctaggcttcaagaaaccgtcatgcccgcttgagggtcaggacccacggggcattatcttgtctgtgattccgggttgctgtgacagccggtagagcctctgccctcccgaaactaagcgggggggcgtgggtcaaatcatagccaagtgacttgtttacatgtgagtgaaactgcacaaaggaacacaaaacaaaacttgcactttaacggtagttccggtgtcaacatggacacgaacaaaaccttacccaggtgtttatactgtgtgtgtctgaggtctttaaagttattgctttatttggttttttaatatacaataaaataatttaaaatggaaaaaaaaaaaa

SEQ ID NO: 239198 - DNA, 545 bp, Homo Sapiens
tcttctagacctcatgagcgacgcccttgtcctcgccaaaatgaaagggtttgatgtgttcaatgcactggatctcatggagaacaaaaccttcctggagaagctcaagtttggcataggggacggcaacctgcagtattacctttacaattggaaatgccccagcatgggggcagagaaggttggactggtgctacaataaccagtcaccagtgcgattctggataaagccactgaaaattcgaaccaggaaatggaaccccaccactgttggtccaattttcacacacgtgagaatccctggcaaagggagcagaactgaaccggctttaccaaaccgccagcgaacttgacaattgtattgcgatggcgtgggctgcgtgacgtcacctccggtcgtgtctctggtctccgtgttttccagttaattacatcctcatgcagccgtgatcaagggaatgtaactgctgaaaactagctcgtgattggcatataatggagttaacgggtgaataataaaagtatatatatatattatatataaa

SEQ ID NO: 239199 - DNA, 562 bp, Homo Sapiens
ccaaggcagacattggccctcctttctcccagcccccagaggcctggccttgggttcgtcagcatgggccgaggacgttgcctgtagaatcctcctctgcctgggagtggctctgtgtggaccagtccctcactggcccattctttttttgacgcagccaatctgtgaccacgattcctcccacagatgcctcctgcttggattctgagtggtcagagatctgtaaagcatgactttcaaggatggttcttaggggactgtgaaagtgttgggtcttcctccaggatgcctgcatgggaccccacccggagctggtgtgaccattccccaagtgccactggcccatggatgggggtgggtgctggtgccagctgggctgggtgtgggttctgtgtccttccaggatatgtgtcatttcccatgaggggccggggcaggtggctgggtgggggcacaggctggagtattcttagttctactggttctacactgtgaggtggcaatgggatttgctcagatgccacccaataaaatgcctgttacttaaaaaaaaaaaaaaaaa

SEQ ID NO: 239200 - DNA, 552 bp, Homo Sapiens
agagtgcttactaatgttaaatagttcagagtatataacatttacattaaggactcatggtaggttttagggtaaggagtttaaaggaaataaatattcaaactgggtctcattgccaattttggtggaaatgagtttgtgtcatttcaattacaaagataaaagtatgccatataatttatttatatgaagatttatttttgtagtgtacatagtagtcatcaagtcttttgacagaagtatatttttaaagaatttatatgtgatgaatccataatgtctggaactttgctgagacatgagtgggcacagttttcattgtaaattacagcaaggaaagaaaatgtttaacagtgttaagagagtcagagcagagtggatattcatgcgattatgaagtgtttattagttaccattggcgacctagcatgcttctcatttcaaaccttggaaggtgaaaatgtacaaactctctaaataattaatgttcaaacactgatagaaattctaacatgaataaaaaataatataacttgttggttaaaaaaaaaa

SEQ ID NO: 239201 - DNA, 600 bp, Homo Sapiens
  misc_feature (4)..(4): n is a, c, g, or t
  misc_feature (15)..(15): n is a, c, g, or t
  misc_feature (51)..(51): n is a, c, g, or t
  misc_feature (92)..(92): n is a, c, g, or t
  misc_feature (589)..(595): n is a, c, g, or t
  misc_feature (598)..(599): n is a, c, g, or t
atcngaattaattcnttccccaaagtaagcatttttaaataaagaaaaganaatataagtaaattcttgtgaaattcagcctgtttgcattnatccagctctatgaatggtatactttccagaaataccttcttcagggcataatgtatgtaacttgtatttgtcctgaatgtggcctagtgtgtcatcttacagtggactgcttccttagtttaatagagttcttcatctccagtcagggcaccatccagctttattcatcaaacatctgttaagagcctactacaggccaggtgtggtggctcatgcctgaaatcccagcactctgcccaggcaggcggatcacttggtcaggagtaggagttcaagaccagcatggccagtatggtgaaatcttgtctctactaaaaatacaaaaatcagccaggcatggtggcagacacctgtaatcccaggtacttaggagtctgaggcaggagaattgcttgaacccgggaggtggaggttgcagtgagctaagatggtgccactgccttccagcctgggcaacacagcgagactccatctcaaaaaaaaaaaaggccacaannnnnnncannc

SEQ ID NO: 239202 - DNA, 716 bp, Homo Sapiens
cctggagcgggtgaccgcgtcgcaccttgactggaccgcacactcgccggagctcctgcagttcagtgtcatcgtcgcacagtcaggccctgccctgggagaagccctgccacacgtcgtgcccacgctgagggcctgtctgcagccctcccaagacccgcagatgcgcctgaatctgttctccatcctgtccaccgtgctgctcagagccacggacaccatcaactcccaggggcagtttcccagctacctcgagacggtgacaaaggacatcctggcccccaatctgcagtggcatgcggggaggacagccgcggccatccgcacggctgccgtgtcctgcctctgggcgctcaccagcagcgaggtcctgtcggcagagcagatacgggacgtgcaggaaacactgatgccccaggtcctgaccaccctggaggaggattcgaagatgacgcgactgatctcatgccgtattatcaacacgttcttaaaaacctcgggcggcatgacggatccagagaaactcatcaagatttatcctgaactcttaaaacgcctagatgacgtgtccaacgatgtgaggatggcagccgcctccaccttggtcacctggctgcagtgtgtcaagggtgccaacgcaaaatcctactatcagagcagtgtccagtaccagtaccgagagttgctggttcaccttgacgatccagagagggcca

SEQ ID NO: 239203 - DNA, 515 bp, Homo Sapiens
cccccccccccccccccggtgtggctgacctgggacctggtgaaatcaattttctaaaataagaaaaataaaaaagaaaaagacttctgaattctaaggggtcagagaaggatcttccagagattgctgagtggggagggcctggggatatggttctacagtttttggtcataaccacaaagattagcatctctgctgcctggtcgatgaagcatcccaaatagtccatcagcgagggcaaagtgatggaaacatttggagtcactgattaacatgcttgagggctggatcccttatttgggaggtgggagtacttccagagcttcttttcacttaatgaaggctgggaagctcagagctcagtggtacagggctggaggaagtcattttcatatatagagtctttcttgtttggcctcttttgtagcaatgactccccaggaccctccagtaacaattttcctttacctgcatcccccaccatcctcaggttcctgagatcaccttgaaaaaaa

SEQ ID NO: 239204 - DNA, 734 bp, Homo Sapiens
  misc_feature (92)..(92): n is a, c, g, or t
tgaggcaggagaattgcttgaaccagggaggaggagtttgtggtgagctgagatcgcgccattgcactccaggtgagtgacaagagcgaaantccgtctcaaggggggaaaaaatccatccttcttcaatgtgtatcttatccttctcagtgtttaataggacgttctactcaatggattggtttcctccctataaaaaggagcattttgttattccctctttcagatttaatgataaagtcataattcctgcaagccttttgaggaggatatatcttatctcataagatagctgggcacagttgttcaggcctatattgtcagggctttgggaggcctcaaggatcgcttgaaggcaggagtttgagaccagcttgggcaacatagcaagaccccatctctacaaaaaattaaaaagttatccaggcatggtggtgcatacctgtagtcccagctacttgggaggccgaggcaagagaatttcttgagtctaggagttcgaggctgcagtgagctctaattgagccactgcactccagcttgggtggcagaacgaaaccttgcctcttaaaaaaagaagagaggggctgggcgcggtggctcacgcctgtaatcccagcactttgggaggttgaggtggccggatcacaaggtcaggagatcgagatcatcctggctaacacagtgaaactctgtctctactaaaaaatacaaaaaattagctgggcatggtg

SEQ ID NO: 239205 - DNA, 691 bp, Homo Sapiens
ctgtaagttatgtgaatgtggtctctctcaaaatatgttactgtcctgtactcacctattttcagaccacagttgactgtggataactgaaacaatgtgggtaagaggggactactctatattctaactattctaacctatagaaagtatttctgtatattaagatgtaggaggtacataaccttcctgaaaacttatggaatgacatcctaacataatttattttgttgctctgcaccaaaggtggttctggtatgtctattatttgtctggtttggatgtaaaatgcttttctaaagcttgagaaagaaaaaccagctattactacgacgtggtaaaactgcatattcagagcactaagactagggactcagtatctgtttggtgcattttaaaaatttgctatcatttgttaaactgattttgtcctcctataacttcactccattctttacaattttactacttagccaatgccaaaaaaagaatcataatagaaccgctataatcaagatgagaaacataatacttactgattcataaaatcaatacagtggttaaatctgagggtaggaaaacattcccagtggaaataatgttctttatacaggacatcttacctcctcaaggaaatctacagtttatttttgatgacggtgtagtatattataaaataataaaaaaaaaaaaa

SEQ ID NO: 239206 - DNA, 656 bp, Homo Sapiens
  misc_feature (24)..(24): n is a, c, g, or t
  misc_feature (38)..(38): n is a, c, g, or t
  misc_feature (41)..(41): n is a, c, g, or t
  misc_feature (50)..(50): n is a, c, g, or t
gaggaggaggaactgacccagagntgatcccgagcggngtnatgaacccntgggagtagacttcatgcatgatagcattcttgagaaatgttggcacaaggaagaatgaatgattcgccattatggagagaatgtgattctttgtacataggtgtctaggttctgtttgttttttccctgatgttgggtagatgagtgcatatacatgctagtgaagaaggggaagatacttttgctgtagggttgtattgttgtagtctaaatggtggtaatttccttttgaagtctaagaaaaataactaggagacatcttatgtgtaaaattgtactagtacctctttaagagtgaatttagatttcttttgaaactatatataggacatgataagttaatggcctgattgttgagattttgttgtttccagtaagcagggacaaatgctgagttgacctagttacctttgtaggaaattacagttgcttttgattgaactttcagcagagagcacacccagtcttcaattttaacacttgagattttcttacattttaaggactgacaattagaaaatgcttcagaatatttaatacatcgcctccaagcacagtctagtttcacaacctgactctcttcctattaaaaaaaaaaaaaaagc

SEQ ID NO: 239207 - DNA, 675 bp, Homo Sapiens
tttcataaactccttcatgcttgttaataattttcaagaatcttaaaataaattacaggaatattgttatgaagtagtagaagcagtatggtataggggagaaagtgattgtagttgggatctgaggatagtctttactttgctattaactagctgtgtgaccttgggcaagttgcttatctctgcttcagttccataaactaagaattacagagctgaaccggatcttggaagcaatctagtacaaacctctcattttacagatgaggaagcagataatttgcacaggctttcactgtaagacagttgggcccaaaattcagttttctgactctcaggttggttttttttttccattatactttacagcctcttttcatctgtaaaatgagagcattggattagaggctctcaaaggtctcttccagctcaaaaatattgtcattcctgtgacattagtcgtaatataatttattaggggaaagtttgtagcttttatttattggtgaaagaaatgtttcttgaagaggcagtataacctttgcaaggttatattttgtttttttaagagaatatcatcaggcgaggtgctatgtctcaggcctgtaatcccagctttgggagaccaaggcaagaggattgcttgagtccaggagtttgagactagcctgatcc

SEQ ID NO: 239208 - DNA, 616 bp, Homo Sapiens
gggctaatttattaatagccccatggaaggacatatgaccatcttacctaaattgatgttttcttagttgtgtggcagtgtatatttttgagccccgagactaccaaacagaaaaaaatacatttggaagtaaaaaccaccctttggatatttatattagttcagagtcttctttgcaagaagcagaaactgactctaacacatagaggaaagggttgatcgaaaagatgttgagaaaagcacagacttgacaaggagcctggagaaccaggcttggaaaatgggcaggcattcctaaaatgtggctatactctggctctgcctttgaagctgcgccaccagaaataccatttggggttctggtcatgctttttcttctcttccaaatgacatggaccatagctagcaatctgctggctcataaaactcttatctactggttaaggacctcaaccagtccccacttcagatttctaaacactacgcttcatctcattaccaaggggaaccttgaagtcttcaacctagctcttgctctcaactttttcttagtctttttactttttccattatattctttgatatatttgagaaaatggcttgcttttaaaaagtg

SEQ ID NO: 239209 - DNA, 650 bp, Homo Sapiens
tttggaatttccttaagaagttctcatagcagtacctgaagtattaatttctagtagctgtgggtttctgtggacgcctagagaaaaaaaagaccacaaaaaaagtctgtttcgaaaatcgactggccaggagtttgtttgtttttttttcctgcttagaggcaccaccggaggactgtgtaaaggaaactgaaaactacaggttgaagagatgaacaatggagtttagatttttcgcaagaatttcgagattttaaaaatagagtcggggaacaggagtttgaagcttggggagttggaatgtcactagagaacaaaaggccggaaatgtttccatgataaaaaatggttaaagaaaaatcccaggagttctgttgtcttgaaagtcatagaaacaacttaaaagtagaaaatggttaggtgttacggctttctcgtcgttttgcttccgtatgttaaacatacagcactcaccaacgttgaaatgggcattttccgctgttggaacagcaaatctgttaatttcaagttgctccagagaaaacctgagctgtccctttaaggggttctgcttttcctatttgtgttggcatttgaaagattgtggaggcagaaaactttctggaatgtcaaaaaaaaaaaaaaagcgg

SEQ ID NO: 239210 - DNA, 806 bp, Homo Sapiens
  misc_feature (240)..(240): n is a, c, g, or t
gggagcaaagcgtttcgtactaatccttggggtcaggcactggccccttcttgggcaaaaggtagaccactgtttttggacagaactgccccttcccccgtccataatgactgtccccacccaaactgcaacaaagaggtacaagcacatcatggaacttagtacccacaaggctcatgccaatacagatgatgacagcaagcgaaaagcggatggggacagtgagtacggagaggaacntatctcccatgcagatcttgggagctgcaacggtgcatttgtctcacaaaaaggttccttgtcccctgcccgctcagctacccccaaagttcgacttgtagagccccatagcccttctccttcaagcaaattcagcacaaaaggcctctgtaagaaaaagttgagtggggaaggggacacagaccttggggccttatccaatgatggctctgatgatggaccctcagtgatggatgaaacaagcaatgatgcctttgattctttagaaaggaagtgtatggaaaaagaaaaatgtaaaaaaccctctagtttaaacccttgaaagatttccttccaagagcctaaagtcagcccgtcccattgcccctgccatccccccacagcaaatctacaccttccagacagccaccttcacagcagcgagcccaggctcttcctcaggcttgaccgccacagtggcacaagccatgcccaacagtccccaactcaagcccattcagcccaagcccactgttatgggagaacctttcacagtcaaccctgccttgactccagccaaggacaag

SEQ ID NO: 239211 - DNA, 718 bp, Homo Sapiens
ctcccccccgttacctgtgtgcatgggcctggggtcgtcgttttctctcccggggttctgtcggtgccgtgcgcctggcagaggagcaggcggctcggtgggtcgtgttcggtgccgagggtcccttccagggcatctgtggacgtgaccgccaccggacccctgtcccagagctaccaatacgaggtgtgtctgacaggaggttccgggacaaatgagttcaaatttctgaagccgattatccccaattttcaagttcatgacactggtaggaatatgggggaaatcgagaactttcgaaatagctttggacttaacattcaataaaacaatttattttaaatgtctaatttttggttattcttggcaagctgatggtactttttgcataatcttttgtggattcttggttgtactgtagttgcatgcatgattatagctcttgtttttctcacagtttctttaaaaatctttattagtggctataatgacgtggaaatgtaatctgtgttttctggtttttcatttatttggccaaaatgttatattaatggagttattgctatttttgctgtgataatggtattatgcaagaccatattctcaattatttggatatgcaaactaaagtattaagagctaatgtcattatatatgtaacttaaatctagacaccatcaaagcataaaataaaaataaaaagcgttgctgaaaaaaa

SEQ ID NO: 239212 - DNA, 505 bp, Homo Sapiens
gcagattcagaaaaatacatattacatttgtaaatactgacatatatgaaacatttctccactcagaattttgatcatcctagtcccttacccaaaactaaaacatttatataaatctatattagaactaaatcagttatttactgcagtgattgatgtgtccatattaactttcatgtaacatttcgaaatatgggtcaagtcaaaacacagtgatgtataaacagtttttgtatttaattttccaactagtttacctaattagaatactgtaataaagtaatgatgctattttaaaaaactaacattttaattctaatgattatatatttgttttttgataagactaatatgacttgctttaactttttatcaatatgcatatacagatacattcattataggtatctataatgaatatacctgcttatgcatatttataataggatgtcatataaaattattattttacatgtataatgctaataaatcaagcataacttct

SEQ ID NO: 239213 - DNA, 620 bp, Homo Sapiens
gatggtgaagacaagcccaacaaaggtccgattgatggatcccgcctgagccccagcgcaattaacctgccctatttcaacggaagatggcagcaggtccctggccctcagcaggcccatagccccagaaggccagcagctcttgagacctcagcccctgtcaacagtggggaccccaccaccaccatcctggagtgattccaactcaactcaaaggacacccagagctgccatctggtatctgccagtttttccaaatgacctgtaccctacccagtaccctgctccccctttcccataattcatgacatcaaaacaccagcttttcaccttttccttgagactcaggaggaccaaagcagcagccttttgctttttcttttttcttccctccccttatcaagggttgaaggaagggagccatccttactgttcagagacagcaactccctcccgtaactcaggctgagaaggaaccagccagctcttacctcctcctggttgcttttcttgcccccaccccaagtttatttttgttttcccccggccccctacctctgaagccattttatgatctgtcatgtgccacctgagcctccagtaaaaacaaaaacaggcaa

SEQ ID NO: 239214 - DNA, 412 bp, Homo Sapiens
cttcctttacgtcatcttccttctgagatgctctgtgtccaaattttattctttgtaaaaggatgccagtcattggatcagagaccaccttaatccaggatgacttcatcttaactaaattacatctgcaaagattctatttctaaataaacccacattctgaggttctgggtgggcatgctatttggcaggacaaagtcaacacaggacactcattttcaggattgatcgcatggtttgaggaagctgatggtgacatctcttcttaaatctgttttcaggaaaatcatactggtagccttcaagtggccatggtgggagcattgacccagggaaatccacatttcccaacacatgctggatacctgaggactccagagctactatctgctcatatctgctcaacattaaa

SEQ ID NO: 239215 - DNA, 437 bp, Homo Sapiens; identical to SEQ ID NO: 90576

SEQ ID NO: 239216 - DNA, 446 bp, Homo Sapiens
tgcaacatcatctcctaaaagagaaaaatgaggagatatttaattacaataaccatttaaaaaaccgtatatatcaatatgaaaaagagaaagcagaaacagaaaactcatgagagacaagcagtaagaaacttcttttggagaaacaacagaccagatctttactcacaactcatgctaggaggccagtcctagcatcaccttatgttgaaaatcttaccaatagtctgtgtcaacagaatacttattttagaagaaaaattcatgatttcttcctgaagcctacagacataaaataacagtgtgaagaattacttgttcacgaattgcataaagctgcacaggattcccatctaccctgatgatgcagcagacatcattcaatccaaccagaatctcgctctgcactccagcctaggtgacagagtgagactccacctcggaaa

SEQ ID NO: 239217 - DNA, 536 bp, Homo Sapiens
  misc_feature (323)..(324): n is a, c, g, or t
ggagggatttctgttattagccggcttaatgataatagttaaggcatattgagtttcttggtgggagacatcatgctagcaagcacagttgattttgtttttttctgttttaccctgggagataggtgctcttattatttccatttttgaaacgagggaaccaaggcacagagagggtgtatcacttgccccagggtcacataaaaataaatgacagagcagggacttaaacccagtgtggtctgaatccatatctcaccctcaccactacatagtaccagaccttcaggtttaatagcctcccagcaagaagggtgtggtannatagtaggggaaagtgtgttctctctgccctgatacctggggacaggcacacatgtattacacatatgtcacatatatgtaaccgattctggccaggcacggtggctcattcctgtaagcctagcgctttgggaggtcaagttggaaggattgcttgagctcaggagtttgagaccagcccagttaacgtagtgagacccccatctctacga

SEQ ID NO: 239218 - DNA, 462 bp, Homo Sapiens
aaagagctgaagaataaaaatatgctgtctggctgacattaatggccaatatttaaaaaacttacatatccccttgccagtttatagctcttagatttttaaatatttatttttttacatacaaaaatacttggggttgtttatattaacaatttgaaaaagatcctatatacaatgtataaacagacaagaaggaaacctactaaaatgttagcgattaaaatctctaggtggtgagagtataagcgagtttattctttacagttttcttaggtttccaaatattctcccatatgaatgtgatatttttagactcagaaatgaatatacaagtatacaaatttccattttcattgtgactatggtgagtttttttgtgtgtccttatcctacattccttgaaattttctctaaagagatttgtgttcttattgaaacagtaaattttataaaaataaaaaa

SEQ ID NO: 239219 - DNA, 474 bp, Homo Sapiens
cactccagcctgggggacagtgagactccatctcaaaaaaatagaatagaataacccttgtttaggtgttacaaaatccaggccagaccaatctaaactttaatctcatacccggttcctagatgagtcccttctccagctcaggttcggcctaagcctcagggttccttacttggtgggcaccacctgctcccttccccgcctttgtcctctttttcctctgctggctcctccggggttgggtgtgttcagaggcagagacaggctcaaggtctttggcttttaggttctgttgatgggtgagttccagatatagctttctcttgtaggatatttcatttatttatctattaaaaatatttatttagaacacaccattcatgtgccagaccctgttccaggcactggggagagggtgataaatgagatcaacaaaaatacctgcccacattaagctcctgttctagggaagac

SEQ ID NO: 239220 - DNA, 344 bp, Homo Sapiens
ccaaggatattttggacctggaaacattattcaacaaatttgaaaatttcctttcatccgcaaattgtagaactcacttccatccccacattgtggaaacgtctgccggtgtttatgatttcttctgggcgggtttgaatctcccaggctggaagccaagggatggagtagacaagagtttctttggatgagtctggggaattggccacctgccccagaatcacgtgggttgctggtcagagatgcaggtgttgagccctggcccagccccggattcatcagacagcccttgacccattggtccttctagggctgttttttttttttcttgtcaagaaaccaaa

SEQ ID NO: 239221 - DNA, 459 bp, Homo Sapiens
tccattaagatcagtgacctaggtggtggtgtcccacttcgaaaaatagatcgtctttttaactacatgtattctactgctcctagacccagcctggagcctaccagagctgcccctttggctggatttggttatggtttgccaatttcccgtctgtatgctagatattttcaaggagatctgaaactgtattccatggaaggagtgggtactgatgctgtcatttatttgaaggctctttcaagtgagtcatttgagagacttccagtttttaataagtccgcatggcgccattacaagaccacgcctgaagccgatgattggagcaatcccagcagtgaacccagggatgcttcaaaatacaaagcaaaacagtaatataccaccttgatttccattacaaagtatttgatttgtctgaataaaggtgtcccactcactgttccaggaaaaaaaaaa

SEQ ID NO: 239222 - DNA, 547 bp, Homo Sapiens
acgtttcactttaaccctgactggggagcaatatgttctgtgaaaatatcttgaaattgtacaccaaaaccttacaaccaacttatttgaacatttattacacacagggtttacgtaagacttttcttattggtatataattaatttcctttggtctcccttatccacattggcttattctggaggaaaagcagtgatctgtaaaacaaatcaagaatatattaaatctagaggaatgcagagaagaaaactataaaacagaaccaaaaacttgttgcacagcctacataattaagagatcaactggctggaagcagatcaaggcctaacttcattcaagacctaaatattatgagactcagttattcggttttatgtgacgtctcttccattcaccatgcacaggcttttccagctatctatataatgtttgcaaatatttgataaagatgatgttaccctatcttcctccatctgattcctggaatgcttgaagaaaggggaaatcttgagtaacctcattaaaattaatgtctggtggaaaaaa

SEQ ID NO: 239223 - DNA, 630 bp, Homo Sapiens
  misc_feature (61)..(61): n is a, c, g, or t
  misc_feature (195)..(195): n is a, c, g, or t
cgccagccatgcttcagtgcgcagaaagtggggcagctgcgggcgttgcgtcccgtgttcnggagccagcagcaggagactgtggcccttgaggatgtggtagtgacctcaccagaggagttggcaattcttaagtgctgcctggaggcctctacagagacataatgttggagaacttctgccacatggcagtgntgggtaagacccctctgtccccaccagtgcccttgaggttatgggtgttggtaggtctgtggcctccatttccatgacgatggtgttaaggactgcatgtttgtgtccccccccaaagtttatatgttgaaaccctgacccccaggagggtggtattaggaggtggggcctttgggaggtgactaggcttaggtgagatcgtgagggtggggctcgccgatgagatcgagtccttataagaaaaggaaggaactagagggagggtcactttgtgctgtgtgagcatacaagaaaactgccattttcaagctgggtgcagtggctcacgcctgtaatcccagcactggaaggccaaggcattaggattgcatgagtccaggagttcgagaccagcctaggcatgataagcccttattgctaaaaaaaaaaaaaaaa

SEQ ID NO: 239224 - DNA, 500 bp, Homo Sapiens
acaatggaaaaattaccaaattaaacctgttttatggatggcagcttggagcatagcaagaagttggaggatttgaattccattcccagttctcattgcgttttgtttcttaaaactataataattggttactgttataaagtttaaaaggtggttttaatatgaatagcaaattctggtatattgtgactaacgcttaagaatgcctgtctttgagaggaaggtgttataatattaatcaacagtgccaaatacactgtgcatatctacaatttaatctttgaatgtttgttactggattagctccctcctccttctgtgtgatggtaccatgcatagagtcaatcaaatccttgtgatgttttgtatggactttgacaacatgtaactaatgtgtaaagcaagtttttatgattaaggaatcaaatttattgaattttattattgaaagttgaaacttaacatgtataaacaaaaaacaataaaataataaactatta

SEQ ID NO: 239225 - DNA, 305 bp, Homo Sapiens
  misc_feature (25)..(25): n is a, c, g, or t
aacaaaaagcggttctgcaccacanaccctgctgggggcgtacaagaaaggtggggccgagggagtagtgcattagagggctgtggaagggggtgtggttcttgggttataaataaaggtggctgatgggtcaagggctgggagaaataaaacaaataaagggggtttcaattgtatctgttatgttttatttttgaagctggctggtggatacacaggtctttgttacatcatcatctatactttttttgtatgcctgaaatatttcatgtttaaaacatttaaaaaataaaagtgaagggaca

SEQ ID NO: 239226 - DNA, 595 bp, Homo Sapiens
  misc_feature (11)..(11): n is a, c, g, or t
atgcacaattntgagcaagagttaacttgtcccatatgttatagtatttttgaagatcctcgtgtactgccatgctctcatacattttgtagaaattgtttggaaaacattcttcaggcatctggtaacttttatatatggagacctttacgaattccactcaagtgccctaattgcagaagtattactgaaattgctccaactggcattgaatctttacctgttaattttgcactaagggctattattgaaaagtaccagcaagaagaccatccagatattgtcacctgccctgaacattacaggcaaccattaaatgtttactgtctattagataaaaaattagtttgtggtcattgccttaccataggtcaacatcatggtcatcctatagatgaccttcaaagtgcctatttgaaagaaaaggacactcctcaaaaactgcttgaacagttgactgacacacactggacagatcttacccatcttattgaaaagctgaaagaacaaaaatctcattctgagaaaatgatccaaggcgataaggaagctgttctccagtattttaaggagcttaatgatacattagaacaga

SEQ ID NO: 239227 - DNA, 474 bp, Homo Sapiens
cgaaaacttggctaccaacctactctagtaacgcaacaacttgcccctctgttcttttgagttctggcttctgattgtttctcaccacattgtcaactccttgggaaagtactctgtatgttttaaagcaaattgccagggtttttgtttgtttgtttgtttgtttacttagacctcgggagataaaattaatcgacctctttaaatacatggaggtaacccctttctcgtttttgaagggagacacttgggaatttagaaattgggagtgtgagttctaagggctggtgtggtttagatagcccatgacagtttcaggaaggtcctggtttcctttcaagcaaaaggggccacctctgaaccaaagtggattatctcctgcagcagcaaatccagttggcagttgaattcctgcagttttatgggaatttcagtgaaacttttaaagctgtaatttttgtaactggagttaaa

SEQ ID NO: 239228 - DNA, 663 bp, Homo Sapiens
ccattgaagaaagtaaaaaaaagagaaaaatggcctttgaaatttgatattaattcagatagttcagaaactactgatcttttgagcatggtttcagaagaagagacattgaaaacactgtataggaacaataatccaccagcttctcatctttgtgtcaaaacaccaaaaaaggccccttcatctctaacaacccctggatctacactgaagtttggagctataagaaaaatgcgggaggaccgttgggctgtaattgctaaaatggatagaaaaaaaaaactaaaagaagctgaaaagttatttgtttaatttcagagaatcagtgtagttaaggagcctaataacgtgaaacttatagttaatattttgttcttatttgccagagccaaattttatctggaagttgagacttaaaaaatacttgcatgaatgatttgtgtttctttatatttttagcctaaatgttaactacatattgtctggaaacctgtcattgtattcagataattagatgattatatattgttgttactttttcttgtattcatgaaaactgtttttactaagttttcaaatttgtaaagttagcctttgaatgctaggaatgcattattgagggtcattctttattctttactattaaaatatttaggatgcaaa

SEQ ID NO: 239229 - DNA, 558 bp, Homo Sapiens
cagtggcccctgtgccaccacactgtgggtcaggaacacgcgtcatggtgttcttgtcggaatgtgaacatacagcaccctctagcattacgaatctcttaggatttttaagattgtatttgataatacttatatttcacagggcacacttttggcacacctcagagcacactgctgctattttgggtcgtatcactgtaaaatacataataagtactacttaactgtgacatgaagaattggaatcccagagggcaacatttgatttgactaagatcaggcataagatagaatttttgtcatttttccttgcagttttattgacttagtttatgagcttggataaaataattttttgatgaatcatgtcaataaaaggaaaaataatgtaactacctcataagtctgataaaaggaagttgctagtgttttatagaatttctgaaggtggttaaatcaagtatgatttcaaaatatcaactagttccacttttgtgattgcaggatgcttcttatactaaagttctcataaataataaatcagcttatgccaaaaat

SEQ ID NO: 239230 - DNA, 447 bp, Homo Sapiens
ctatatcagaaataaataaccttgaggaaaccatggatgggtttcaaaaggtctatgaaagaaactatgtgcatgcttttttcttagaggtttttttcatgatattttcaaaatgtcttctgatcttagagagttttaaaattatccacatatttggacttttctctccactctaggtccttatttccaaatgtctactggaaatctacttttatatcctacagattgctcaccttgtcaaatattgaacttttactatccttttcccaaagttgcttactgttgctgctgtattgcctttcttgatgaatggtgtgctaccaccctttgtcttgggacctcccacttctttagtgtctccccctcctcctatctagttatttgcctcattgtgttagttggatttagtacagtttaataaatatggattacatgctaaaaaaaaaa

SEQ ID NO: 239231 - DNA, 483 bp, Homo Sapiens
  misc_feature (49)..(49): n is a, c, g, or t
gcagcatcagcctgcatttctgttgatttctcatttatgtcctttccanacatttagtagtttttattttaattgtttgtatttgatagcttgagcccaggctctatattgtcttacaagaaattggggtgatggataatttctcaaatgcagattgttctttaaagattaactctaaattcacttaacttggattgcccccaagtcagaacagtcattcgctaagtctttcagattgatgaatgattggtcccagtaccaaaaatgtcaaatcaaagcttagaattgaattttcaaagattgttcatggatttacatatattgtatttcttatacaatatatcacatttcttactctgtatattcatattgataaatgggtggaaagtctttgaccctgactgcatttatgttaaatgtttgtctagaatatggatttggtttcatttgtattgtaacacaattaactgaatgattaacatg

SEQ ID NO: 239232 - DNA, 352 bp, Homo Sapiens
  misc_feature (83)..(83): n is a, c, g, or t
  misc_feature (218)..(218): n is a, c, g, or t
  misc_feature (254)..(254): n is a, c, g, or t
tgaagaaacttaagcttgtcaagagttacttggaacatttaattctcaaaaaagctgttaaagaaaaagatgatacaagaagnaaatatttacctgacagttggataacataaaatcaaggaaagagatactgcagacaaaccaagagaccttgatcctgaaaaaaataattggctatgcagacagcagtggagaattgatgatactcatgaaatggnaaattcagataaagcagacttggtgttagcaaaagnacaaaacatgaagtgtatataaaaccgggctcttgctttttgctttactaatgtgaagaaatagctgcattctaataaaaatcaagtttgatatattc

SEQ ID NO: 239233 - DNA, 436 bp, Homo Sapiens
atctggcaaggggaatgagaccattatgattggcttgaaccaattaggagtcactctcctgggattggggagggccctgcctctaagtagttagctgcctgataattctgcaaaagctggcttctattagcaagggaggaggaggggaatgatgtagaataatgactattgtcaggccacagcatggggcattttacttacatttaaacataaggtaatacttagtttctgctacagaatttctaatacatgtacttaagagttttgctggctgggaacagtggctcatgcctgtggtcccagtgctttcagaggctgaggcaggaggatcgcttaagcccagcctcagacttctgtttgaggctgcagtgagctatgatagtaccactgcgtgccagcctgggcaacagagcaagaccctgtctcaaaattaaaa

SEQ ID NO: 239234 - DNA, 578 bp, Homo Sapiens
attgagaagttgccgtgggactagggtgccaagactgctgagattctggcagaggcactgccattggcacccctggcccagacagtgtctgctgtgctgtccctggaagctggagctccaacagggaatattggtgtagctgtgcataggccataagccacacttgagccagtgggcagggagaaggaatgtcattctcccttcaccactggggaaggaaagggaaaagggctcaagttatcataggggcttacatgctgagcagctataacctaggtgttcagaacacctggaagatgcatttatttaggggtcacaaatagtgaaattaatatttgaggaatatcagtcacgtgttgtgggcttttatccttaacgtttaatttttacaatcttgtgtaaaaatttatccatgataataacataacttctttaaggttggagtggctggcaagagcagagccttaatttgactttagctctggctggtctggaagcttttacttttttgttaatcccacttcctcactctgtcattcagcattatcatgatcgtaaacaaaattgtactgagaaag

SEQ ID NO: 239235 - DNA, 733 bp, Homo Sapiens
  misc_feature (200)..(200): n is a, c, g, or t
  misc_feature (207)..(207): n is a, c, g, or t
  misc_feature (634)..(634): n is a, c, g, or t
gttgcaaattctgctaatgtgaaggaagaaaaaaagtgtaagtattcatctgattttaggatgattgttcggcaaaaagacctggattcccttccctaggcaatgtttctttcggtacctaggttgatattttaagctgccatgcagttgataacccaaaccccactcggagctcgagatgctcagacagtatggaccanatgtgcntgagcccatccttcagaagcttgtggctgcctttggagagctgaggagtttggctgaccaagggattattaactatccttattctaccagagaagttgtcaacatagtcaaacatttacagaaatttccgactgaaggtctctccagtgtagttcgaaatgtgtttgactttgattcctacaacaatgacatgagggagatattgattaacactttacacaaatacgggatacctatcggagcaaagcctaccagtgtgcagctggcaaaggagtaaggcaaattcagtactcttctgattcttaaatgctgatagttcttgatttatcattccattctacaaaactgagttgctatggaaattactttccatgagtaagcttttcaaatacatgtatatgttgctgtttgctggctgcttttcagnttaaatagcattatttataggcctgtaaattgaaaattttgattattatgtatgtcccatgagtagatgtaataaataaagggaaatatttgtttcttt

SEQ ID NO: 239236 - DNA, 464 bp, Homo Sapiens
tctaataccaagaaggcctgttaacattgtaatatggtggactcaaaccagttgaactacatttaacctacctaaatggcaacatcctctcagttgttatacagaagcttaggatatattcttggtttgttagaaaaataaaattgaatgttgttaaagtggtactttgtaaatctggcttttacactaaaagcaccctctcagcttgtagtattttaatttgataatattcagcctgaatttgtttgaaattctgtgaggaacagttgcattaaaaaaaaaattcagcatgctttttctggaatttatttttatggcaatttaagttttatatctcctacttgattgacatgttatttgtaattagctggtaaattgtgtgcatgagctatcagtgctgcaaatttttaggaaaataagcaatcattaaatagaaaaatttgtgttggaagctttcattgctt

SEQ ID NO: 239237 - DNA, 486 bp, Homo Sapiens
taatgactgattcagagcactgcgtgttttgaaatatacaaatagtgggaaacgaaatctttgttctggatgcagttataatttggaaagcgaggaaataaattatacaaggggaaaaaacagaatactactaaagtcatgccgtgtgacttctgaagctagctcctaagaagtccttgcagcttctgcctgcgactcttagaacacttgctttgaaggatgccagatgctgtcttaaaagtctgagcactctgaaaccatcatgctgtgaggaagcccaagctaaccacatgggcaaaaaagatgccctctgactgccaccatttgagacactctaattaagaactgcctcattgagcccatgaggccctgtgaatgataataataaattgtttttaaccactatgtttttggatttgttataagtttatagataacaagaaaaagttatattagcatggtaataaaattatggatatgtgtaaa

SEQ ID NO: 239238 - DNA, 571 bp, Homo Sapiens
  misc_feature (449)..(449): n is a, c, g, or t
  misc_feature (463)..(463): n is a, c, g, or t
tgctgcaagatctccgacagaccataccctggaggttgcaagggtttcatttggcctattttggcagcatgttgagcatctaaagtttggattctttagttcttctcaaatatgaacttaccattattatggttatgatcctggtagctaattttttttaacccttcatacctactgttaatcattgttttttcctggaataaatttttaaaatatattcaggtaaactatattcatgcataagatgactgtggtgagtatttagtgtaaaagacattttcttttgaaactgcagtattttggataaattacatgtgaacctcaagtcgcctgtgacccaagtgagattgttagtgttctgaatactagtatcatttttagcctttgtgtatctttttatatgaagtgtctacttctcaagctgattataggatgaatgtgcttaaggnttgtgtgcatcagntatgcttaacaaatatcattttagtctctggaagaaagcttgctaaatgtaaaggtgaatctcaagtatataaatttttgcattatagtgtatttaaaaatatatgcc

SEQ ID NO: 239239 - DNA, 550 bp, Homo Sapiens
ctctgtcttcccaaggattttgagttcattttgtccttgacttttttctccccagtgtgcgtgcttgctctttagtcctcttctttctaatttggctatttttccatctctatctgtttatgacatagaatgtctccccagtatctcatctgttttgcttctctttgagctcaaatgtaatcttgagaatataccttggtctagcaaagagaaaacataagttttggtataaaattaggcataataagcattatcaacctccagactctttgaaaatttctggaagttcctcctcaaatcttcccaatgttggccagcctctttctcagagccttttatacatcatttaaaattttttagttattagtattgtgacaatcttgatttgttttccattgcaacatatttagtatttaagccacgttataagtttagtttgtttatggatagctggcctgtggccctcatcatttgtaaaattgtttccaagagacagaacaaatgatttgtaaagcccttttttgataataaataaaatagattggtaaaa

SEQ ID NO: 239240 - DNA, 327 bp, Homo Sapiens
ctctttggaggctggggatagtagcatcaacattctcactgattaatgaagtggtgttcacattggatttgtgaacagacccatcatatgcagacttctggtctactgaggagcatgtgtctctacatgtttacagtggtggagtttccttgcccctctgccaataaccacaaaatgatcagtaatgagaaataattaagtatctagaggaagaaaacaaagacatgaatttcatgatactctcatgctttgtattatcagtgacttcattgtttctcttggcaaatttttaatgcatctgtgcttggcccaggggtgcatactagg

SEQ ID NO: 239241 - DNA, 277 bp, Homo Sapiens
ttgaagattacattgaaagtgaaaaacagaatggttgggtacttgaaatacagcttctactgaatgaataattctaaagttgaaaaataatagtaagaaccatcataagtctgtttcttctagtaaaggtgaaatgatgaaagaatgcttttttcccacccaaaaaactatgctctataaatgcagattagctagtttctgcctgtttaaatggtattattttatacattacaaaatggaaggaacttactttattaaacttaactttgatacttaa

SEQ ID NO: 239242 - DNA, 693 bp, Homo Sapiens
  misc_feature (27)..(27): n is a, c, g, or t
  misc_feature (43)..(43): n is a, c, g, or t
  misc_feature (47)..(47): n is a, c, g, or t
  misc_feature (57)..(57): n is a, c, g, or t
  misc_feature (62)..(62): n is a, c, g, or t
  misc_feature (90)..(90): n is a, c, g, or t
  misc_feature (141)..(141): n is a, c, g, or t
  misc_feature (182)..(183): n is a, c, g, or t
  misc_feature (220)..(220): n is a, c, g, or t
tcccaaccctttcaacctgtctagggncattccttccagccantccnaaaacctggncccangtttaagcatggccagtccactcccccnaattggagtgaagtaggaagccagtctgtaggaggggcttatggacctccnttagggcataggctgttggagtcccctgctgagagatcttnntccctaccttggtgaactggaagtaaacaaccggggngttgcttcccagccatctggaagagaggatcccagagcttcccctcagagagctgggatgttgtcagcaggcatcagacagagcaaaaagccatttttctttattctattcctgatacaaagcaactgagatatgcgtttctctttggaattgaggaagggagaataatggagcttttgcggtgatggacagggaaaaagtgggggagcagttaattatccatcttgacaggtgtagacacaggctgggaagctgggtgtgtcttaatccctgctcctgaaccaccgtggggagcaggaagcctacagtttccttatatcagcaaatgcatcatgttgaaacaattttactgcttgctttctgaatttaaatatagattttccctgagaagggctcaagcatgcagatggtaagaaaaacaacagtctagaaagatatcttcaagttccttctcctggttggatgttgattgg

SEQ ID NO: 239243 - DNA, 535 bp, Homo Sapiens
  misc_feature (214)..(214): n is a, c, g, or t
  misc_feature (439)..(439): n is a, c, g, or t
tccctttgcccctcccttcagtggaggggagactttgaaatcaggtgcttggggtgggggcgctgctcccagtgggggtgtgaggaacctggaggatgaatccctgtcccccgccctcctcctactctattcttccttaccctgcccctttccactccaaaacctcaagcctctggttcacatctgagtgacctttccaaagcaactgttctcnagggggtccttgggagccgggaggctgtgaccttaacccacttctttggacagtgccttcctggcactccacccccacctgccacctcctgagaggaacatttcggctggtcttggcaaaaacatcagtctatgatccaggcagcctggtacagtaccagctctgccactgacaccactgtgaccttgggaagccatttacacatatgggtctcagtttctccantatgtaaaatgacttttgtttagctttcctgattttcaaacctttttttcaaaccagtgaatcctcttgtttaaattgtaaaaaaaaaaaaaaaaa

SEQ ID NO: 239244 - DNA, 375 bp, Homo Sapiens
acaccgtccttggaaagcagaataaaaggagcagaatataaaatccaaagtctgaccagtttgtaaagaaaaacaaatggtaactggtgcttaaagctgatcaagaaagttaacaacaacatagaaaccacacgattgttccactgtctggaagcaccatcccctatcgcaggactcctgggccacaagcagtcggtcagtgcagacttcaagtgtgtctgtttgatgtggtgtgattgtgctggccttgtcgaaaaagatgtgatgcttctcagaacctgttccatctgtatgccattgttcatgccttaagaaatgcaaagatgtacaataaatcatttttaaaatgtgtgctcataaaaaaaaaaaaaaaaa

SEQ ID NO: 239245 - DNA, 482 bp, Homo Sapiens
atttagaatgtatgctcattggccttttagctatttatagctggagtcccacagataccaaatgtcatgaatggaaatccacatgcccatcattgacaatctaaacagaacttgtttgattaagaataaaggaggaggaaaacaacaaaggaaactatatttcagaatatgggaacgtgattactatcccaagaatataaaaaagtatttttatactatctgacataatcaaaagaatatgaattacatgaaacaagagccagaaggtacaaggatgaattaagaagcttgttaggcgagttaaagacatttcaagaaattgaaaatataggagtattagagtctttattgaaatcagtgaaggaattgacaatgtctgtcatcgaattagagtttaaatatcagatgctgtctcagaactcataagaaaaatcaatgataaagagatgatagctctaaaatggtaaaaaaaaaaaaaaaaa

SEQ ID NO: 239246 - DNA, 439 bp, Homo Sapiens
cggcacgaggcatagaactgactttattgttttgactaggaaagagcaaagggtttggaatcaaaagtcccaacttccccaccttcttaatagtgtgtgaatctgagtgccttattaaccttccctggtcccagtttcgtatctgtaaagttagaatagcaatcctgtttaatttgcttctctcaccagggatcagaaggccaaatgagatgatgtatgtaaaattgtaaagtcctccacagatggcacttgccacattacagagaacttgagaccccccccccaccaataacgttccaaatcttccacatgcagatctggagtccaggtgtcctggctcctggccctgaactttttggctgggccaaaggggcttttcggtaaagtgctttggtgctttggaataaaacaggatgaacatgaaaaaaaaaaaaaaaaa

SEQ ID NO: 239247 - DNA, 501 bp, Homo Sapiens
  misc_feature (481)..(481): n is a, c, g, or t
atcttcccatctcagccttcagttggagatttctgatttatgttaatataagaaagctgttgatagtttatcataaaggcatttccttatattgctagtataattttctgaaaattagtggtaagatgtgacaatacatcagctgcatccacaggaaaggggaattaattagcagttctgattctgggtacacttgttatgatcataatttacataatattttcatgaaaatggtcagctcacagctatgaaatgtaaatgatagaaatctttaatcatgtatatggatagacttgttactatttccttatcaaagtgtcactttagggacagcagttgcccctttaaattaaggatcaccacaataatactctgccatgtcatggaatcagcatgaagccctggatgctatccaagattctgtttcagttctcattttgtatattcttgtttgtgctcttgattaaaatatctccttatntttaaaaaaaaaaaaaaaaa

SEQ ID NO: 239248 - DNA, 496 bp, Homo Sapiens
taagctttatctaccttaaaaacaaagtcctttttttaatggccagtccaaccaattgatttctcaaactgaagtgcccaggtgtggactcatcaatttccgttagaatagggacatcctacttaagagttggtgcagctccaaggagctgacttgtccttgcttggggttttttttttttttctttcaccttctcaagtttccatggcctttgtgtgttctttttatgttgatttaaattcatatggttttccacaaatcccttctttggctacattgtctccttattcaatggattatccctttgtgggggctgcttattttaaagatgttgggggggaaacaaacccaaatctacgagcagtagttgcacatagttgccagttttaccttcttagtcattagatttccaaaccatgttgcagttttttggtccagatatagtatttctttctaataaagttttatgttgctgctctaaaaaaaaaaaaaaaaa

SEQ ID NO: 239249 - DNA, 255 bp, Homo Sapiens
cggcacgaggaaaatctccactgctcagaaatatgttctagcaagacggcgcttggtgaaggtgatcaacaatcgagctaaactgctttccctttgttcttgtatcctttatgaaatcatgcacttgaatgatgaccttgaaatataggaactgttcacttattctcatattatttgggcaccaaaaccaggtggaaggagataaacttaattttttcccagtaaatgcctaatgtatttactgggaaaaaaaaa

SEQ ID NO: 239250 - DNA, 484 bp, Homo Sapiens
  misc_feature (459)..(459): n is a, c, g, or t
aagtgtgggtgcaaagtaatgggcgctaggcgctggcgtcggtattcagcccagctgcacatctgaggcttggcagcttctcatagcgccttatcctctgccatacagcatccatctggagccctgtcttttaggatgagtggctttagggtcgggcattaaaccttaagcttcagtcgccatctgtgatgtaagtgggaggagagggtattggaaagagctctttctgggtcaaatagagttgggcttttcttgcaattgattttgagccagatgccacatatcttgaaaaagaaaaacggctgactttagtttgaagcgtaaataatagatattcgcacatgtcctttttagtagcagcccaaaaattgaatttcaacttaaaaaaaaatctgcgtcataataatagggatgttacttgctcttgctcatgcaccttttgcttagacctgctgtttntacgtcagaaaaaaaaaaaaaaaaa

SEQ ID NO: 239251 - DNA, 534 bp, Homo Sapiens
ctcgcccggtagcagaaccgaacccgggcttctggtctcagctccagaagtatgaggagcccctccaggcccagtcctgcctgcagggagagcccccagccttagggttgggccctgaggcttgaagcttgaaggcctgctgcctggaggaaggatgtccctgcactgatacagaagctgtttctggcaaagcctgccgtgtcttacatttgtctctctatccggattagatgttgctatatgaacacatcgggactgtgtctgcaggaaggagctccccattcgaggccttcacagtgtcacccacattcacctctttccacttaaacgtgtcccatgaatcttgtcataacagttttgtgttccttaactattttgtctgccatgtcatttatgatgtatataacctctttaatgcctgaaatcataagaataatcatcaaaggcaagagggttgtatattttcccgttggagacacatctggaatttgctgcaataaaataataataagaaagcaaaaaaaaaaaaaaaaa

SEQ ID NO: 239252 - DNA, 462 bp, Homo Sapiens
gaaacaagatcctgatcaaaatataagaggaattcttagaaaactggaaaacatacgcagctttgaaaagctacaacatatttttggggatctagaagactttgcaaattcctagaaaggaaaacacctcattcaaataatcagctcccttctgcttcaccatgaagccctgcgtaagcaggaaatgaaaactaaggctgtcattttctgaactttgaaggcatgccttcacacacaaatcactttgacaaagggtgggagatgtacaggcaagagatttagggaaatcttacaacaaatcactggctgaccactaaataatactgacccaggtatgccaagtaggaagccagatgtagaataaaaactttaaaaataaaaattaaaaagaccctggggcaactgctgcagggaatacagaatccacagaattcactacatgaaaaaaaaagttggcggccg

SEQ ID NO: 239253 - DNA, 449 bp, Homo Sapiens
  misc_feature (27)..(27): n is a, c, g, or t
atagtaatggacacttctcacacctgnccaaggctgttggtacccacgaaatgacagcaaagatgagaggaaactgaattgcaagagcaatatgaaaccccaaccaagaggagtactctgcagttctttggctttggtatagagtggccactttctctaggacctggaagaagagtttgatggctaagaacgattgtgatcctaggtcttctttgtacgcatctccgtatttaggccagatctgcctcctgggaagggaaggggccaatgtcagcctccaggtgatttctttaatctgacattacaaagagaccaacagactgccaattctaccacattcccctggtgggtactcgactatgtagttttctctatgcttctggtcaactctgacacatcttggaattcttgtaataagaaaagaaattttttaaaaaaaaaaaaaaaaa

SEQ ID NO: 239254 - DNA, 608 bp, Homo Sapiens
tagagggatgatttgtacagtaaagtagaagtggacagagtatgctttttgtttttgtctgtctggacagtagttggctgtaacaaagtttgtgtctaactaaaaagtacctgttgactcagatagccacagtaagagactagaacgttatggcataatggtgacaaaaatgagttcaaatctacagtccaccacttcctagttggctcaccacttattacctacacttaatttttgctacctaatctgtaaagtggaaataataatataatatctgtttactgagagatgaacaaactatttggttcttccagactctcagtaaatactctgttcagtttttaatcctttattttgtaggtataataacatgtaataattggtaaaggatcattaaataatgtcttcaagtcataagaattgtactttgaaaaactaatttggcagaaggggtaagtaaaaggatgagaagtctgacatggagaaaccagtataatataatgaaagtctgaagtggtgtggtggcaataggaaaagaaaagatcaggatgagaaattgctttaaaaaataaaagtacattcttcataagcaaaaaaaaaaaaaaaaa

SEQ ID NO: 239255 - DNA, 648 bp, Homo Sapiens
ttcggcacggggattttatactaactctagtttttactagaaatttaatctctgattatttaaatggagccagaatagctttaaaagaaagtctgttatattgactaacagaatgaaagggacctgctttgggattcacaagcaagttttcatacttgtgagaattctaagtatccatcactgttctttaaatgcatttgatgagatgggccctccaggagccacagaattcatcctcctctctctagggctatgcctgttgctttcattacccttttataatttgtggctgcagggagaggctctgttaagatatttcagaatataaatgctactacttttcatttctgttcttttcttgcctttccaagtgtgcacagggacttgtgcagctagagattggaagactccgagctggttcctggacctccgcaaggacgaaatcacagaacagtcaggttgttatggcttctcatcagactgactcactcttctgcccccactgggagaaagttccccatttaataaatggttgtttggaaataatatctaatgtacagcatattcacagcaccaagtttagtgaactttcatgtgtttgaaataaaaatgaaaggtgggatggaaattcaaaaaaaaaaaaaaaaa

SEQ ID NO: 239256 - DNA, 318 bp, Homo Sapiens
gtatgattacttacctaaaagtctgtctctatagctggactataagttgtgctttttccgtctttggttcctcagcctcttgaggctgcctgtgttaagccatgcatgtagtaggtagttcataaagtcatactgaattatttacttaattggtttcagcaggcccctaatcaaatacatgctagaagagaagaaggcaggctgcgtagttaggcaattcattatcacaatatctttgattagtcagctatcactttggaaagtgcagagaactggagcaagcccatgagatgttggacatgaggctggctgagtttt

SEQ ID NO: 239257 - DNA, 380 bp, Homo Sapiens
  misc_feature (14)..(14): n is a, c, g, or t
  misc_feature (20)..(20): n is a, c, g, or t
  misc_feature (45)..(45): n is a, c, g, or t
tatttttttttttnaaaatnaagaagatgaaggtcctcaactttnccctggcccccaggctgggtcctccgaactcttgggcttccaaagcaatcccttcctgcctgggccttcccaaattgttgtaaagtacaggagtgagccattgcaccccagcccaggaaaccccagattcagaaaggatatctgtctagagaaaaatctcattcagtgaatttaatacttacatacaactatgacttgtaagtccagagttttagggtaagaagcatgtaaccattgtacccaatggagaatttaaagctcaatgtagtttggtggctccaagatcaagccatccatgtttatcaccttatcatagaaaccaaatatcctgaaga

SEQ ID NO: 239258 - DNA, 518 bp, Homo Sapiens
agggtaatgatatagcagttaaccaagaccaacatggtgtctgcttggttgatgcttgaaataaggtgacctggccccagccacccgggtggccaggagctgaaagggctgtaacaagtaggcagtgaatagtcttcaaacttgttacttgcatacctccctacaaattttggaaaaaccatgagactctgattgattttttaaaagaatatctaaaatcattatgtttaaatagcctcaaaagaagcattttattatgtattgtaaatattggcattttaaaatgttattcggtcttttaaatgtatccagtgaaatgttggtacaatagagttttgatagctaccattttccatttttaaaaatactttaacacgctttgtaacagttggaaatattgtttgattccttttgctccctgaactccattcttcttcttctgaagaattttatcctaaaatgaatttattttttgcttaacactcctattggttaccttattaaatattaatcagtat

SEQ ID NO: 239259 - DNA, 594 bp, Homo Sapiens
aggtcgttcaatgggctcaagagcagctgcttctgtaatgtgtcacattgagccagatgatggtgatgattttgttcggggtctcatttgtatttcttacccactgcaccatccaaagcagcagcataaactcagagatgaagacctctttcgtttaaaagagcctgtactgtttgtgtcaggctcagcagatgaaatgtgtgaaaagaacttgttggagaaagtggcacagaaaatgcaagctccccataaaatccactggattgagaaggcaaatcattccatggcagtgaaaggacggtcgacaaatgatgttttcaaagaaataaatacacagattttgttttggatccaagaaattactgaaatggacaagaaatgtcattagttaaaagccatgttatcttgagtacacatacagttaatttgataaagaagagtatgcctctcagcattgtgagatatatttcagactaatttgatgttctttaatgttcccttatttttgaaacacgttttaaatgtgaaattaatgtccttcacaaaatgtcttttgaaagcactgttacagttgtataaagatgatgtaaaaat

SEQ ID NO: 239260 - DNA, 484 bp, Homo Sapiens
cttttatggctcagctcactatgcttttttttaatactggtagcttcctcaaggttggaaaacaagatctgaatactatagaaaataataactatttttctgtggtcatattaaagatataatggctttggattttggggtgatttttctactgtcagtttaaaaaaaacttgtctatttgcatttgtgtgttattacttctagttaagagtatttccaaggaaagtttcatgttacttattttgtttccatgtctttttccaaaagaacttattttttatattataataaatatcagtggaaaagtaggtttcgttatatagaaattaactttaggctgggtgcagtggctcaagcctatatttgggaggccgaggcaggaggattgcttgaactcaggagttcgaaactagcgtgggcaatgtagcgagacctggtctttacaaaaaaccaaaaaaaaagaaaaaaaaaaaaataaaagatt

SEQ ID NO: 239261 - DNA, 493 bp, Homo Sapiens
gtcttgctttactctcacgcccaagaatcagaattcagaacttttaataagaaaagctttcagaactcaggaaggacaaggaagacattctggttctccatgcttaacattggactgtttcttcaactgagactatggaggattcatcaacagaccaggaagcaacagcctgggctccagaattgaccagtagtccgtgcacagacgaggagaggtcccatgaaacttcggcgcagtctgggaaccgagctctttttgtaacaagttgtttgtcaggaggcccggtcatgaaagcccttcctgactgggctcaaggaatacaaaaaggacaacttgtttttgccattgtctgttgtttttcaataactagttttccgaaacagcactggatgaatgcctcaaggggctcacacaactcgttccaggacttagtgaccattgtttctgtccctgttcaatagagttcaaatttaatatttaaaaaaaaaaaaaa

SEQ ID NO: 239262 - DNA, 519 bp, Homo Sapiens
aactgaagacgctgcctaaaatacaagctgagttagagacagcccttgtaagactaggtaggtatttacagggcctctcccactagctttgtttttccagagtttgttctttatccggaaattcttaatttgcctactgatcatttaaagaaagggttctattaacattgacacagaagagacactttgtggcactttttaaaaatctgagtctcgtgacttggtataacttctgaaacttactgttaatttatagcagagctatttgagtaatatgctcttctatgagtatgaacaatagaagaagtgtgatttttaaagtgatttggactacaaaataagagcatggaatataggctttacagccagtacttgctgaggatgtactgtgtattaggtgtggtgcatataaaaaataaataaaatgtggtccctgtcttcaaagagcttatgttttctaggaaaatgctacatattactagctactccaaggcagaaagttgttagacaccaaatcag

SEQ ID NO: 239263 - DNA, 458 bp, Homo Sapiens
  misc_feature (51)..(51): n is a, c, g, or t
gaggcttttcctggatatatttagaaacactagaacgggtctacatattanacagtcatgaattattaccagccagtccttgagtaatctcaggcttaacaggcatctttcttatttgctttctgtcgattccaaatatgagtaaacacagtatatcttattctagaggaaatgtccgcagaaaagaagtcactccctctcagggccttcagataagacttcatcaggtgtactaccagactgccattacagttcccaaaggtgattcatttccagtgggatttgtagagtaaatctcagttaagcaatcacaaaagagactaagtgtcccagaggatgtcaagtagcttgaaaggcataatgtaaaaatattatatctaccatggcagaaaaccagattgagaccagaggaaaggacttcacttataaatcaatgaccttgacagtagttgtaatcg

SEQ ID NO: 239264 - DNA, 435 bp, Homo Sapiens
gctgtaaaaacgtagttactgtatggcactcaaaaactatgttaaatgatccactaactttttttttcttggcccatgattaatggaatgtatgtaactaggtagggttcctttcttagatctagaggaagtacagccacccactgacatctgaatttatatacctgttgagttttgagtgcacccaaacactcgataaaccaggtgaagaaatttagcttccatgttctacttcagctaaaacagctacatacaacctagtacacttgaagtcagacagacatttcagttgcttacctccagtactgagccttgctttgggaaactaaaagatttagaccaagtcactgccagtttttgcctttgttgcattttgtacagtttttatatttttgatatcttgtaaataaagacaaccagcttttccaggttcat

SEQ ID NO: 239265 - DNA, 515 bp, Homo Sapiens
  misc_feature (171)..(171): n is a, c, g, or t
cttattaaaacttctagacagaagttaactttgtaagtgattaatactatatggacctggattttgcaagccaaacttaagaataatcttcctttgaaattgttatgatcacgaaaggaaagcagacgctagggaaaaattgtgaaagactgaaatagaccgaaaagttgnctgggtgtcttcaatggaaaactatgccttgttttagggcacccccttccaagttttctgattctataaatgatgtgcctttcattatctttgagctcctatatagaacacttataggaatgtaaaaagttcttgtctatagaaataaaaattgtgttcagtgaatagcaattgattattgtcccatggatattaaccaattttacatctatttttacattcatttcagcattcctgattcaacgataaaagtgtagtacattgaattctcctatatagcatcttactggttcccttatgagttaattaagaagttaaataaaatctttgatgtttcatcctat

SEQ ID NO: 239266 - DNA, 441 bp, Homo Sapiens
acaggtgcaaggagatttcctgggggctgcacacactgtgtgcagcatattgcaggctttcactcatttaatatctacaaggtcctcaataggaatataaattacttatgatttccctgttttttcttcctataaggaagctgaggcacaagttaatcaaagtctcttggcctagggtgacacagctaagatttgtacctagagatttctgagtgttgacttctctcctgcccccacctatctccccccccaaaaaaaaaaacacaacaacaacaacaacagaacataccagggattcatggcttgcccaatgttggagggggagaagagaggagagggatgagataagctcctcccacccggctgactcgctgtgtgtctcttttctcaccccagggcctggccatgtccccaatcggaagcctgttcccttacccctac

SEQ ID NO: 239267 - DNA, 459 bp, Homo Sapiens
aatatttgaagtaacactgtcagaggattttcccaaattaaccccagcaaatcacaagtcaagaagtagagaccagtaaacaggagaaataccaaaacaattatacacaaacttcagaaaaccaaagacaaaaagaaaatcttcaaaggagtcagagaaaaagtaacctgacttacagcaaaacaggacaagaattaaattagacttcccatcagaaacacagaagcaagaagactggagtgaagtatttaaatgctaaaataaagaaaaaaaatacaaacttgagaaataaagacttcctcagacaaatgctgagggaaataatcaccatcagaccttccctgtaagaaaatattaaaagaagttcctcacggaaaaggaaggtgataaagttcagaaactcaaatctgcgtaacaaaggaagagtgccaaagaaggaataaataaaggtaaaagaaa

SEQ ID NO: 239268 - DNA, 420 bp, Homo Sapiens
  misc_feature (6)..(6): n is a, c, g, or t
ctctcntgaagcagtgacgcttgccatttcgttttcattggccctcttagaagatgattaagaaaaaatgattgctttgaatatgtgttgcttctgtcaccccgtcccctgtgcaagaatcctggggaaagcgatcttaggtttacagacctcaataactagtctgtagaggcttaaggaaaagtgtcactgagacttgccaggatttgtcagtgatggagatcgtgtgggttgcattattaatagcctttactgtcagtattttcattcaatccgcaggtgtttattgaacctaatttgtaccatactctttgctgagtaccaaggaggttaaactaaataagtaaagaaatggtctctgctctcaaggagcctgtagaggagttgtagtctttcctcctcccagccccctgccctcca

SEQ ID NO: 239269 - DNA, 527 bp, Homo Sapiens
  misc_feature (78)..(78): n is a, c, g, or t
  misc_feature (127)..(127): n is a, c, g, or t
  misc_feature (149)..(149): n is a, c, g, or t
  misc_feature (164)..(164): n is a, c, g, or t
  misc_feature (199)..(199): n is a, c, g, or t
  misc_feature (245)..(245): n is a, c, g, or t
  misc_feature (516)..(517): n is a, c, g, or t
tcccccgggggggtacaagcggtccctgttgtcctacacagctgtaaggtcccccggaaatgtgaacaacactattgncgtgcccgcttttgggaggatgggagagcccatggcaaagcacaaatgnccccccgagccctatcccccanaccaaagtaaaagtnaccagtgatggatgatgaccctgcccaaatggtgncccttagatagcgttaatgaaactggatctacggccctttccatanccagagcagtacaagagtaagtatcacattcacaggatgaattaagaattgccaaggtgttcaatggataatggaaactgcagcatctcctgtcccccagccatgtcattctagctgtgaactggcacgaatgtcagcagcttttcattcagctgaatgctctttgggagattagggcagagaatggagtgttttaatgagttggaaattcatgctttgatgagatataagacctatgtgcatcttttctaatacctcctgcacccttctnntgaactctgc

SEQ ID NO: 239270 - DNA, 424 bp, Homo Sapiens
  misc_feature (160)..(160): n is a, c, g, or t
gcattgcccacttactagctatgtgaccctgggcaagtcacttaacctctttaggcctccatttccttgtctgtaaaatagagataaaaatagtaccttcctcattggattgttgaagggctatagatgaatcagtatgtgtaaaacacttagaaagggnccaggcatggtggctcacacctgtaacccccagcactttgggaggccgaggtgggaggatctcttgggcccaggagattgagaccagcctgggcaacatagtaagacgctgtctctttttaaaaattaacaaaacaaaacaaaaacacttagaaaggaacttggcaagtagtaagttatttgtaatccaaacactttgccagactgaagcaggaggattgcttgggcccaggagttcaaggccaccctgggcaacatggtgtct

SEQ ID NO: 239271 - DNA, 363 bp, Homo Sapiens
  misc_feature (76)..(76): n is a, c, g, or t
  misc_feature (170)..(170): n is a, c, g, or t
  misc_feature (261)..(261): n is a, c, g, or t
  misc_feature (263)..(263): n is a, c, g, or t
ttccaaacccctgtttaaatgggatggtgaataattccagtttccatcccccactgaaatccttaaaacctataanccctatcctttgttcctttatgtccccttcagagatcatatgtcattactcatatatgaattatttgaagtatgggtgatcatgatgaaagtgnccaaatttctacttagctcctgtgggtttcaggagaggaggtggcctctagggtgaggctagggattaagtggagaaacaaattgggaaangnccaggaaaagagaaaagggtgttaaattaggatttcttggcattatctttcctatcaagatatatgttcattatagacattttagaaaatataaacaagc

SEQ ID NO: 239272 - DNA, 604 bp, Homo Sapiens
gtctttgagtctcgaggtgtcgaggagaggctgaaggaggacgtgggttctgcgttcctggttggtgcgctgtcacccctcttcacggaatccacccagactggtcctcagccttgtggtagcacaaatgaatgcagtaaaaatgcttgttggcctcaactgtgacttgtaccagcgttcacagaatactgcactgaacctcaaatcttgttattataaaattctaagaatgtcagaaatcagaagagttttagaaatcaagtgtttattccactaaaggacctttttttgatttaaaaaagttctcagccgggtgcagtggctcacacctatcatcctagcacttggggaggtggaggcaggaagattgcttagtctaggagttcaagaccagcctgggcaatgtagtgagacccccatgtctacaatcaatcagtcaacacaaaaatacataaataaataaggttctcatattggctgggcacggtggctcacacctgtaaccccagcactttgagaggttgaggcagaggggttgcttgaggttaggagtttgagatcatcctgggcaatgtagtgagaccccatctctacaaaaaaaaaa

SEQ ID NO: 239273 - DNA, 565 bp, Homo Sapiens
gagatctgtggggaagctccgcccagccacactccttgggataatactagccggttctgcctgattccttttccccggagccagcctagggggcccgggactcctctagtgagccttgactgttaggtaagagacaggaagcagacaagccaagaggttgctgcagctgcccccaggaggaaacgggcagcagggagtgtggcccagcccccactgtacccctccaggggcccgagcccttgccagcccaatgacaccttgaagtcaccacttttcctttcttgcccgctaataaaacctatttaaacaggaaattcataccaaatgcaaatgggttttgttttccttggcattttgttgttccgatcacagatttccctgccagggtgtctgtggttatcagctgcaggctcagcttggggcggccgcttcacacaagccactctgtaccacgtgccctaccttagtgacgggagtaaggagcttccttcccctccatgtcattccttcctgttcccttcattccccaacagcaaataaaactgttgaatgctcaaaaaaaaaa

SEQ ID NO: 239274 - DNA, 595 bp, Homo Sapiens
ggtttcccagagcaggaaaccatcagcttcagaacgtttacctgatgagaaagtcgaactttttagcaaaatgcgagtgctacaggaaaagaaacaaaaaatggacaaattgcttggagaacttcatacacttcgagatcagcatcttaacaattcatcatcctctccacaaaggagtgtcgatcagagaagtacttcagctccctctgcttctgtaggcttggcaccggttgtcaatggagaatccaatagcctcacatcatctgttccttatcctactgcttctctagtatctcagaatgagagtgaaaacgaaggccacctcaatccatctgaaaaactccagtaaaacatttataatcattgtttacatgaagttaaataatagggataaattctgtttttttttttatgttgaaaattctgcaaaacgagatttatttaatattgttgtaaacattcttaagggataggtagaagaggcgtgtgtgtgttgtgtgggcataatttgagttgtctaagagatgtgatgtaacatagtttctgtgaactgatgttactttcttgtttttcaaataaaggatcaaaaaaaaaa

SEQ ID NO: 239275 - DNA, 620 bp, Homo Sapiens
gtgacacaaggacctaaggtctctctcttctcatcttggcacttcagaagtctccccaatcttgacaaagccctggagaaagggccgggcctcccgttgataagaatatcactgcagataaatggaggtttcaaattgaaagaaaggaggagggcctcctgttgataagattattgtcactgcaggtaaatggaggcttcaaatagaaatacatttcagttacagaaaaaaaaattatctttgttacacatttgagtttgcaggcctaaggttactcccgctacactatcatctgtaaccataacgcactcaacattttaagctaactataaggattgttgcttcactcaaagatcctgaggttttattcactaacatttttatttggtgactatagttgacaagaacaaagctgtggggaaccaacaaacactgcaatgcctggcattgtcacctcactagattgtgagttcctctgggacagggtccgtacattttcttagaatccctcacttagccattagcctgcacagtgcttgtacttagtaagtgctcagtaaatgtttgtggaatgaatgcatgatgaacaaaatatatactgaggactcttaaaaaaaaaa

SEQ ID NO: 239276 - DNA, 620 bp, Homo Sapiens
gatctctttttgaaagggactcctttacattccaaaagggaaaaacatcacagcaatagttgctatacgtaagaacatgctaagcaaatatttttccaggctgtgctgtgcatttttaaaaggtctaatttaattgcttttaatatatatgtacatatatgttattttaactgtggagaattatttaagttaaaagactggtttgatttgcctatggtgtgaaatcctttgttatttttctaaaaaaataaaatttaaaaagaaagaaaactaaggaagaacaagaagctatttacccaaagtgagctttcagttttagttttgcatggctgtttgactgcctttccgccctatgaaaatcaagaaaatcttttttaaaaatggagtcctgctattttccactccttgcagataatacaaattcagtttgtcaggttggatggtgagttgggagctgtgatggatctgttggcgggttttggatgtgtaaagaatgatatatatattaaataggtcaatcagactatgacagctatgtacgaccatttgtatgtgtatctatgtcagaaagaatctttattaaaatattttgatcaaaaaagaaaaaaaaaaaaaaaaag

SEQ ID NO: 239277 - DNA, 805 bp, Homo Sapiens
attcccaattagttatacatcgtaggcataattaacatcctttcgggctgactcataattatttgagcttgtcatgctgtaatatgtacatggctatagatactatatagagtaattcatagctgatttcaaatctctagttttcttatgtgtaccaagcttccaattacattagcagggactctgagcactcatgaacagagctgatgtcagatacaatgtttgttacttcaaaggattcatctaggaatgacaatgttatcttccatcataattaagcaacagtagaaaatacccctacttaagagctaaaccaaaagggtccacaaagggttgtacaggatccccattttcatctcatttggaagaataggaaattaatcaggtcacttgaaattcactttaaatcaggtcctagggtaaatctttaaaaaaggcaatggctgttttcgcatggagtgctttctgtctgcagttccatgagttagcaaatgcatgtctccattaaaggtctactggtaagctatgtcactatatacatactgtacatgttggatcacaaattagcagttattagtcagactgtacatagcaaaacaaaccaaatttaatgttgctatacatcccaaagataacatgggtctcaattcaaggactgacccctaatacaggttctctgtttaaatatgtagcccagtaaactaaattaaaggtaccaaacaaaactggaaaaactattctggacattctgtcaattttgctaacactgttgaaagttttctttgcttcagctggcttgttttct

SEQ ID NO: 239278 - DNA, 483 bp, Homo Sapiens
  misc_feature (59)..(59): n is a, c, g, or t
  misc_feature (82)..(82): n is a, c, g, or t
  misc_feature (87)..(87): n is a, c, g, or t
  misc_feature (123)..(123): n is a, c, g, or t
cctgaaagaccccttaaatgccatattattaattgaaaagaacccaatcctgaaaaagncctacatactgtatgaaaaaagntaaanctatggagacaataaagagatccagtggttcccccngggttggtggtggagggagagataaacaggcatagcataagggatttttgccagtgaaaattcactgtgtgatactgtaagggttgatacatgttatcatgtcatcatacgtttgtccaaacccatagaatgtacaacactaagcatgaaccctaatgtaaactgtggactttatgttaagataatttgtcaatgtaggttcatcagttgtaaaaatttcccaccctcgtgggagatgttgatagtggaggaggctatgcatgtatggggataggggatatatgggaaatctctatatcttactctcaattttgctgtgaacctaaaactgttctagaaaaatagtctatttaaaaaaaa

SEQ ID NO: 239279 - DNA, 639 bp, Homo Sapiens
gtctcccgatagcagcagcatcgaaggggtcacctccactcctcttaaaagaatagcacagttttgaaataaatgcatttttttttttaaaaaaaaggacagagaggaaagagaaagacaaatagaattgcatcactaatgatgtcattattgcctggaaaggaacgaagggaaggccattttgtccatttctggaggcgtctttgagaagggttctttggctaaagaaaggaacagtttcaccttcctttccaatttggtaaggacatctctggcctgctcaagtttgaagcttccccatcagaagtctgtaaaacacaccagaaggaaaagacacagacagggaatgaagcctgcaaagtccctggggctggaatgtcttgtggccaagtcactcctgctggcgctgtggagtcccaggctggcctgcagaaggaacccttacctctcctcaattctctctgctagttgagagcaccgagccatttccttctttccattttctgtcctagggtctacttgacaggccaacaagagtggtggtcccacaccccaccctgccctcagcatcagacaaagagaacctgggacaaaagctggggcgagctgggtccccacgtcgctctctcaaccctcgtg

SEQ ID NO: 239280 - DNA, 583 bp, Homo Sapiens
ctagaggtggaggtcttatgcactcagaaagctgccagttgcaaagtcctgtctggctcttgctcctgcaagccatgagtgatcatttttcagaatgccccctacctctcctctcttttgacagatacaacagcctcagtcaggaatgacaggaatacctgcatactttccctaactcaataccggaaaacggacaatatgaagagaggagggatggagcaagatgtgcccacaagacaggtgtgataagtttccataaaaactgatgcttcagaagaagggagcgtgaaagactcaaaggcaatgacagagtaatcttgtgtgtagcagagatgcaatgtggcttctccccttccaaaaagacctgattttacctcactgccagaaaagagaatggtgctcaaattgctttgtacatagtgttcactgggcagcagttcatctacctggataagggctccgagctacagggaccctgacattgggatgtatggagagttggaattcaggaacagttgtaccgaatcttgaagtgaagaagaaagtagtttgttgtacatatgaatgaaatccaaccctcgtg

SEQ ID NO: 239281 - DNA, 700 bp, Homo Sapiens
ccaaagtgttgcgactacaggcatgagccgccgtgcctggcaagatatcatcttcagcaaaagcaggcagcaacagcagcggtttgcctgtagctgtggtcatggttaactgaggcctggtttcaagggaaccgagtgaatcagggttaacggcttgatatgctgccgttctctggatgcaggatgacatgagaggtcgggagcagtctcttcggcaagccctgctgcagagagcccgcggtggacaggaagggcggggggggcgggcaggctgcgtgccaggccaggctctcagcctggtctttaaggtccatattctgttcctgaggcatccagaaccccagactccttctcataacacaggaacacatcactgggatgctgcacatcacctttgctatttcagatgacgctggaaagtgctgtggacctgaaggtgagtgggcagaaaggggtttgagagtatggacttcctgggcgttcccatggcttcatctgatgagaaaacctaggaaacgtcttccaagtgaacttcctggtttcccttccctagaaaccaggagcagggtgggagtaaagaaatggaggaaggggctgggctcggtggctcacgcctgtaatccgatactcaggaggctgagattacaggcacccgccacctgccgcttttttttttttttttttttgattttcctcgtgc

SEQ ID NO: 239282 - DNA, 752 bp, Homo Sapiens
  misc_feature (722)..(722): n is a, c, g, or t
atcaggaatgaatttagttccctggaacaataacatctggacgagaccatcccatgactaaagaattgaatgtaagcgttttccctcttagccatggagggaagttttattagcacatttttttttttcccccaagggaagaggaggaggaggaggagaaggagagacctattcattaacaccttacttttgttttaagaaatattatatccattaccaactaaaaataaattgatttgagtaattctgagacataaagtgcccattttctttctcccttgatttatgtcattgttctgtttttacagcttactgttgacagagtgaggtaattcaactacaatttttccagtgttttttcccatgtacatataattgacagcacggaatatggactccaggccagtaaacctgccctctggagacagatctccaaggtccacctcacaaaccaggtctccgctcacacacatctcgagcaagtggctcatggctgcttgatacttagaaaggtaatggttcaggaagaagccctgtacgctggcagatttcttgagcagtttggctggcaatgttcctgctttcacaggcgaaaggccagtaggagtttggtagccagagataaaccctattactatcaagcgccctttcgtagccagggcgtctacagccaagtcaaacatggctcccccaacagattcatagaccacatcgacacctcnagggtactcctgcttaaggacggcctcgtg

SEQ ID NO: 239283 - DNA, 655 bp, Homo Sapiens
gaagggttggcagttgactctctggccagcactatgtgtagcacgcatcactagaggtgtgaaggccccacagaggctctggtgtgtggctttgttttgaccaaggcgtgcaggcagtggtcctacggcagggctggcccgcgcctcgcctcagtgccctcagcgccttctgccttctggctggattcagagtcccgggggaaagagactgaccttctcgacttgccctcaggttgattacgaagcctcagagcccttgttcaaggcagtcctggaggacacgaccctggaggaggccgtggggcttctcaggagggtggacggcttctgctgcctgtctgtgaaggtcaacacggacggtacacataccactcctctcgtgtgcacagctgcctggccagactccatgacccttaagtccctggtggttcttctgcacgcccagcagccagggacccccagagccaagagaggatcaaaaaaaatgtgccccaggtccccaggaggcccccaagccagctggaaacctcccacccactgactacagtgccagagcagcttctgagactgggagggtccttccttctctcctactttaattttctgcaaccttcctcgcagaggctcgtatctgggaatcatctgtggcctggtg

SEQ ID NO: 239284 - DNA, 378 bp, Homo Sapiens
  misc_feature (17)..(17): n is a, c, g, or t
  misc_feature (141)..(141): n is a, c, g, or t
  misc_feature (146)..(146): n is a, c, g, or t
  misc_feature (151)..(151): n is a, c, g, or t
  misc_feature (157)..(157): n is a, c, g, or t
  misc_feature (172)..(173): n is a, c, g, or t
  misc_feature (181)..(181): n is a, c, g, or t
  misc_feature (185)..(186): n is a, c, g, or t
  misc_feature (190)..(190): n is a, c, g, or t
  misc_feature (198)..(198): n is a, c, g, or t
  misc_feature (201)..(201): n is a, c, g, or t
  misc_feature (203)..(203): n is a, c, g, or t
  misc_feature (369)..(370): n is a, c, g, or t
cgggcggcagaggggancctttgtcctcaaaaaaaaaaaaaaaaaaaagaaaaaaacagtttacccattcctatcagaaaatgttgacccacccctcatatttttgggtaaactgcagtaattttcccttaatactttttngaaanctttnccatcnatagcccccagtatnnacccttantttnncttncttgctcnctnangggagttcggatgcccgttacagcaaagtggattttgcgtccaaagtgataagccaaatatcaggattttcccagtttctccgtaggactgatgtttagaggaaagccttccctgactcaaatatgtttctccatataaaaaggggaaagtaaaatgggttttaannctggtggt

SEQ ID NO: 239285 - DNA, 560 bp, Homo Sapiens
  misc_feature (18)..(18): n is a, c, g, or t
tatatacagctccacagnatgtgcttctcttcatggtaattttccatatatatcatctactttgatttctgccccgttttaatgtccatataaatgtttcagtccaatttgtaagtgttgagtccactgatgtagaagttctgacttgtaaaccattcatcctgctttagtcatatgatagtaccgatgcaattagctcctctcccaccaccgtgggggatttctccctgagatgaggtgtgctttgaccagctgcatgtggcttgattgcattcctgtttctcttagttccactggatcttgtttttttttttttcgttatattacctgagctcagggtagttccgttcatctttagaaagagctcatctcttccatccttagaaggatctcatcagagaactcatatgtaatcaatcaggtaaaagaaatactgatgtacttctgagagactggtgagaggtgggtcataggaagcccataggtctgaggaccgagtcagtgtcttggggatggggctgttccatatgattatttttgtgtggcataaaagatgtaaa

SEQ ID NO: 239286 - DNA, 390 bp, Homo Sapiens
ccaggccctgaaggatggggaggttttggacagagggaggagagagttagaaaaatttttggtagagagaatcaggtgaaagagatgccctaaagaggactgagtgggtctgaggtgaatgagtgaggaagagcagagtatgtggatacccggaaacacacacacacacacatcatcattatcatcatcatcattgtcgtcgtcatcatcttgctgagtcatcatcatcatcatcatcattgtcgtcgtcatcatcttgctgagtgtctcttgaagtacaggctgtgacaggttgtgggccattttcctgaactccccccttacccgggatagtaaacatgatacccatcaataaaggcagactttattgtgaaaaaaaaaaaaacaaaa

SEQ ID NO: 239287 - DNA, 454 bp, Homo Sapiens; identical to SEQ ID NO: 91254

SEQ ID NO: 239288 - DNA, 500 bp, Homo Sapiens
  misc_feature (53)..(53): n is a, c, g, or t
  misc_feature (77)..(77): n is a, c, g, or t
atgtttttgcagcaaacgcgatttaacagaagtttacaaagcaacactgtagntaatgcataattttaaaagttgantaacatttatctattgttaaagcaacactaataatggaataaaaggaaagcaaataggccaatgtggcaccataggcttattttaggtaaattagttccatcatcttatgcagttgtaagtaatgccaggattaaaatatcaagcaagccacgtaaacagtggcaaatgtgtgtgtgttttccatttgtttggtaagcagccattttactcttgcactgtaatgaactgaagggaaatataagataatgcttttttccccccatattgctattcaactacctctatatgcttgatttctttttaggattcccatcctccaaatctgtacaaaaacgtttcagctcatctgtgttgtaataacaatgtgatacagacagtttgtgtgaaagttgtttgttcattaaaaaatgtttcctattgcc

SEQ ID NO: 239289 - DNA, 586 bp, Homo Sapiens; identical to SEQ ID NO: 88479

SEQ ID NO: 239290 - DNA, 551 bp, Homo Sapiens
agtcaatcccatagaagcgatccaaattctgagtctttatattttgaggatgaagatgggtttcaagaactaaatgagaatggaaatgctaaggatgagaatattcaacaaaaactttcttctaaagtattggatgatttacctgaaaactcaccaatcaatatagttcagactccaattcctattaccacctcagttcccaaacgtgcaaaaagtcagaagaagaaagctttagcagcagcccttgccacagctcaagagtattcagaaataagtatggagcaaaaaaaattacaggaagctttatcaaaagcagctggaaaaaagaataaaacacctgtgcagctagatttaggggacatgttagctgctctggaaaaacaacagcaagcaatgaaagcacggcaaattactaacaccagacctctgtcatatacagtggttactgcagcttcttttcacactaaagactctactaatagaaaacctttaaccaaaagtcagccctgtttgacatcctttaattctgtggacattgcttcttataaagc

SEQ ID NO: 239291 - DNA, 476 bp, Homo Sapiens
  misc_feature (160)..(160): n is a, c, g, or t
cagtcgtttgaggccactgcgggtctccgcgtcttggtggtagtggtccccagggcccagctattgtctctttatctctttgtcttgtgtctttatttatcacaatctcttgtctctgcacacagggagaacacctgctaagccccgtaggactggaccntacacgttttcctctgtttgaaggcagtccaatgtactgtctacattcatttcagttcagttcaatatatatttacatcagattactgagcactattatgtcttaatgatgggtaaacaattatgaatgcaataccatggactttacaatgtggttggggacacacatacttaaacatgattttcaagttgtgggtgagaactaaggtggtggtatacatagggaatggccagtcactgaacaaacttctgtattaaaggcagttataagatacgtcgacgcggccgcgaatttagtagtagtagtaggcggccgc

SEQ ID NO: 239292 - DNA, 494 bp, Homo Sapiens
tcttgatatagagacctatgaattaaaagagcaagcatctttttatcacataccaaacatacaacaaatgatggaatagagacaataataaccacaaaaaaatactcttattcacaaaggggagaaatggaagcagatcacagccactggtccataacaattaggaaaactcattggacaatggttgtcaggttcctccattggagggaattgtgtttcatgattaggcactgtttctgctccttaaaaatgactttccagtctatcctccacagctctttgttctacactctagggaatcattctttttccctcatcttccttagtcacttgcaaaggacattagagaatatgccctttttggtggataaatgggttcttcaacctgctttctgcctgtagaaaattagaggccaataatctgtttatatcttgtagaatgtctattttagctggtcccggtacttttgtcaataaagttcttttttaaactt

SEQ ID NO: 239293 - DNA, 573 bp, Homo Sapiens
atccattcagccatcaatggatatgtgggtggctgcattgctcattactgccaccccaggaaggtcgtatagtggttaaatctgtgctcattacacctgggtatctcttaggagtttcttgtttgccctcttgtgtaattacggtcttgtttttttcagtaatgtcctgtttgcccttcttatcagcatctatctagctacattctgacaggataactgcaaactgaatgattcctgggcatcataatggatgtttctttctacttaggtgtctcccctcctctctgcttatatctagcatgcctgttttgggtggtccctggggttgtgggatttcccaggggctacccttcctgctcttggctagatatctgccttctctaacaatgtcatcaaagattacactttgggaacaggcattttcaaggatacacagcttcaggactgctaatgttaacttttttctgcatattaattcatagtactctgttatgacaggtgctacagacccacagtccaaggagacattagggacagcccaagcagctgacagagcgatacactatcacaaaa

SEQ ID NO: 239294 - DNA, 511 bp, Homo Sapiens
tctgagatgtggttttctcatctttaaaatggaaatagtactccttacctcatgacgatgttgtgaggataaaatagttactcttcatttgtgagggcccactagcagccaagcagggtgagccatgagctgtaaagctggtatacactgggccttcgatcattggtgacttcatcaaggttagcatttgccttaggattctctgagtgtagcacatatgcaaataacgtgacagataatgtgacaaatccctatttcagatcccatgttagatctggatattcaagaattagccagtcttaccactggaggaggagatgtggagaattttgaaagactcttttcaaagttaaaggaaatgaaaggtaatcagatccattgtgtctaatatgttcccatgttgatgcttgtctgttttacgtagtagcattttattttgttaactgctggattggattccttgttctggtctcagctgtccccgagaaacttagctactcctgggacttga

SEQ ID NO: 239295 - DNA, 467 bp, Homo Sapiens
tatttcaatggagaatgtcattggtattttgatagagatttcattaaatctgtagatccctttggttgttatggacatttttaacaatattaacccctccaagctacaaacatgggatatctttcatttatttgtgtcttcttcaatttatttcatcaatgttttacagttttctgtgtaagaattgtttacctttttgattaaatttattcctaggtattttatcattttatagctattgtaaatacaattgtgttcttgatttatttttcagatactttgctatattgcattttcaaagctatctttgagaatgttatattaatatttatacatattcatgcattttgtttttaaaaatggaatcatactcttataagacatcatgcttttctcaccaggcaatatattatgaatcttttcataaatataaataagcatttaaaatatattaaaaaagaaaaact

SEQ ID NO: 239296 - DNA, 497 bp, Homo Sapiens
cctgtcacagtaatatgccaatttttggtgtcgctttagtaatttttttgggggggactgtcaaatttcagtaaactttataggctatagtttacaatttaaggtctttcctcagttgtctcctaaaaaattttgtggaaatcgaaatttcttttcaattgatcgtcttgtgcagccctttaaaaaatgcgttttgcattcatgtctttgcagtacaaatctgtatctttcattttggaagtgactgtcatagatgggtaatataaagtgacaacacacacaccagggccagattgcgtgggttctagctagggacctagagctggttacttgatttctctctgttccatttactatctgtaaatcatatataataatagtaattatttcatagagttgctgtgagcattaaatgaggtaaaacatgtaaggggcttaaaagtgcttggtacatagtaagtactaggtgtcagctattgtcagttaaacaaaaaaaa

SEQ ID NO: 239297 - DNA, 513 bp, Homo Sapiens
gctactgggggacctgtcctcaaccttctcctcttggtagtgatcccgacctatgtccgtctccacagagatcagcttcttcttgtcaaactcacgaaggtgcagcagggtgagctcatcaaactgctcaaagcagaagagaacctgcaggtggccaagagcagctccatcagaccccgggggcctccagccaccacagaagaaaggatgagggcggcaggagggctgggggagccaagcgggccacactggggaacaccggggcagttggggttcctaggcctgcatgacagttactacgacacctgggtctaaggaaggctctgactgccttcaaggcagaagcactccacgcataaagaaatccacatgtggctgagtgcagtggaggcagccacaccacactgtgaatgcactaaatgccactgaattttacgtgttaaaaggtgaattctgtgaatctgatgctatgtaagttgtatctcaataaaaaatggacaaaaaatgttaaaa

SEQ ID NO: 239298 - DNA, 470 bp, Homo Sapiens
tggggaaaagggggaacctgctaaaacccgagagataatgggcttgtaaaaaccagaggggtccgcttatgagtttagctccggttatagacaacagtgtcaggtaagctgatcagaaagacagacggcctctccctcaggtttgccgagggagggttcagaaaagaaacagggagcgccttcagcagtctatgcggttataggccattttcttgttttattagcgtttaaattaaactatgagaagaaagtctcatcttccctccctcgccactttgtctatttgttttggaaagagggtagaagaagcccctctgtcttcccgaaaagaagaaaggggaaaaaaattacctggtaggtccaggggcagagggctccctcccaaaacccaagcgcgatttgcatccaagctagtgggaaagcgcgcatctcatcatctgggactgttcctgattaaaactacagtaaaa

SEQ ID NO: 239299 - DNA, 623 bp, Homo Sapiens
aagttctaccaagctgtgcggcccaataaagccacgtaaaacaagggaaagaagagaatcatacaactacttgtcagcatcacagtaacttttgttttatgcttaactccctttcatgtgatgttgctgattcgctgcattttagagcatgctgtgaacttcgaagaccacagcaattctgggaagcgaacttacacaatgtatagaatcacggttgcattaacaagtttaaattgtgttgctgatccaattctgtactgttttgtaaccgaaacaggaagatatgatatgtggaatatattaaaattctgcactgggaggtgtaatacatcacaaagacaaagaaaacgcatactttctgtgtctacaaaagatactatggaattagaggtccttgagtagaaccaaggatgttttgaagggaagggaagtttaagttatgcattattatatcatcaagattacattttgaaaaggaaatctagcatgtgaggggactaagtgttctcagagtgatgttttaatccagtccaataaaaatattttaaaactgcattgtacagctccctccctgcgttttattaaatgatgcatattaaacaaagatcaatattttctaaatg

SEQ ID NO: 239300 - DNA, 537 bp, Homo Sapiens
atcctgctggaatataggctcagagttactacatcaactacattttcatcaagccagaaatttgtatgctatcaactaatttaaaaattacttagaaatattgtatgggcaaaataaaatacatctgcatatcagatctagcccatgggggatgaaaaacttacaacttctagtacaggatttcttatcctcagtgctattaatattttgggccacctaattctttgttgagggttggggaagggaactgtcctgtacattgtagaatgtttagtagcatccctggccactacctgctagatgccagtagtacccctctccccagctgtgacaaccaaaaatgtctccagatattgcatatccccagggggcaaaaatgtgcctggctgagaaccactgctctaatataaatggctgcatgaagcaaaaactggcattctaagaatacaagtaattgccatgaacacagtctatgtactatgtgattatgcatgtcattaacaaattaagaatttaaaacaattctctcccgttaaa

SEQ ID NO: 239301 - DNA, 516 bp, Homo Sapiens
ggttcccttgccagacatgatgtcggttatctggcaaaagccattttatgtcggccacgaggcaggtgttcactgtgcatcattcattcaccccatgatgttctggaagtaaaccttggttgtctttcgttggccagaggaattgggatctcaagggcatttccctttgcccacctcaccttttcatatttggtaaactgtatgcatttgcctccagcccaagattataaatatgaactgattatgatctgcatgttctctctttgggttcaagcatttccttacagaagagccaccgtggaagtcatgggtaaatatgtgttgaattggtaactccctcttggagaatttcttgtgaattacacagcaataggggaactcatttaactggagacataatctcaatttgtaaagtgtggcccattttctaacatttttattttgcataccctcccctctcttctcgattgatgaaactaacaaagaggttaataaaagcccatctcgtcaaataac

SEQ ID NO: 239302 - DNA, 546 bp, Homo Sapiens
ttctgtagaagctcaggaattatgattaatcaccatctgcctccaggcctttcatctcatgacaaacaaatataataatgatatcgtgtcactctgttaaatgttcatactgtttcaagcccatatgattagatttatgtttttaaaatctgttgtctccatatcttgatggcttttgggagcatttcacacaaggatataaaatgcggttttcttaaatgaaatgttttgtagctagaataaaatcatttttacaagtacagcattcttggaaagaatttaacacccaaaaaggggaaaatgtaatgaaaaatctcaaggttggaaatacagccttactctctctagagctggaggacaggtttgtggttgaggacttctctgtccgatgtctacattcaggttctgacttcatatcttgaaaaaggatttcctccctgtctttttcagtgtctcataaacgctactctggattgttgtaaatattagtgagatgggaggatttacagaagaaaagcaagtcaaaaatatttcctttttgatgta

SEQ ID NO: 239303 - DNA, 558 bp, Homo Sapiens
gacccagggttgtgaaaggaaccatctggttataaagtggtggcagatttcacgaaatctgcctgcattcatgtttttctggcccctctcaacccctagctgtcacttctctgttctttctcagttgccccttaacagtctattctaacccctgtaaaacagggactaaaagtactaacctcattgtaatgaggtttaagagaaggcccagcactaagccaggctctcaggaaaattcaaacaacagttcctctttgcccttcaatatagccccttctcatctgtcatgggctgaagaaccactggacctgtaaaccaagcacacaggtataagtccacagaccaggtgaaggcctagatggcaaaacacatgggctttgtgactccactactgacttccaggctaaggaaggactgacttagtgagctgttccaagaccactgagctcatggttccctgtggctgggacctccatcatgaccggggcttgaagagggtactctgttcccgctgccacatttggaacagtatgacggctgcagcagaggccaaaaact

SEQ ID NO: 239304 - DNA, 507 bp, Homo Sapiens
cacacttactttatatgcaggagtccccagcagatccgtctgtggtctgttaggaactgggccacgcagcaggaggtgagcagcaggtgagcgaacatcaccgcctgagctccacctcctgttaggtcagtggcagcgttggagtcttgtaggagagtgaacctacggtgaactgtgcacgtggtgatctcggttgcatgctgcgtatgagaatcgaatgcctgatgatctgaggtggaacagttttatcttgaaaccatacccccaactttatcagtggaaaaactgtcttccacaaaaccagtctggtccctggtgccaaaaaggttggggaccattgctttaaagcaacagcaaagtcttaccaaaccattttagatttttctagtccaaagactagatatgataggtgcacaccaccacgcccagttcatttttattttttgtagagacagggtctcgctcggtggccgaggctggtcccaaactcccggcctcaagctatct

SEQ ID NO: 239305 - DNA, 515 bp, Homo Sapiens
gaaaaattgaacagtgcctaaatctttattttcataacctacattttttttcaaattagacagttttacactgaatgacacaaaaggaaacttaaattaccaatagtttacatgtaagcttgattccagtcttaatgaagcagaacaaaaacgaaaccctcgaggagcgaccacatgacccccgcgctgtgagctgctggcggccagcgccctcgcctcgattgtctgcagccctgtagtgggccgcgaggcacgcaagccgcaactacagctcgccagcggggcacacagacaggcatgcaccaccactacccgtcgcccggatacactgaactggttttgaagcctgaactgcagagatcctaatatagcaacgcaggacgtttacggccacccgccagtgacagccggtgatgtgatgacaggagggcctgggtgaaaatgtcaagacactcactctcagagaacgacgactccacttgaaattcatgtctggtgaaacgggaccaggtttt

SEQ ID NO: 239306 - DNA, 505 bp, Homo Sapiens
agattttgcggacccacgaattgtcagctcccctaacccccatgttcaagggtcagctgtagatgtaatagatgggccaacaagttcatttcaaaatataatctaataattagttaatatttggagagagaattcatatatttttaaaaaatacttgagataatatatttttctgtcactggaaatcttttattttccttgcctgcattggatgttaggctggaatggaagacaacctgcaaaatcattctgaagtcttaaggtttcatgattccaaagatatagtatggtaagctaggtaactctagctcagataattcactacagtgccttaaatgaagattagattctgttgttagtatattagtgatatgactaatctcactgtcacatattaaccaccagttctcatctgttgatcatatgtcttagaacagatttatgatttacctacatgtactagaattctgtgattctttgaaaaaattacttaaaaggaatttta

SEQ ID NO: 239307 - DNA, 696 bp, Homo Sapiens
  misc_feature (659)..(659): n is a, c, g, or t
tgtaactcattcttatgctttggctagcctaacactttgaaatcaattcatagtgaaaatcctttcaaagtgaaggataagacagcaactataagcaaggtaaatccgctgggaaaatgactatacataggcaaaggaaagcttgaagtggtcagacttttattcccccaggggagagctgtattattcacacagagtaaactgtatcaaaacacaatacaactaatgatggaatagttacctctcattctcaagcaatcctagcacagaaaacccttcccccttgtatcctcattctctccctgaatgtaagaagtaaaccctgactttaagcctactctcaactcatacctttcctaagtcagttttcatttggacacttgtgctgtgacatcttttggaagctgggcatcatacagcccgcccaggtctctagcaggaagcatctccctgctccctatattattttgaattttctgggaaaaaggatttcacatgtgtacttggccatgtacccactatgtatccatttggtctgacaacttcttagaactagttctctgtgcacaacgccttgccatacattgctagtgaagagtttcagaaaggacagtaaattcagggcagggagaatgaagttttacttatagctaacacanctgcccttcagctgtatttttggggggggggggggat

SEQ ID NO: 239308 - DNA, 577 bp, Homo Sapiens
tcttttttttttttttttaattttttagtagagacaggggtctcactatgttgcctaggctgtggcttgctttataactattggtgtaccagaataggatcctctgcacggtgacctcctaaaagagcaggtaccagtcacctttgtgtcccccaaagcacagtactttatctgtaggtattaataaatacataggaaattgaattgaatttgtaactcaaagcagaggggtggagagaagtgcttcctagccaggaatacaggatttaggccatatctatttaaaagaagactaacaaacagactagaaacgataacactggtaaaaagatctctttacctgagctacaaaagtcatacattaggtagaggcttcaatagtgtagaaaatatactaatgtgttatctccttagagacagatttagaaccatgtcagttatgttgcagatgacagagaacagaaacctagtgaaatcaactcaagacaatgagggctaccataaggaggcccaaggagtagttggatggacctgaggaaggacaggagccagaggatcctattggggggggggggat

SEQ ID NO: 239309 - DNA, 644 bp, Homo Sapiens
aaagtacatgacgtggagggtggactgagaaatgcttgttgacccaaacagaacccttctccactgagaacagggggtcccttcaacaaggacagcaggagctcaccatgtccacgacatttgccatcaccaggatgaagatggcgagcatggcccagggttcctggcccagcgggtccggtcaatccaagttgagaaggccacaagcttcttaggaaaggcctagaaggaacagaatttcaagggccatgagcctttgccagtcctttctcctgcgacgtgactgacagcaactcaggctggtcccgtattccagtcccaggagcctcaaaacggactctgcctgggagtcacctgacagctgaccaaggggcagagctgagaagagggcgtgggagttctgacgctgtgttggacctcctcgatgtgcctgttcaacagcacagcctccaggtcgcagccctttccacagcagacgtggtgacgaggtgaggccagggcaggaacagttttcagggctgctcgtctctggccagctactcctgcctatcctggctccaagtgacctggcgagccacctgtcagatttatgttcctaaacactgctttacctttgtcattctggttaaaaaaaaaaaaaaaaa

SEQ ID NO: 239310 - DNA, 624 bp, Homo Sapiens
aatgacttgaaaacaaatgatccttatagatctctatctaattcaagcaccgctacgggtaccacagtcattgaatgcatcaaatctccagagagctctgaatcccaaacatcacaatcagaatcaagagccaccaccccatctcttccttctgttgacaatgagtttaaactggcttcaccagaaaagctggctggcttggcatctccatcaagtggctattcaagccagtctgaaacgccaacatcctctttccctacagctttcttttcaggtccattgtctcccggaggtagcaaaagaaaacctaaagtcccagaaagaaaatcctcactacagcaaccctctttaaaagatggaactatatcactgagtaaagaccttgaacttccaattatacctcctacccatcttgatctaagtgctcttcataatgtcttgaacaaaccattccaccaccgtcatccactgcatgtttttactcataataagcagaacacagtaggagaaacactgaggtcgaatcctccaccgtcccttgcaattacaccaacgatcctgaaatctgttaaccttaggtccatcaacaagtctgaagaagttaagcaaaaaaaaaaaaaaaaa

SEQ ID NO: 239311 - DNA, 459 bp, Homo Sapiens
gctctttaaaagcaagcacagcttcactttcccccaagcccggtgttgcaacacagatacatcacttcatccctttggtttgaggtagacttcttagggcaaaaggcgttttctccacatgcagaaagtcccttgctctgagcacatacgtacacacatgctctttctttgtatacatgctgactacacgggcaggatgcaaatcctggctgcagaaaggaggcaggtcaaatcagaaccccatccttaagccctccatgtgcccacaccatatctacagaagctcagggactggaaaagacagcaaaaggcataaaagtaagggcctgtcaattacattctgtgattagcatcgtggcaattggtcattcaggcctgaagcatgaagggggccaaagctggcatccctcacacagaagaatcacgtttcattggattttccaaaaaaaaaaaaaaaaa

SEQ ID NO: 239312 - DNA, 360 bp, Homo Sapiens
tgccaggtcaacactggtcctctacccctgctgggccagagtgagccagaaaagtggatgctgccccctcaaggtgctatctcagagaccagcctcagggaccttcacagtgcctggcacagaacctcactcatgactgttgctcaggaacgagctgccctccccactgttctgactccttcccctatcacctggcgcctgtcctggctgagatctttgagatcatggagaaagtccagccctggagaaatcccactggctctgccatctgtccactccatcgcccaagccagaaacccgcctgtacaggattaagaagaaaataaaaaacacttgcattaccaacaaaaaaaaaaaaaa

SEQ ID NO: 239313 - DNA, 646 bp, Homo Sapiens
  misc_feature (23)..(23): n is a, c, g, or t
taaacatttaggcatatcatctntgatgtgaagtacttagaagttaattagatgataaagatattttatccttttgaccttgatatgtttatagtaatttatttaacagtgtaagaaagagcttgaaatttgctttattagcatagttataatcttatttaatctgaaggatgtttcttaatttcatattcagaaacatatcctaatttatcatttaaacactgatataaaaatatgtctacttagtaacctattttttcttaaggtatttactatgcaggatctattacaactcattaaaatcaaccctacttccagtctctacaaatcactggtttcaggatctgataaagaaaatcaaaaaggtaggagccgtcatctttgtagagaacagcaacagttttctatgtactttttcctctaaaagaatgaagcaaatttttagggagaagagtaaaatttaatttgatttaaattatttgatttctgcaggtcatttcccctatatttccatttttgtaataacttttagatattcaattaaaaaaactgtagacagtatcaaaggccctacagacaggctgaaagatactgtttgtaaaaatacccactgttgggaatatttctgcaaaaaaaaaaaaaaaaa

SEQ ID NO: 239314 - DNA, 543 bp, Homo Sapiens
ttcggcacgagggctactgccgtcgctgctgctgctgctgcttctacctggccccgggtccggcgaggcctccaggatattacgtgtgcaccggcgtgggatcctggaactggcaggaactgtgggttgtgttggtccccgaacccccatcgcctatatgaaatatggttgcttttgtggcttgggaggccatggccagccccgcgatgccattgactggtgctgccatggccacgactgttgttacactcgagctgaggaggccggctgcagccccaagacagagcgctactcctggcagtgcgtcaatcagagcgtcctgtgcggaccggcagagaacaaatgccaagaactgttgtgcaagtgtgaccaggagattgctaactgcttagcccaaactgagtacaacttaaagtacctcttctacccccagttcctatgtgagccggactcgcccaagtgtgactgactaccttgacttgaaatgctcttttgcacaaggaaataaagcgtcctctcagtattgaaaaaaaaaaaaaaaaa

SEQ ID NO: 239315 - DNA, 478 bp, Homo Sapiens
  misc_feature (407)..(407): n is a, c, g, or t
cctgtccaattaatttggacctccagaataggctctgagaagaagccacaactatcttccaactagactgaatccctgaggtcttgtctcctcatgttatctgctcctgaaggggtttggaaatctccagggtttttcaggtttgtggagaaagactaggacaaccactgaccagcaactgccctggcacttggtagggctatgatggatttactgaacgttgaagcagaaagtgaaatgcaaaccaattttagtattgcatgccctatgttaatctctggtcagcactgagtgttcaaagacagtaggacgtcggttgctgacctgcctcttagaagctagtttaactcagcgggtaaggatctaggacttctacattagttaccactgtaatgataacaccaccnagaaaagtctgtagtttaatatttcccaccttatgcctgtttcttcattcacgcaaaaaaaaaaaaaaaaa

SEQ ID NO: 239316 - DNA, 526 bp, Homo Sapiens
agtggagcagggacacaagggggaatacaggtcaaatggtggtgtacttacataactggcaaaaattctgcattagcataaattaataaattaatcaaatgtctactacactgcctctacaataattatcacctaattatatgaaaagattaaatattttaaaatgataaattcttattttccatcagcatacatacaataatcattcatctaaaatgtaggcttgattttaacctatggctcatatgaagacaaactctgggtgtgctcatcacttttttccctgccttggttctacaattatacccctcttactccatgtcatcctgcataggttttcagacatcaaagtatgatgtcaaattattgctatatgctctgtgaataaagaaattactagacaggaagatatttgtatatgtaatatgcaagattcaattaacttgaatttccctttttttttaaaaaaagggtataaaatgagatagcatctttttaaggatttcagcaaaaaaaaaaaaaaaaa

SEQ ID NO: 239317 - DNA, 431 bp, Homo Sapiens
catgtctctgcttagctgtgctggcagctagcagctggctgtgtttgcagtgcaaatagctctgttcttggaaatcctgctcatggtatgtccccagtggtttcttcatccacatcatctaaagcctgaacccgttcttctctggttcaagtcagtggctgacacggacttgtatctccttcagagctcggctggcacccagcctcccttctccttccactcccttagtacactggagtgccgagccctgccttccacccagcgtccatccagcccctgtcctcacctctccggcacctcctcctccttctgcatttcctatcttcctgtgtcttgtgcatgggaagcagccttcagtgccttcatgaattcaccttccagcttcctcagaataaaatgctgcctgggtcacggaaaaaaaaaaaaaaaaa

SEQ ID NO: 239318 - DNA, 553 bp, Homo Sapiens
tagacagtcatgcttatttctaatcttttatttctaatttaatttgacttataactaaccccagtgtttttgttttatttcagcttcctttttcttcatccaagaaattctttaaaaatgtgaccattagttatcccgcccttttaggccaaattttttcagttcttcttgagagtggattataccatgctttctgtctggaaaatctcctgatagcaaaaacttactataatattcccccttgaaagtattcgggaaatccaggaaagctatgaaagacaagaaactagtcttaaaaaaatggttctgttttttacaaaattcaactgataaataagtatatgtgacctgtttttagataacgcactgtattataaaattgccatttttatgggtccaaatagaatggcagctactttaagtggctcaacctggtaacttatcagacattttggatttatatacactgttcaaataacaacatgtcaaatataactgtaaaataaatttacaatttttaatttcaaccgctgagcaaaaaaaaaaaaaaaaa

SEQ ID NO: 239319 - DNA, 552 bp, Homo Sapiens
aaggggaacgtgaagctgtccgcagtccttgcccttgccctttcttttggagactgtgtgaatgagcagcagccactttaatgtgaggcagccatataaacaatgaactttcacttgctgccaggaggtcataaactcaaggtcaccaaatgaattctagcttcagctcttggtttagtaatgtaccaagtttggtattactttttgtttgttttaatcaggtttctgccctcatcttctatttgggaaattaaaactggtctgttggcatggctggtgacagagcggcaggcacattcttagtctctgactttctgcagccatctttgagtgcatataagtgttgggtaacagtctactgaatgtgctacaagtgtgcggagttgtgttcatctttaacttgttttttttaaaaaaacactctcttggtaaattgggatctcctgttgaaaactgtatttgtttggcagttgagtttatgcctggagcccctagagcacatttaactggttggtggtcagttgtaccatactggaaaaaaaaaaaaaaaaa

SEQ ID NO: 239320 - DNA, 587 bp, Homo Sapiens
ccgctcccgtgaagaaagcagggcaagtgctgtgctgcccatttgggcctgcatagtgccatgattggaacccaggaactctggtctccttgcctagtgcttttcaaaactctgtgctacacaggagtggatccaggcctgaaggtcatacaattctggggactctctttaagaaaaagaattctaaaatatcttacttttgcaaacattatgaaaatatactgccacattaatatgttgctagggcccctgctaggaccttaagaaggagctcatgtgagtcaggaccctgaatgttaggcctcgttagctctatggttcatatgcttcttgaaccaagtcacagggcacttcccagccacattgccaggcaacaggactaaactacctccaaagcaagcagtcttttcagttttgactgagtgatgtgagaaacttcttttcttttcttttcttttttttttttgaggcagtctccctatgtcacccaggctgtgttgcagtgagccaagatcacaccactgcactccagcctgggtgacagagcaaggctctgtctcaaaagaaaacaaaaaaaaaaaaaaaaa

SEQ ID NO: 239321 - DNA, 499 bp, Homo Sapiens
cagcgtgaaagagcaagtagagaagattatctgtaacttaaaactagctttaaaacttcgtcttcgattcatcacacacattagcaagatggacccagctgcagtgcctccacaagccatgaacagtgggtctccagcacctcagtctaatcagtaaaaagtcagagtacacagcaagggttccaaattaagaggaagcaaaacgctgcccagatcctgagaaacctggagaaaatcaaccttagtagtttcaactcatacattgtcttgtttgattttgttctttgttttttatcctctttaagcacagatgcgtgttgaagtctaaggtgttctgtcatcacactctctttactagaataagtgtgcccaggcagaaaaaaaagtgtattcaatgttgctggcatgtgtggattcacagctcgtggctgtaaggaaatctgggggtttcataaatccattaaaatccttttagagttgccaaaaaaaaaaaaaaaaa

SEQ ID NO: 239322 - DNA, 556 bp, Homo Sapiens
gaaattgggagacaaaccctttcaaaccacagttccagataaaggctcagatttccaattccatcaacatggaggactgagcacgtgcagaatcttctcccattacacatacataaatatggtgaattaaagatttgtaggtacctgaaacataaaaggtatttaaaatcacagcaatagactactgcttacgacacatagccaaaggaacttacacttgagcaaagtcctcaagggaaggggctgtcattttaatccctgggcagagatgagagacaattgccttgtgcccatgtgagaagtaaaatatttgcatcaagctggaattcttaaaggtttgcacaggctacaaaaggagactgaacaatcccaccagcctgcccagagaagttacaaggacgcttgctctccgcccaagctctgggatggaggggaaaaaaactctcatctaaaataaaggtctcaactctgtgccgaatttgagtgtggagtctgaatttactctgcccacaaagcaggaaacctgccatcaaataattaagaaaaaaaaaaaaaa

SEQ ID NO: 239323 - DNA, 510 bp, Homo Sapiens
tacgagttcattggcagcatgcccgagctgaaggacaaccccttccgccagaggattgcccaggtattctctgaggatggggatggccacatgaccctggacaactttttggacatgttttccgtgatgagtgaaatggctccccgcgacctcaaggcttactatgcttttaaaatttatgattttaacaacgacgactacatttgtgcgtgggacctggagcagacggtgaccaaactgacgcggggggagctgagtgccgaggaggtgagcctggtatgtgagaaggtgctggatgaggctgatggagaccatgatgggcggctgtccctggaagatttccagaacatgatcctccgggcaccagacttcctcagcaccttccacatccgaatctgatggcaccacagaggagccgagctataggagggcggggtgacccctcacccgctgtggactctggtttctgagaataaacacaagtcactgagtcacaaaaaaaaaaaaaaa

SEQ ID NO: 239324 - DNA, 607 bp, Homo Sapiens
aagaattcggcacgaggaggggggctcacccctgacaaaggagcatgatgctggcaattgggtattgatggcagagagctggcactcagccagatgggcttcacttgggcaggaaagacacccacagctgggcctgcgttactgcggccgagtttcagcagctgtgatgtgggtgctaattataggggcctgccttcatagaaaagtagcaaacattgcagtttagtaactaggaaactaatagttttctcagtgctgcttgcgcaaagctggtaattatctcaaaagaagcaaagtcatgaagtgggaagtcatgaattgggaatgggtgtccttgttaaacgcacatctgcacactcagggctggggccctgtgcccccttgtggagggttaggggacaacctggctcttgtgagggtctagccatcccctcagtgggttctgtgagcatcggaggcacggggggtgaggggctcaggagcaggttgcaattcaaaatcaagggctgctttgaggaggcctctccaccgggctgctgtagtcaccaagtccagcccatgcccaaaggaagaggaatgagttcccccttaaaaaaaaaaaaaaaaa

SEQ ID NO: 239325 - DNA, 528 bp, Homo Sapiens
taaacatgaccccgaaatggaagattgtgacaccgaaatgggtctgcagtgatatttcttacatttttaataaaaaatgatggctacaaggttatgtttttacttgtactgattcacagctgatgagcataaaccagatttaaagatgtatgtgctgtaggacttgacagtaatgcatagcacttaaactcttgtttgagtgggctgctagagaaagtagagttacctttcagctacaggcagtgtttcttgctgaactgcttaggctcaggtttagcgctgtcactaatgcagcagtactgacttactggtgttgagcctctaggctattttaggttggagatgatagaacttcttatatttatgtcagtatagtcagtaaggccaaatggttagatgattttacaaattctaatcagtatttcttaaatgagtttaacgtaaacgtgtgtgactttgcatagtactatccctggtatatagtaggtgcttaagtatgacctccctcaccaaaaaaaaaaaaaaaaa

SEQ ID NO: 239326 - DNA, 430 bp, Homo Sapiens
atacacagtaaacattctctcttctcagtggttgaagttgttcctgattacagctctcttatctgttctccctttgatttgctgactgatggatgcagtccatttaagaaatgagcatagcatattggaaagagcactagacttagattctagtcccagttctgtcacttaacagctatgtgttgaggtgaggtgagggaagagtacttggatctctggatctcttttaactttaatattctcctctataagggtagaagatgaactagaggatcacaacagtaccatttagttttccgttcagtggcaattttgacatacttttttgagcatacataatctcagaatcctatgcctcaaaactttgattcattggacagatttcaagaaaaatataatttaacaaatgtaataaagaaaaaaaaaaaaa

SEQ ID NO: 239327 - DNA, 566 bp, Homo Sapiens
tagaatatgactttggggtcattatgttcgtgctgcaagtgatctgtaatccctatgagtatatatatatatatatatatatatatatatatataaaaacttagcacgtgtaatttattattttttcatcgtaatgcagggtaactattattgcgcattttcatttgggtcttaacttattggaactgtagagcatccatccatccatccatccagcaatgtgactctttcatgtctttcctaacacaaaaggtctatgtgtgtggttagtccatgaactcatggcattttgaatacatccagtactttaaaaatgacatatatatttaaaaaaaaaagattaagaaaacccacaagttggagggagggggacttaaaaagcacattacaatgtatcttttcacaaatgaatttagcagttgtccttggtgagatgggatattggcgatttatgccttgtagcctttcccttgtggtgcatctgtggtttggtagaagtacaacagcaacctgtcctttctgtgcatgttctggccgcatgtataatgcaataaactctggaaatg

SEQ ID NO: 239328 - DNA, 542 bp, Homo Sapiens
gaggcagcaagacctatgagcaagaactatttacttgaccctcgtttttttctcttgttcttgtgtggtctgaaatctaaaactagactttattatgatagatttcctataagccaatttctaataacaaatagatttattatttaatctgtaccttctatcttctcataattcgtggtcttacagccttccaaaataactccagttgggcacccatgagctaggatcaaactttctttatatactttatatattttacattatttctgatttttaaagcaaatgattgccattatgattacactcaacctaaatagttatgaacagtttcagaacaatgaaaaattacaatactatgtgatagtattgtaactatttttctattttagtcatatgtcgcttatatcctaccagaactcttaaatctataatattcgatatattctacaaactgctttattgtagaagccatatttatgtttattttataatgttttctagtgtcaaactgtcctgtggagaaaagaaatgttagatctgtg

SEQ ID NO: 239329 - DNA, 577 bp, Homo Sapiens
cagccatgtttgtagtgtggccctggccccccttggtcatatctgattggaccgtggatggacacctgactcgagctggccaatcagaacccgcaggaattgggcctcggcacgtggccgaagtgaggacatgtaacacaggcactcaccgctgggatgctgtggacctggggcacagagcaggtgtagaaggaaaggagagggaagagatgggaagagagggtcatggtattggcgtccatatttctgtactggtgcttcatgaaagctggtggcatctcttggcctggtttccctgacacctgatatcataacgaattcaggactccagctcagtgagagagtttctgctccttgcaaccaaaagcatcttcactgggaagacttgagtgccgcttgctctgtgctttgccctggttctgaactcagaacctgacctcagggatcgcttcgccactccgctgcctgtgtccatgagggtttctcgcaaaagaagttttacctttaaaacttattttcctctgattattaatgtccgtggtaataataaatgccccaatattaaaaaaaaaaaaaa

SEQ ID NO: 239330 - DNA, 534 bp, Homo Sapiens
cggagacccagccgcctgacagtgaagtatgaccggggccagctccagcgctggctggagatggagcaatgggtggatgctcaagttcaggagctcttccaggatcaagcaaccccttctgagcctgagattgacctggaagctctcatggatctatccacagaggagcagaagactcagctggaggccattcttgggaactgcccccgccccacagaggcttttatctctgagctgctcagtcaactcaagaaactccggagactcagccggcctcagaaataagcctgagagaccatctttagcagcctcagcactgccaggcctgccctgaaactccagatcctggctaagagggaaatagctccttgggacacaaacaagaaatgtggacaaggagggacatttgcatactcctactgtctgtgtggtcacagctagtttctgtcagctgggctctctgggagaaagctggctgttgtccaatgccttccttggcagccaagtggataaaacctttaggagccccagctc

SEQ ID NO: 239331 - DNA, 426 bp, Homo Sapiens
aactttacttgagaagttcttaggcatttgattaataataacagacttacaaagcctttgtctgctgatttattttattattccatgataccttagcagttgctgtttccgatggtagaatgctaaatatatttgtacgtttgggatatgagccaacactggtgcatgactactactttaataattattttgcaaaaggaataacgaggactccaagtcttcgtgggcaggcaggtgctcagatttctgctatagcatggtggatagtgcatgtgaatagttacatccctgggttcaaaacttagctccaggctgggtgtggtggctcacccctataatcccagcactgtaggaagcctaggtgggaatatcacctgagcccatgagtttgaaaaaagccccccaaacattgtgagaacctatttc

SEQ ID NO: 239332 - DNA, 531 bp, Homo Sapiens
  misc_feature (17)..(17): n is a, c, g, or t
ataaatacagatgcaanattcagtaataggagatccataacccaacatgggtcactactcgtgaaatgtgactttctcccaccagtaattgaaatgaggtgatgatacctaattatgttttcctaattaaagataaattgctacttgattaaaaatcctgcccttcacctttgggaacaaaggttaagagacacagttgggcgaactctcaaatttattggcatttacacaaagtcccagacaaccaaggaactgaagttttcatcatatgagagcagcacatcccaccatttacaatattcgtatatctttctgcaaatatggctttggatagtgaaaattgaaaaacatatgccaaccctgagcaagggaactcctcaaaaaatcatgcagcggaaccttgtcaggtagagaagccgtgcatgaaagaatttgtttaatgtcttgttttgcgtatgtgttttttgtttttgttttttaagaactaaatattgcacattaataaataagaattatacagcaaaaaaaaaa

SEQ ID NO: 239333 - DNA, 463 bp, Homo Sapiens
cagccatgaagcccactcatgcaaccgtcctcacttttccttcctctcacggttttttgcagaagcaagtgctcagggaaatgaagacaggagaactgctgccgtcatgagctatgccgacagtcagcagctgatccccgacagaaacgcagcagatgcagacgctcctgatgaaatcatccctgtggggagtgcagggccagatggggactccatggagacagccgaccggcgacagccttcagctccgacaaagacacatcaccttgcaaatgacactttgccgtctggtttctgtgttttgttgtaacaggttaaatgaacccctgggcttaattttccccctacttagttctgtggcagcaaagaaaagtgacttcttttcatttctcagctcaaaacttcttaagccgtgtctcttcctcatcatccctttgagaataaaagtctagaaatgaaacac

SEQ ID NO: 239334 - DNA, 486 bp, Homo Sapiens
aagcaggtggggctgtgcgtggcctcagtgcactcggtgtcatgtctgagcctggtgtttatgccccactgctgtcctaagtccctggcgaggggaggtggaggagctgccccgtgggtgtttggagattctgttttactctgcctagagaggaaacggctttggggagggagggggaagcctttattctttactgttgtccctgttttcctttgggggaatttactcagttagcagcccctcctcaccattccccccaggaaggccatgtcccagttttctgtccacccctcctgttcctctgcactatgtctctgattttccctgccagggaagctaacccagagcacgcacctgtgctcatgagtgtttccgcaggataattcgttctgagcatgataccacagtgtggattgtctgtctgtaaggagatgccatctactaaccaatttgtattgtgtttccaataaattcctggaaattttg

SEQ ID NO: 239335 - DNA, 573 bp, Homo Sapiens
  misc_feature (102)..(102): n is a, c, g, or t
cactgctgcatcaaccctctccctgtatgcgtttcttgatgggacatttagcaaatacctctgccgctgtttccatctgcgtagtaacaccccacttcaacncagggggcagtctgcacaaggcacatcgagggaagaacctgaccattccaccgaagtgtaaactagcatccaccaaatgcaagaagaataaacatggattttcatctttctgcattatttcatgtaaattttctacacatttgtatacaaaatcggatacaggaagaaaagggagaggtgagctaacatttgctaagcactgaatttgtctcaggcaccgtgcaaggctctttacaaacgtgagctccttcgcctcctaccacttgtccatagtgtggatagactagttctcatttctctgagaagaaaactaaggcgcggaaatttgtctaagatcacataactaggaagtggcagaactgattctccagccctggtagcatttgctcagagcctacgcttggtccagaacatcaaactccaaaccctggggacaaacgacatgaaataaatgtattttaaaacatctaa

SEQ ID NO: 239336 - DNA, 451 bp, Homo Sapiens
agttcattttccctgttagtaatgctgtggttcatgatcggttttaaatttagctgtgtgtgtgtttttttaaacagcatctctttgtgagtagaggtaaaaatgaaacatttttgatatgaaaagttgcatatgaaaattatagactggttcaaccagacagtgaagacttctgatccacatcaaacttaaaatgccacaaaacaatcttccacctctggctaaaacatgctacttccttttcaaacaccacaaaatacaagctgagtcttaaacacttggaatttaaaatgtttttctttggaaatgatttgctttcttcaaagtggtaacagaaacaaaaatgaaggtgctccccaaaaagaaatgtaaccttcccctttcacagatgtgtgagaggttctgtactgtgggtgcatcataataaagaagcagtgaagagttaaaaaaa

SEQ ID NO: 239337 - DNA, 426 bp, Homo Sapiens
gtcaggatccttagtgtttgacactcctcgtgcggggctggcctcctgcggactctagtttcgcctccttgatgtggcgcctgggatttcttcacttcagagctgtatttttacaggcaagagtaagttcctgggcacagtggctcatgcctgtaatctcagctactcaggaggctaaggtgggaggattcttagagcctgggaggtcgaggctgcagtgagctgtgattgtggccactgcactccagcctgggtgacagagcgagactctgtctcaaaaaagaagaaagagtaagagctgaggcatataatagaattctgctaaagcacttaaggtgaaatcacattttcttttcccaggatgttgctcacatctttcgtttttattgaggtgtcatttatatacaataaaatgtactcattttc

SEQ ID NO: 239338 - DNA, 528 bp, Homo Sapiens
  misc_feature (28)..(28): n is a, c, g, or t
gagatggcaggtgtgtgggacagactgnaggatgaggacaaaccaaagcctttgttctttcttattgtggagcgtccccttccatcaagcagcctgccctcaagccaaggatcatcccctggaacccagtatgcacccagaggggactcaacttcaaagctgctccaccatgctgggtcccaggcagctttcctctgaaaagcaacctctcctgccacccagatcccatctcaagagctcgcccatgttacgagcatgtaaaggactgacttcctagtaactgttgcagtttacaacctgccctccagggacacgtctccatggttttttctacacatgaatgcgagaaatggctgataagcacagtaatttaagattgcgtattcatgtagtgagatttagtcattaaccaacccggtctttgtgatgtgtgaagccttcccttcagttatgtcccatttttatgatgccaaaagctgccactgtgtggtattcgaggattattgcaacaaagccagtagttaaacc

SEQ ID NO: 239339 - DNA, 473 bp, Homo Sapiens
tgccctgagctgtgtctctgtctaggtacacagttcatgagtgaaggagctcctggagtcatgaataatggaagtccagattggtcaagtaacttgtcccagccccagcccatgcatctggtatgtggttggacaggtttctaactcattacgtaacatcaagaacattttaaactgctttgagacatttgtgaattaagatctcaataaatagtcctccctggcaccagctccatccacattaaatgagacttgaaaatttctttgaatggatattagtttagaaggagctaagttattagttggcctcacattcctcagttgggccctgggcccagcatgccacttctcctggttattatggttcacatctgaggtaacccatcgggaaactggatgggacaacaaactaaaaatgttttagtttggacctgtcccacaccaagagaataaaaacaaaatggatagtcaaa

SEQ ID NO: 239340 - DNA, 562 bp, Homo Sapiens
  misc_feature (42)..(42): n is a, c, g, or t
  misc_feature (59)..(59): n is a, c, g, or t
  misc_feature (64)..(64): n is a, c, g, or t
  misc_feature (493)..(493): n is a, c, g, or t
  misc_feature (495)..(495): n is a, c, g, or t
  misc_feature (557)..(558): n is a, c, g, or t
aaatatcagggatccaaagtccctctcttcatgggtagtganaaagcagtcccctattncctcnccctaggctgctgggcaaaggggagaatttggtggtggtgaagggaatcaaggagggtttctgtcataagaaaccagtgtggtttacctttgcccaggcgtctgagttcctgatgatgttcctgcagttatccttttccttatgatttaaaagtctttagcagctgagcacggtggctcacccctgtaatcccaacactttggaaggctgagggaggaagatagcttgagctcaggagttcaggaccagcctagacaacatagcgagactgcatctctactaaacatttaaaaaacaaaataaaaagaccgggcgcggtggctctcccttgtaatcccaccactttaggaggccgaggcgggtggatcacaaagtcaggagttcaccgtcaggagatcacaggaggtggaggttacagtgagccgaagnancgctactgcgctctggcctgggcaacagagcaagactccatctcaaataaataaataaatcnntaac

SEQ ID NO: 239341 - DNA, 727 bp, Homo Sapiens
ttacagagagggctccatctcatttgcctgcaaatacaacttaggtataataccgctcctttcccccatctccttccaaatacgagttcttgccctgcgttccatttttttttttttttttttttttgagacagagtctcactctgttgcccaggctggagtgcagtggcgcgatctcagctcactgcaagctccgcctcctgggttcacgccattctcctgcctcagtcttcagagtagctgggactacaggcgcccgccaccacgcccggctaattttttgtatttttagtggagacagggtttcactgttagccaggatggtcgcgatctcctgacctcatgatccgcccgcctcagtctcccaaagtgctgggattgcaggcgtgagccacagcacccagcctccaaattttaaatgagccccttgtgagaaggaaaagaatctgctgtccacagaagcccagcgtggagctacttcaaccagaaactgtcacccatgacactctgtgtgggttcagtcacacagaccacgatccattatggaagggagggagaaaaggatcacatcaaatctactgtatgcctcatagaccatcccttatttcaaaaatagaaattcctatttaaatgccgcccgtgtgcgacaggcctgatatttgcttctgcatgtggcagatctgttattgcttacactgggcctcctcccggaattccggaccgaaac

SEQ ID NO: 239342 - DNA, 571 bp, Homo Sapiens
tttttttttttttttttttttttttttttagtagtcaattatcatgtttataaggttgggtgggctaggtaagatgatgtagagggtgacattaaagtgtagaacagagaccacttaggtggaagcaggcagccttggactttgctaaagaccagtccatgtgactgacatggggtcacttcaaatggtagtgcctccctcactgaagagcatcagaagggcttctgagcaaggccagaatgagcctcgatgaacatccaagttgaccaaccagtgtggtgcctaacagaggacagagccaccagcaggggtgctcaggggctgctccccttttattaatgacagcggtttctctcaaggaagtgtagtgccctcccctttgggatagttgcctgacccctgtccatcagcccttcaagtaccctcatcagaaaaagagcccgcgcattctcctgccgatgccttgtcggtcgtagaggacattgaacttgttcacaaactggttcatggtgttgcacgttttggtgatggtgccgaggtaggccatgagccgctcgcgatctagaactag

SEQ ID NO: 239343 - DNA, 729 bp, Homo Sapiens
caagatatattaaatagctgtattgtttagaatcttaatatggtataaattagcatatgtattcacaatattcattcagacatcattcccagacagcagggatttatttaaatgttagctgtctgagtttttaaatagctaatacgaccgggtacagtggttcatgcctgtaatcccagaacttcgggaggccgagacaggcagatcacgaggtcaacagattgagaccatcctggcaaacatggtgaaaccccatctctagtaaaaatacaaaaattagctgggcgtggcggtgcgcaactgtagtcccagctactcgggaggctgaggcaggagaatctcttgaacctggcaagtgtaggttgcagtgagctgagattgagcaactgtactccagcttggcgacagagcaagaccccctctcaaaaataaataaaataaagtaaaataaatataaataattgtggccgggtgcaatggctcatgcctgtaatcccagcactttgggaggctgagatgggaggatcacttgaagccaggagtttaaaaccagaatgatcaacagagtgagacccctgtctatatatttttttaatttaaaaaataaaagaataaaattgtgtagctcagtatagtatcaagattaatctgcctactcacatttctacactttataaaaatgtaataaaagaaaattatctttctaaaaaaaaaaaaaaaaaaaaaaaa

SEQ ID NO: 239344 - DNA, 726 bp, Homo Sapiens
ccatgaggatgttaccaagtattatatttacctgtatagtgtacttcatgttaggattgaagccaaaggcagatgccttcttcgttatgatgtttacccttatgatggtggcttattcagccagttccatggcactggccatagcagcaggtcagagtgtggtttctgtagcaacacttctcatgaccatctgttttgtgtttatgatgattttttcaggtctgttggtcaatctcacaaccattgcatcttggctgtcatggcttcagtacttcagcattccacgatatggatttacggctttgcagcataatgaatttttgggacaaaacttctgctcaggactcaatgcaacaggaaacaatccttgtaactatgcaacatgtactggcgaagaatatttggtaaagcagggcatcgatctctcaccctggggcttgtggaagaatcacgtggccttggcttgtatgattgttattttcctcacaattgcctacatgaaattgttatttcttaaaaaatattcttaaatttccccttaattcagtatgatttatcctcacataataaagaagcactttgattgaagtattcaatcaagtttttttgttgttttgtgttcccttgccatcacactgttgcacagcgagcaattgttttaaagagtatacatttttcgaaatcacaacaaacgtgaattaaacatgaaagaacccaaaaaaaaaa

SEQ ID NO: 239345 - DNA, 693 bp, Homo Sapiens
acgaagaaagactcctttcctgcatctttcatagttctgttaaatatttttgtacatcgcttctttttcaaaactagttcttaggaacagactcgatgcaagtgtttctgttctgggaggtattggagggaaaaaacaagcaggatggctggaacactgtactgaggaatgaatagaaaggcttccagatgtctaaaagattctttaaactactgaactgttacctaggttaacaaccctgttgagtatttgctgtttgtccagttcaggaatttttgttttgttttgtctatatgtgcggcttttcagaagaaatttaatcagtgtgacagaaaaaaaaatgttttatggtagcttttactttttatgaaaaaaaaattatttgccttttaaattcttttcccccatccccctccaaagtcttgatagcaagcgttattttgggggtagaaacggtgaaatctctagcctctttgtgtttttgttgttgttgttgttgttgttttatataatgcatgtattcactaaaataaaatttaaaaaactcctgtcttgctagacaaggttgctgttgtgcagtgtgcctgtcactactggtctgtactccttggatttgcatttttgtattttgtacaaagtaaaaataaactgttatgggtggtaaaaataaaaaaaaaaaaaaaaaaaaaaaag

SEQ ID NO: 239346 - DNA, 617 bp, Homo Sapiens
ggaagaagatgaagaggaactttttaaaatgcgggcaaaactgttccgatttgcctctgagaacgatctcccagaatggaaggagcgaggcactggtgacgtcaagctcctgaagcacaaggagaaaggggccatccgcctcctcatgcggagggacaagaccctgaagatctgtgccaaccactacatcacgccgatgatggagctgaagcccaacgcaggtagcgaccgtgcctgggtctggaacacccacgctgacttcgccgacgagtgccccaagccagagctgctggccatccgcttcctgaatgctgagaatgcacagaaattcaaaacaaagtttgaagaatgcaggaaagagatcgaagagagagaaaagaaagcaggatcaggcaaaaatgatcatgccgaaaaagtggcggaaaagctagaagctctctcggtgaaggaggagaccaaggaggatgctgaggagaagcaataaatcgtcttattttattttcttttcctctctttcctttcctttttttaaaaaattttaccctgcccctctttttcggtttgtttttattctttcatttttacaagggacgttatataaagaactgaactcaaaa

SEQ ID NO: 239347 - DNA, 778 bp, Homo Sapiens
ttccacatccagatttcatgtgcgttcatggagaagatcacttgaggccatttggtacacatctctggaggctgagtcggttcatgaggtctcttatcaaaaatattactcagtttgcaagactgcattgtaactttaacatacactgtgactgacgtttctcaaagttcatattgtgtggctgatctgaagtcagtcggaatttgtaaacagggtagcaaacaagatatttttcttccatgtatacaataatttttttaaaaagtgcaatttgcgttgcagcaatcagtgttaaatcatttgcataagatttaacagcattttttataatgaatgtaaacattttaacttaatggtacttaaaataatttaaaagaaaaatgttaacttagacattcttatgcttcttttacaactacatcccattttatatttccaattgttaaagaaaaatatttcaagaacaaatcttctctcaggaaaattgcctttctctatttgttaagaatttttatacaagaacaccaatataccccctttattttactgtggaatatgtgctggaaaaattgcaacaacactttactacctaacggatagcatttgtaaatactctaggtatctgtaaacactctgatgaagtctgtatagtgtgactaacccacaggcaggttggtttacattaatttttttttttgaatgggatgtcctatggaaacctatttcaccagagttttaaaaataaaaagggtattgttttgtcttctgtaaaaatccc

SEQ ID NO: 239348 - DNA, 793 bp, Homo Sapiens
actgacactggtttggcagttggtactgctgaacatttttatacatgctaccatgaagctatatatgttagtattgaagaagctaacgggtatactatcatttttgatgtgtgggctgattataatttcctgtatttcctgtacattgggatgaaactactttagcaaagtccacagatcagaaaccagacggtagtttttgaagttgaaaccagcaaaataagaaaaaataaaaaatcgattttaatattttctgcctctttcccaaattacccttcccacttgctcgacaaatctatgtaaagcagtttgttttttcatgttttaactttaccttgccctgtgttatggtactggctgacatgtctaagactggatgtgtatatttattatggtgtctaaaaatcatgaagttcatcacttttcaggagtatagataaaatcaaattggtagtacatcagagttacttttcagtgcaccatgacatcactaaaatgagtgctgtaatgttacagggctttcaggtttgtaaaaacataaccataaattatattgacgtcagatatgagttgagtatctataaaatatcacgtgtatctcaaaatattggactgctgtttgactggatattgctgcataattttcttctattgtcccatatccttttggagagagatttaatgggatttgaaatgtgcaagctgtctaaataagatgcagtcaaataaagtatggttaagttgtgtttgcatttttcttttaaaaaaaaaaaaaaaaaaaaaaaaagggcgg

SEQ ID NO: 239349 - DNA, 798 bp, Homo Sapiens
tttagtagagatggggtttcaccatgttagccaggatggtctcgatcttctgaccttgggatctggccacttcagcctcccaaaatgctgggattacaggtgtgagccaccacacccatcctcgcccagttattaaataccttccctcttcaagtcctaaccttgcaggctaattcctccctggaagaagaggattccaatgctcctgagcataaaaaattcaggtccttgaatgacgtggacccattctccagctctctggtggtagaggcctgaggcctaatttattcagcacctccatccttcagtcagaacagatgaggacaatacaggcagctgtgcctcaggctgccaggagcaaaagggccatcaccagctgggccacagcctggcggagcctccatgtgggcttcctgctaaagtcctagtggctgctcctcccgcagtcagggagaacagatccagggcctcccacccagtctcgctggctgtcagtttgagaacctcaacaaattacagagttgtttttgcaactacaacagatcggtgctttctggagcatggatggcttacagactttctaaatcctgagactgtagaaatcccctcctcagtcatgggtcgtcgggctggtggagtaaagggagggtaagagagctgggactcaaagaccagcaactcatcaactgtgagtatgtgtgtgcttgcttaggggggtggagtccccctgggtccccggtggcattcaggggaagactgtactgcaggacctaaggaaggatgacaggagctgggcgt

SEQ ID NO: 239350 - DNA, 1000 bp, Homo Sapiens
ttttttttttttttttttttgagacagagtcttactcttgttgcccaggctggagtgcagtggtgcgatctcagctcactgcaacctctgcctcccagattcaagcaattctcctgcctcagcctcccaagtagctgggattacaggcctctgccaccaggcctagctaatttttgtatttttagtagaaatggggtttcaccatgttggccaggctggtttcaaactcctgacctcaggtgatccacctgcctcggcctcccaaagtgctaggattataggagtgtgtcaccatgcctggctaattttatatttttagtagagatggggtttcaccatgttggccaggctggtctggaactcctaacctcaggtgatccacccacatcggcctcccaaagtgctgggattacaggtgtgagctaccgtgctcagctcacaagtgttcttaatggcatctagaatgatgaatgctttccaaaagattttcaatgtattttgcccagatatgtcagaaaaatcactatccattgcagctataaccttacaaaatttattcttaaataataagacttgaaagttgaaatcactccttgatccataggctgcagaatggacactgtgttaccaagcatgaaaacaacatttatctccttgtatctctgcatcagagctcttgggtggccaactacattgtcaatgagcagtaatattttgaaagaaatcttttttttcctgagcagtaggtctctcaacagtgggcttaaaatattcaacaaaccatgctgtaaacagatatgctgtcatccaagctttgttgttccatttataaaacacaggcagagtagatttagcataattcttaagagccagagggttttcagagtggtaaatgaggattagcttcaacttaaagccatcagctatattagcctctaacaagagagtcagactgtcctttgaagctttgaagccaggcaggcattgacttttcctctgt

SEQ ID NO: 239351 - DNA, 463 bp, Homo Sapiens
ccatttaaaaaaccaaaacctcaagcacagcttgtagcacattgagttattggtagggtcaaatactgaaaatagaacctggcagcactttttatccctaagatggtattccatccttgtgttaggttatttattacccattatgtcaacaaatatttctaagcattaaaagttcattgtatataaacaaaatacaaacatatgggccaggctcagtggctcacctgtgtaatcccagcactttgggaggctgaggtgggaggatagcttgagctcaggagttcgagatcaaccctgggtgacattgcgagaccctgtttttgttaaaaagaaagataggaagattgtgtatgtataacatgatcacaatcaatcatatggtcattttcagataatatagaccttcacatatacatgactgattacctgtaatgctgtatttctcacctaaaaagagacaaga

SEQ ID NO: 239352 - DNA, 636 bp, Homo Sapiens
  misc_feature (5)..(5): n is a, c, g, or t
tctcntacatgctttattggacttcaaagaattttatgaaataacacagaaaaccccatttgagggtgtccagggagtacaaggcagtctgcagcctagcaccctcctaagaccagccccaggtatacccaccccaggcccaaaataggatcccaggataaaggtatggcagggagtggggcagaggaaaaatacctttacagccatagcaaaaacaggtaagggagagagttgtctagagggtgggaagggtgggggaaagtggtcacacagccgccttcacctataccatcttccttagccaccccttccccaaactggttgtgtcctttttgagcctctggccaaggctacaaagtaacatgaaaatgggatctaacaaggggaatatgcagcgtaggcacttgggaaattcagattactttttttccttttaacctgtttgtcttttggttcaaaaaatgacagcatccttgcccaacaactccagggctccataagagccctgtatcatggctgtggctctcctggccaggggagccacttgtcctgagccctaggagtattgatgcttggggagctttggggcagcacctcttagagacaaatcctcctgcagtgtgggggagcagcgga

SEQ ID NO: 239353 - DNA, 771 bp, Homo Sapiens
  misc_feature (8)..(8): n is a, c, g, or t
  misc_feature (10)..(11): n is a, c, g, or t
  misc_feature (28)..(28): n is a, c, g, or t
  misc_feature (41)..(41): n is a, c, g, or t
  misc_feature (44)..(44): n is a, c, g, or t
  misc_feature (115)..(115): n is a, c, g, or t
caaacaantnntatgtttgctttaaagntcatctggaaccnatnccaaatcccgaatgctttgatggccccctggttcttggcccctcctgaggctgggctcagacttctgggtngagggggcagcctcggcatggaacgtcctgcccttctgtcacctgaggcatcaggcacttgggtgatgctcagggctggatcctctttcactgcttgtgcacactcagactcccatagccagccctggctgggatcctcataagatggatgggccagtctgggggcactaggtggctgtgtcttcccctgctccctgggagacaggttcttaggctgggctggagttgtgttttccaaatcctggaggttggctagcccacctgccatggttgcctttctgcttggggatgccctgtctgggccctcaataagggatttccaggaccacatgctcagcttcccagaggtggagctgggaggagagcaactgctggtgggggtgagtcccgaagtgctgggagaaagtgctgttagtgcctgggtgtggaggtgctgggccttccagcaaccttcaggagggatggggtctgtggctccagactgacctaggttggggcctgctgaggaggagctggcagcctcctcaatggcttgtgggctcccgagcctcctgtggggaccactgggactttccattctgggaggccccagtgtgatccctgtcaataggcttgggaccattgggcccaggctcctagggtctctggacgggaaa

SEQ ID NO: 239354 - DNA, 820 bp, Homo Sapiens
  misc_feature (7)..(7): n is a, c, g, or t
  misc_feature (11)..(11): n is a, c, g, or t
  misc_feature (13)..(13): n is a, c, g, or t
  misc_feature (22)..(22): n is a, c, g, or t
  misc_feature (29)..(31): n is a, c, g, or t
  misc_feature (36)..(36): n is a, c, g, or t
  misc_feature (40)..(40): n is a, c, g, or t
  misc_feature (46)..(46): n is a, c, g, or t
  misc_feature (56)..(56): n is a, c, g, or t
  misc_feature (63)..(63): n is a, c, g, or t
  misc_feature (65)..(65): n is a, c, g, or t
  misc_feature (167)..(167): n is a, c, g, or t
cagggtnggangncaggggacnccggccnnnggagnccanccgggnttcccaagancaccctngnccaatgcaaagtggtctccaatctcaaagcaagaaataaatcacatttagagagtcggatgcgtttggcttttgtgcgcagagcgcggccggcgcgcggtgnccgcctcagaggatcacgcaggccgagcagcagccctcatcgccgttgggctgcgccgcgtagttcatctgccgcacgatctcggcaaatagctcgtctaccgaggctttgtttttggccgacgtctccatgaaggggcagctccactcctcagccagggccttgccctccccgtacgagacctcgcgctcaccctccaggtccaccttgttgcccaccaggatcatgggcacgcgctcgtaccgcttcacgcggatgatctggtcccgcatgggcttgatgtcctggaagctctgctggttgacgaggctgtagaccaggatgaagccctggccgttcttgatgtacaggtcccgcatggacgcgaactgctcggtgcccgccgtatccaggatctccagcaccgacggcgacgagtccacctcaatctccttgcggtaaaagtcttcgatggtcgggtcgtacttctcgatgaaggagcccgtcacgaactgcacggtgagcgcggacttgcccacgccgcccgagcccagcaccaccactttgtactctctcatggctccgtcagcgctctcgccgcgcctgccgcggccccgtcggggctgcgcgccggggaaggctgggcttggcggctggacttctcttccccttcc

SEQ ID NO: 239355 - DNA, 495 bp, Homo Sapiens
gctccgatcacctggcgctgcacatgaaacggcacatgtagccgggacgcccccgcccacctgcgcgcggccgtggcgggtcccacgcgccgggcgcggccccctcccaaactgtgactggtatttattggacccagagaaccgggccgggcacagcgtggctacagagggtctccctcgatgacgacgacgacgacgccaccaccccagcccccgtctgtgactgaaggcccggtgggaaaagaccacgatcctccttgacgagttttgtttttcaaaatggtgcaataatttaagtggcatcttctctcccaccgggtctacactagaggatcgaggcttgtgatgccttgtgagaaataagggccttaatttgtactgtctgcggcattttttataatattgtatatagtgactgacaaatattgtattactgtacatagagagacaggtgggcatttttgggctacctggttcgtttttataagattttgc

SEQ ID NO: 239356 - DNA, 587 bp, Homo Sapiens
  misc_feature (7)..(7): n is a, c, g, or t
ttcaggnctttatattgcaacagagcaccttaacaaatattttcttacttgatgctcacagtaactatatgaacttggtacagtggatgtccctgcgggtcagaaaaatgaaattacctttccactatcaaagctagacagggaaacagctagaacttcaactccaagtcttccaagtctcatgcactttcagatatttctttctttttttctttgttataatcaggagataaaaatgtaaaggagagtagagaaatattttaaaatgaagaaatccattacacttcctgtgtagtttggtgatatcctcatagattttcttgttccatgcaaaaaagttagtgaatagaacttcccggtctttagctggttaacacgtccacctcagacactgagtgccacaggccttcacttgtgaacatcatttggcatttctgactctcctgagttctggctcagcaggacctcaccacggaatgtgctactgcaaacaaccccacagccatcacgcctgatgagtacttcaatgaagagtttgatccaggttctgccctcgcagcaccgcgtacggccggctccgctccagc

SEQ ID NO: 239357 - DNA, 470 bp, Homo Sapiens
ggcacagagttcgagtccaagtgctcggtcgggcttgcagtctgcctagggcccatgtcaccccccccactcccgtgcccccagcaagggcgagatggcgaggggtgtcctccaacatctctgaaccgccttcccttcctcctcactggcgccctcttgcctcagtcgtcggagatggagaggcggctgaagattggcaggcggcggccagggtcgaggctgggagactcagagccgctgaggctgccggagctcagggagccgcttaggtagctgtcgcggtccgacagcgagtccggggggctggggggcgcgtcgaacacgggcgagtcggacaggcggcgcggcagctggaagctgaagggcggcgagggaggtgcggcggccccggcggggagggtcgcgctgggcggcgccggcggctgcgcggggggcgccaggccctgctgctgctgctgctgctgactgcg

SEQ ID NO: 239358 - DNA, 867 bp, Homo Sapiens
  misc_feature (5)..(5): n is a, c, g, or t
  misc_feature (13)..(13): n is a, c, g, or t
  misc_feature (31)..(31): n is a, c, g, or t
  misc_feature (72)..(72): n is a, c, g, or t
cagcnagccaagnaagaggtgttaatatggntattttccaactgaggaaacaggcaaaagtgtagtcatttntccaagtcagtcaagttagcgagtggtagatgtgctataccttgttgcacccattttgggacctgtttgaatggcatgccccaccatcgctcccacatctgccagttatgtttaaccccacgtgctatttccatcatggcctccccacatcttattttcaaacaggctgaaaacagatggcctcatttgccgactgagatcatgctcaagattagggatgcaccgggcacggaggctcatgcctgtaatcccagcactatgggaggctgaggcaggcagtgaaaccctgtctctactacaaatacaaaaattggccaggcgtggtgatgtgtgcctgtaatcccagccactcgggaggctgaggcaggacagtcgcttgaacccaggaggcggaggtggtagtgagctgatatcgcaccactgtgctccaggatgagccacagagcaagactccgtctcaaagaaagaaaaaaaaaaaaaaaaagacacaggaaggcagcaacagaacccgcgtcctgttcccatcagaagccactacgaggtagcatttttccctttcccatccgcaaagacgaaagacacttaggatttttagtattttaatataatacagttccaatcagtgtgtctggttcatttcagttccttcactgccaaaccggggggcagggactgcttcagtttctctgccttctctttgtcagtgatgaccagggtgtaaaggtatctgctgcatcgaactttaaacttcacgttgtccttatttttcttgatcttgacagatttggcatcctt

SEQ ID NO: 239359 - DNA, 759 bp, Homo Sapiens
  misc_feature (3)..(3): n is a, c, g, or t
  misc_feature (22)..(22): n is a, c, g, or t
  misc_feature (100)..(100): n is a, c, g, or t
ganggaaatgaacttttttccnttccccatacttaaggtttcctagcataagttcagtttaaaatgggcctgaggaaacagtctgttttaatttctttancagaaccaaaaaaaatgcacaactgtgattaagttacttagattcacttcttcattttacaaaatacaaacaggagaatttgagcatatcttgctctagaaagaatcctccaaaatgataaatcccaattatgggggctaggtcataatgcagttttaaaatctttatattaactatgagattctcacagatacattgccacaaaatattttttaaaagccatagatagtcaaaataaaaaatgtctaatttgtgggtggtgacagttatttccccacaggtactgaatatgtatcctggcacaaatcatcagcacaacacaggaacttcccggcagaggtgaacaggtcagtttctgaacagcagcatccgctcggagcacttctgccccaccaggctggcgtactgcagaacagcagcctcctcacttgggtctttctgctgtttcttataaacaccgtaaggcatgatggctctcttgtgaaacacctgcaatcggtcaggttccgtactgcgatcctcatccactgcaacgacaaaaaatactgatttgtaaaatgtcacatatcaaaactttttgtttccttttttttttttttttttttttttttgagacaagagtcttgctctgtcgcccaggctggagaactgggtaaaga

SEQ ID NO: 239360 - DNA, 894 bp, Homo Sapiens
  misc_feature (9)..(9): n is a, c, g, or t
agccagccnttccactttgaagagcagctggaaaatgagctcctgagtgtccctcacctgtctctaattccatcctaagccatgagctgatttctttttacacatttgtttatacattttttccctgtctacactgtgaacacctctgttgggggttaggacttacgcatctttttttttttttttggcttgcctgacaccttacagaggacttaatgcaatgcctattcgggcaataaatgaatacttgatgcattcatacaggcaagaatcccagcatcccagagaagctctgtctgcgctgcaaagccatggctgcagacatcagggaagctggtgcagttctagtctcgcctcctcgatttccctgccagcagtcttcctctctctcattcttctggccctctgcagaaccagggaggccaactgacttccacccatatggctttggtgcaggagcagaccaaaggtatctcccaattgaaggctaagaagtcctttgggctaatgtttagtgtcacgaagttcctttaaaaagagaggaaagcataccagaagtccctatggattagttaaagtagttccattcagggcacccatctgcaaacccagaccttctgccaggacacagcttttgtttcctctccctctcaggcttgcccatacagaagttctctccaatgaccttggagtgtaactgtctggacaggtccagttccttggagagcagtcctggtgccctttcttgtgagagtggctttgtccttcccacacacacaatgtgtgcatacatacatgctgggctcttccaagcatcgcccgacatgtcatgatccaatgtttcgtgatgccacagccctgatcagacaccagggaggggttcctttggtcatg

SEQ ID NO: 239361 - DNA, 682 bp, Homo Sapiens
  misc_feature (595)..(595): n is a, c, g, or t
tttttttttttttttaaaagtcattgctcatttaatcttggaggccacttggaggagcatggcgtctttgtctcgccctgggtgagcacaccgaggcccagagtttgatgattccttcaaggtctcaaagcttgccttcttcacagcgcttggtgatgcacgtggttgtttctcagtatggtttgccaaagggatgctctgattcaggaggctgaggtggggcctgggaatgttcatttctaaccttttcccaggtgatgctgaggccactggtccaggggccacctttggccctaagccgctaattaacaacatgagtcactttcatctggtccaggcttgtcgccccctcgatggaacacagagctccctctttccctcttggcctcatcaccagcccccagaacaggacccagcactagcagcactgaatcgtgtttgttggtgaactgatgcgtcgtgatgctgggtgagacaaggacggccgtgggagaggcggaactggccaagtctttgatgaccatgtgaagaagcccccagccctgagggcgagaggccagagcctccctgatgctgagtccagaccaggagtccnagccaggagctggtcactggtggagctagaggcttttcaagtgcatcctgggacttctgaccttccctcctgacagttctcatcgga

SEQ ID NO: 239362 - DNA, 835 bp, Homo Sapiens
  misc_feature (2)..(3): n is a, c, g, or t
  misc_feature (19)..(19): n is a, c, g, or t
  misc_feature (26)..(26): n is a, c, g, or t
  misc_feature (30)..(30): n is a, c, g, or t
  misc_feature (34)..(36): n is a, c, g, or t
  misc_feature (43)..(43): n is a, c, g, or t
  misc_feature (74)..(74): n is a, c, g, or t
tnncaggttcaagtaattntcctgtntcancctnnngagtagntgggatacaggcacacaccaccatgcctggntagtttttttgtatttttagtagagacaggggtttcaccatgttggccaggctggtcttgaactcctgacctcaggtgatctacccgcctcggcctcccaaaatgttggcattacaggccaccacacccggcaataactgattcttaatgcacctggttcttaggtttggatttggggtttcaaattcaaatcaaagtctcctggggtataagggcccttggagatcatttgaaccaagctctagctcctttggtcttggggacagctccaattactagaacatgatttaaattgagccacacagtcctttgcctggggattttgcagcctgtacttactggaggcatttccgtgttcgcacagcaggcccttctgatcagctctcaggccttgctgacctcctgggccaacactgagccattagcccctgtcagctatgtcttgctggtggctttagtagggacataggagggcctctcagagggaaggaggggaggagaaatggtcactttgcttgctccttcccagacggctgcccctggctggtgatcgcagattttggctgctgcctggctgatgagagcatcggcctgcagttgcccttcagcagctggtacgtggatcggggcggaaacggctgtctgatggccccagaggtgagtcccgagtgtgtcatgcgccatcggcagcccttcccccacatgtccactgaatgcaggagactcgatgccttgtgataacccaacacctccatcttttc

SEQ ID NO: 239363 - DNA, 653 bp, Homo Sapiens
  misc_feature (7)..(7): n is a, c, g, or t
  misc_feature (12)..(15): n is a, c, g, or t
  misc_feature (22)..(23): n is a, c, g, or t
  misc_feature (28)..(28): n is a, c, g, or t
  misc_feature (30)..(30): n is a, c, g, or t
gggtttntttannnnggattcnncaaangnccctcagggaacccaatttatgaaatcccgaaactgtactttttttttttttttttttttgagacagagtcccactctgttgtccaggctggagtgcagtggtgcgatctcggctcactgcaacctctgcctcccgggttcaagcgattctcctgcctcagcctcccaaatagctgggattacaggcttgcgccaccacacctggctaatttttgtatttttagtagagatggggtttcaggcagttggccaggctggtctcgaactcctgacctcaggtgatccacatgcattggcctcccagagtgctgggattacaggcctgagccaccgcgccaggcctccagaaagtgtattttgaagttatctttcttgatactgtctcttagcaggagtctgacactggcactgctgacatttgggccacatcactcttcactacggggcgtcccaggcactgcaggacatgcagctgcgtctttggcctctgtacccccattgctacccattttggggagaggattcctgtttccaaagtgacccagacacatctctgggcaaggcagctcctgacccctacccagggcccttcctttgtgcacaggagttgcagccccgccccc

SEQ ID NO: 239364 - DNA, 852 bp, Homo Sapiens
  misc_feature (25)..(25): n is a, c, g, or t
gcgtctgccaccacgcctggctaanttttttgtatttttagtagagacggggtttcaccgtgttagccaggatggtcttgaaatcctgacctcgtgatccacccacctcggccttccaaagtgctgggattacaggcatgagccactgtgcccagccagttttctctttcaacactttacatatttcacccttttctcttcttgcttgcgtggtgtctgacaagaaggctgtaattcttattcgtttcctgtataagtaagctgggtttttttctatggcttctttcaagattttgtgtttgtctttggttttctacagtttgaatatgatatatgtaggtgttgatttttttttttaagtatgtatcctatttggtgttctctaagcttactggatccgtggcttggggtctgcctttacttttggaaaattgggagccattataactttcacgatttttctgctctgttctccctttcttctccttgtggtgtttcaattgtgcatataccttttgaaaatatcccacagttcttgtataatctgtttttttccccatttttttctttgcattacagtttgggaaggttctattaacataccttcaggctgattttttcctcatctatgtccagtctactgatggtcccatcaaatgccttcatcatctctgttatagtgttttctctttctctttctttccttcctttttctttccctccttccctcccttctttctttcttccttcttttgtttgttttttttttgttgttgttgttgttgttttagacagagtcttgctctgttgtccaggctggagtgaagtggcaccatctcggctcactgcatc

SEQ ID NO: 239365 - DNA, 663 bp, Homo Sapiens
  misc_feature (8)..(9): n is a, c, g, or t
  misc_feature (13)..(13): n is a, c, g, or t
  misc_feature (18)..(18): n is a, c, g, or t
  misc_feature (31)..(31): n is a, c, g, or t
  misc_feature (60)..(61): n is a, c, g, or t
  misc_feature (69)..(69): n is a, c, g, or t
  misc_feature (219)..(219): n is a, c, g, or t
gaaaaagnncaanttagntagatatttcaantacataagggaggtgggtgaatgtcaagnntacaaaantgaaacaaaaacaggaaaaaaaagtggcagcaattttttttaaaaccaatttgtacaagtttatagtttactttgtttccaagttctcaaacctttcaagatctgaaaagtgagatactgtgtctaagggaatgtttcttttaattcacnccgaagaagttgggggtttgatttctttcgccggggtttcgatcgagtcaacagctcactctgctgggctgctgtttgcacacgaagtccgtcataaaatcaaactcgttttgccccagccagagttcgggcagctccttgatgcggtccaaacccatttctatcaccaaggacataagaacttcctcgtcgatgaaatcagtgtctatgacattgggcggcagcattgcagcggggacgtgggccacggaggcgggcatgttgccgctgccgctgccgccgccgctgttgctgctgcccgcgccgccgcccgagctgctgccagagccgccgggggtgctgctgccgcccgagccgccgggggtgctgctgccgccgctgtgcttggggttgcaatctcggaagtgctggtttgtcccgttcatctggtggcctgcagcaggg

SEQ ID NO: 239366 - DNA, 716 bp, Homo Sapiens
  misc_feature (3)..(3): n is a, c, g, or t
  misc_feature (5)..(5): n is a, c, g, or t
  misc_feature (7)..(7): n is a, c, g, or t
  misc_feature (10)..(10): n is a, c, g, or t
  misc_feature (12)..(12): n is a, c, g, or t
  misc_feature (28)..(28): n is a, c, g, or t
  misc_feature (40)..(40): n is a, c, g, or t
  misc_feature (49)..(49): n is a, c, g, or t
  misc_feature (63)..(63): n is a, c, g, or t
  misc_feature (70)..(70): n is a, c, g, or t
  misc_feature (73)..(73): n is a, c, g, or t
  misc_feature (77)..(77): n is a, c, g, or t
ggncntntcntncaaggaagaagcagcnccaacttgaagntggatgcanccttgcatgtgttntcaggtnttntgcntcagtttccctgcctgacaatccaggggagcaatgcctgtggggctgctcactgcccccagaccttctgcacatgtgtgactcctgtgacatcctctgtctccaggtttccagacttctcagccccacccttgcagcagcaggtcagcctggcttttagaaagagaattttatttggaatgaaaatatagagcccaccctcccgcctcctctggggagggagcagagggctgggcagtggtcggggagatggtccctcagaggtcgaggagctcgcctgggcgtagacatcctccacaggaacagtgaggaaagctgggcgctggcttcggcctgggcctgggacgggtgggggtgggaactgacccctgcgctgcctcagaggctctgggcagccagctagcccggtgcgacccgctggcagaagctgagtgggaagggggcggcggaggagatgaaggtggcgtgtggctgtggccctacgcatccccgttctccatgcggcccagctgctcctccaggcggcagatgcggtcgccctgctccttgaccagcgccctcagggcccgcagctcctgcatcacctcctccagcttcccagcctcctggggctcccagcaccacccctgcctgcgcgtgc

SEQ ID NO: 239367 - DNA, 641 bp, Homo Sapiens
cacattttgtgcagttttagtgaactataaatcactgacttcttcaggcctaaaagagaaaagatgagaaagtaagaagatggaggcttgttgagtggatgctcagagtttcagtgacattctgagcagacttgtctttggaggagggcagtgaggggctgacccgtggctctaggagaccagggagctgaaggtgattaaaggtcactgtgatcaatgtagggggaaatgattctgatttcggcattttccgatttagggctatggatgccaacggttcctaagttattgggataagtgatccttttgagttatgaacatattggcagcctctgaatttagctctttcaaaaaggtaggacaaggataagactctgtatgccactgggtccccgttctctcaggcctaaattccaaccccacctcactgtctctatgtcactgtgaaaggcacctgtctgactatgacaaatgctgttcccatcactttctgcctcgttgacttggaatccctgtttggatttcttctctaggaagtgcttccctggacccacagggtggccccacagcatctgtgctcactcaacacactgtgcagtacgtgtgggccgattcacccacgcctctgcctggactgggag

SEQ ID NO: 239368 - DNA, 696 bp, Homo Sapiens
gtagctggggcctctggcctcttggccctctactgcctcctgcttttgctcttctggatctacagcagctgcatcgaggactcccacagaggtgctatagggctgcgcattgcactggccatctcagctatagccgtcttcctggtcttggtgtctgcctgtatccttcgatttggcaccaggtctctctgcaactccatcatctccttgaacactacaattagctgttctgaagcccagaaaattccatggacaccccctggaactgctctgcagttttactccaacctacacaatgctgaaacctcttcttgggtgaatttggtattgtggtgtgtggtcttggtgctccaggtcgtgcagtggaagtctgaagccaccccataccggcctctggagaggggtgaccctgagtggagctctgagacagatgctctcgttgggtcacgcctttcccattcctgaagaataagcggagtgcttcctgcagccgaagactccatgcccaagtgcctgtaatcccccccctcaaggccctgtttatgttgggagtcttagttttcctttcgttggggggtgggggggaaacataatgacaggcccccctccacctcttcctgcagctgtttttgtaccaaaatattatattactgtcttcatcttaaaaaaaaaaaaggagggcggccgctcgcgatc

SEQ ID NO: 239369 - DNA, 747 bp, Homo Sapiens
gcatatataagtgaaaatataaaccatgaagacatgtttagatatgtataagtacttagaaaagtgacgctgaacaattacatagctttaaaaaatatagagccatctaatgccattttacctcattcaactcttttttgtaagaaatgtgtctttttaaatttttataagacttctgttaactaggcagtgccatggaaagaaaggaagctgctgtaaagtgtgcagcacttctaagtggagggaagcaaaataaatttagctttaacaagtaccccagagggaacattcgtgctttaaacaatgactttacacataatactgtgaagagagcaacacgttttttgtaagatactgttatgaagaattcctggcaaattaccattctcactttattttggggcatcaaaaacaactaagtatttgattatgaccacaaaaaattcatctcaggagtcaaatgtgccttggccttaaaaattatgtgcttactattgtgaaacaatcctgtttctcatcccagattcagaatgcctaagaaataatttttagtgtaagaagtatcactccaatttagtcattaaaaataatctgtagtcctttaaaaaaaaaaaaaaaggtatgtaatttccaatacaagtctttggagtaaatttgctttttaaagtttcaacaaagtttccattcatttgatatgtgacatgtcaattcccttttttatgtttttttttacatatgctgaaatgc

SEQ ID NO: 239370 - DNA, 600 bp, Homo Sapiens
aggtttaacttttaatcagccaaacatcttgcgcagaccctgagccagccctgcatcctggttcttcccctgaatgaccaccttccccagttcctcctgggctgcccggtttttgggatctatcgccagcaccttcttgaggtcagcagttgctttttccaggttcccaagggcagcctgggcaaccccccttcggtataaggcctttaaatggccaggctcccgctccaacacccggtcacagctctgggctgccaactgaggctgccctagcaacaactgacaggcagccagattggcatgaaggacagttcgttctggagggccaggtgggggtaaagtcaggagcagccgaagagcccgtccatagcatcgggcagctccttcagggttcccagctcgaaatagttctgtgccccttgcacgttcttccctggccagggcttccttctcgctagtctccagctcccaggagtctcggccttgagtgaaggatgccagtgtgagcctgacaggaggtccagagtgcccaggcagctgaagctctgcttcctcaccttgacacatagactccaagcatttctctatgagctccggacg

SEQ ID NO: 239371 - DNA, 705 bp, Homo Sapiens
tgagttgtatgggggagccatctgaagctgtagccaccagggatgcagctagctgaggagtttggggtgttgggttggacaaggcaggttagtagactcagattcttgcttcaaagagccttgggctggcctggaggtccctggagtctagactggacctaggagcttgagttgtcaggggccaggactggccccactgcagtgcccaggccagtcttgagcagcagggagggctcagctgtccccagatccaggtgcctctgaccagcctggtcacctcctgaggaataaatgctgaacctcacaagccccatcattcatttcttctcaattcacagtgcccctctttgtttctggggtggaactaggtcctgagggcacagcctagctgagtgcaaagaaatataggatgcttagaaagcatacaggaggggccaggcgtggtggctcatgcctgtaatcccagaactttgggatgccaaggtggttggattacctgagatcaggtggattacctggtctcgagaccagcctgaccaatatggtgaaaccccgtctctactaaaaatacaaaaattaggctgagacaggagaattgcttgaacccaggaagcagaggttgcaatgagctgagattgcatcactgcactccagcatgggcaacaaagcaagactccaacacagaaaaaaaaaaaaaaaggcggc

SEQ ID NO: 239372 - DNA, 604 bp, Homo Sapiens
tcttctctttctttaaatgtttttggccatcaagtagcagtcgtcagtaggagtttataataccaagaatgtgctgcgtatcttgtctcaataagttttaagtaacatttaaaaatattaaagcatgttatttgacctaattttttagcatttgagttgttccattaaatggagcatcttgtaaatttcaagtattttatacttgcaattgttaagagttaacaggtagttggatttgtcgcagacaatgagttaaggaatcctttcacgtttttcccaactttaaaattaaggattctcaggtccctgtgtagagcagtgaaaataagatgtgcgtatgtgtgtgtatgcctggagaattggtgtttcacttcagtgagaggattggctgtgagcttcagaccaggaaatgtgtcatcttgccaggcacctggctgagtgtgctggagtgaggatcttgaacagaaacttccttttctgttattattcactacgaagctaaaatggccaaatatataccgtgaaaattggtttcatttaacaaaagatcagatccctccttcagctgtacacatttttaaataaaatcatattgaactaaaaa

SEQ ID NO: 239373 - DNA, 614 bp, Homo Sapiens
taactttgaaaatttctttattacagacatttcagaaccatttaaatcaacagacaaggaaatttttagacataacatactgtgtttatcttgaggtacacattgggcccattagataacgttttggaaagtaatgccattgttaactggtagttaacaacccaagttttccaagcaaagaaactgtaaagatggttacaaaattctttgaaaagaatacaccatttccatttaagataaactctccaaattcttaactgatttcaatttttaggcttagcttaaacattttaaatgaaacaatatgagagtgggagaaaaggtttatagctaagaaattatctgagccctactacatgagattgtaaacaaaggaaatttgcgatctgataagctctattacaaaatttatagcctaaaaattagagcagcaaaattacagaagatatttgtatatagtttaaactgaaatcacgtttattccttgtttctggctatcacaatgagacaaattttaaaacaccaagttttaaagactgaacagtgtgatttaacatgatgtaaccatgagaatcccatattattacaatcccacaatctaaaaactctaaatc

SEQ ID NO: 239374 - DNA, 759 bp, Homo Sapiens
atatttttggtagagatggtgtttccttatgttgcccaggctggtcctgaactcctgggctcaagtgatctgcccaccttggcctcccgaagtgctgggatttaatcttttttttttttaatagtttttttttttccccaagtagtaattctaaccatagcacagtggcccctgaaacccgactcaggatcccatttcactaacagcaaagtgagtcttcccatctctgaccttccttccttccctctctcctcctccaaatatccacaaaaaattgccaaagttagtggcagaaggaaagtaacacttactgagaccctatgatgtacctggcccgttaatgtgatttttccataatgtaccatataaatcataaccctatttctgcagttaccagagcaaggtgagagtgtaaagtttattaaaccagggtcctctcctccagccccactgatggtctgtcctgactgccaggcacctgcttggtttagaggcagacaacagcagggttccaggcaggcagttgcagtcacctgggactagcaaggttttgatgcttcagtgagtgactgtgtgtctgtttttccagatgggtcatcaagtcacgaaatgaaattttagggacttgctttaatccgttctcaatcgaggaagtctatcacatccccagtgaaagggtgacctgccctggtctgtactaagtgctgctgagtgactcaccagggcatgcaatgcttccgtgctttatgacaccggacg

SEQ ID NO: 239375 - DNA, 810 bp, Homo Sapiens
tggatccagttgaaaacaagagaggccattgtcatgctacacaagatggcatagaatttgctttaaagagctatcgcagggagagccatccacctttaaatttggcattctgatatctgagtgaattttcttctaaactacttcgacaagacaaaagaacagtgtatgtttacttggaaaagttcatgacctttcagatgtcactccgaagagaggatgtgtggcttccactgatgtcttaccgaaattctttgctagctggtggtgatgatgacaccatgtcagtcattagtggaatcagcagccgggggtcaacagtacggagtaaaaaatcaaaaccatctacaggaaaacggaaagtggttgagggcatgcagctttcactcactgaagaaagtagtagtagtgacagtatgtggttaagcagagaacaaacactgcacacccctgttatgatgcagacaccacaactcacctccactattatgagagagcccaaaagattacggcctgaggatagcttcatgagtgtttatccaatgcagactgaacatcatcaaacacctcttgattataatcggcgtggcacaagcctaatggaagatgatgaagagccaattgtggaagatgttatgatgtcctcagaagggaggattgaggatcttaatgagggaatggattttgacaccatggatatagatttgccaccatcaaagaacagacgagagagaacagaactgaagcctgatttctttgatccagcttcaattatggatgaatcagttcttggagtgtcaatgttttacccaa

SEQ ID NO: 239376 - DNA, 666 bp, Homo Sapiens
  misc_feature (22)..(22): n is a, c, g, or t
tcgagcacatgtgaaggccacngttcctgccgagtccacgtgttcacctcagcaccgctttgccagagtgacgaggcctggggcgcccgggaggcctggccgtgttggccgcctttctggaggagggcccggaagaaaacagtgcctatgagcagttgctgtctcgcttggaagaaatcgctgaggaaggctcagagactcaggtcccaggactggacatatctgcactcctgccctctgacttcagccgctacttccaatatgaggggtctctgactacaccgccctgtgcccagggtgtcatctggactgtgtttaaccagacagtgatgctgagtgctaagcagctccacaccctctctgacaccctgtggggacctggtgactctcggctacagctgaacttccgagcgacgcagcctttgaatgggcgagtgattgaggcctccttccctgctggagtggacagcagtcctcgggctgctgagccagtccagctgaattcctgcctggctgctggtgacatcctagccctggtttttggcctcctttttgctgtcaccagcgtcgcgttccttgtgcagatgagaaggcagcacagaaggggaaccaaagggggtgtgagctaccgcccagcagaggtagccgagactggagcctacccaa

SEQ ID NO: 239377 - DNA, 645 bp, Homo Sapiens
  misc_feature (67)..(67): n is a, c, g, or t
  misc_feature (147)..(147): n is a, c, g, or t
gcttcttgctcaagaagtcaagtccgcagtgaagtacggccaatcgacctagcccgggttctagatntggggcccatcactcggagaggtgcacagtctcccggtgtcatgaatggaacccctagcactgcagggttcctggtggcntggcctatggtcctcctgactgtcctcctggcttggctgttctgagagctccgctgagcatctggccttgaagtttgtgttcttccctctggcaatggctcccttcagcacttctgctttccactccaattcacacaggcttggtattaacagaatcaaggccaggctaggttaggaaaagggaagagctttcaccttctttaaaactctcggctgggcgcagtggctcatgcctgtaatcccagcattttgggaggctgaggcaggtggatcacctgaggtcagcagttcaaaatcagcctggccaaaatgctgaaactccgtctctactaaaaatacaaaaattagccaggcatggtggcaggcgcctgtaatcccagctactcgggaggccaaggcaggagaattgctcgaactcagggggtggaggttgcagtgagttgagattgtgccattgcactccagcctgggcaacagagcaagactctgtctcaggaa

SEQ ID NO: 239378 - DNA, 463 bp, Homo Sapiens
tttaataaactttagattaaaatatatagtgcaagcaacatgccatttcaaatccgtagacttgtttctttgatactcttgctgtaggtcgccgtgaggggtagggaagcatatatactgtagggagaagtatcaaaatcatttaaggtcttttttccaaactagtgttcccctcccacatcccaataactcttggaagtctggtgctccctctaggtgaaaatcatttgctggcttatggagtcactgttgctgagtcccatcccccagttacagtgcagtggaaaacaggtttagaatctagaacttgtttgtatgttgtcacttggttatgttccaagtaggttagaaccatggaaaagagattgcaaatggtagtttcttctagatattcaaatgcatatatgtatgtacatgtaattataaataaataatgaatttttattaaagtgttgtatgaaaa

SEQ ID NO: 239379 - DNA, 581 bp, Homo Sapiens
  misc_feature (568)..(568): n is a, c, g, or t
  misc_feature (572)..(572): n is a, c, g, or t
atggttataaatccttgaagacatttttgcccattttgtataagaaacaggagtaaacaaggtgtttatacttgttatgtttcattaatgaaatattattactttacatcttggggaatgtttgttttctttagaaatgaactaatgatcactacaaaggaagaattcatgacagcatttcctagagaaaaagcttaggtacgcgtctccaaatgatggtttctttttctacaccttagctttttcatagctcaattcttcttacaacttctcttgtgttttttctttgattgtcagttttctttcaaagtttattttttgttacttaatgcagaaaagtgagctctggtctccccagtgtaaaagtcgattgtgtctagaaagaaggcagtaaaaacagcaaagcaggcgctgctttcaaaaagccctgcccaaatcatcccgcccagaaccttcttaggtttgcatcctcatttccccctcccctaatttcaatagctggaaagtaatcaagtatcccgaggaccaatttatgcactagactccaaataaataaaatatttttttncatngtgtcaaaa

SEQ ID NO: 239380 - DNA, 595 bp, Homo Sapiens
tgaaggtcatacatagatacaggttggtatcctaactttaccctctcactgattaacatggtatcacgagtaacttcctatgtttttaaatctttgaaaatagatttctagtggttctaccttatccatccccacactgttgaaaattttggttgtttcagatacttttattatcaatgatgatgtgataaagtttcttgtatatatctctttggctctatttttggtaatttcttaagaatggaatcttagaattggactgtgaagagggggattcacattgctggggctaagtacaaattgacatcaccttttaggaatgaaatgcttctctttgaccctttagctccagtgtcccagcatagtcactgggcttcataggagtagcagtgagaggacagtgtcacagcaagggcctctctgcatgctccctgatcattgtgtttgcaggttcagcatttcttcttgagtccttcccttcttccaaccttattgcctcatttcccccttgtagtcaatgttttttggaaacactgtttattttaaaataaaaatgtaaaaaaaaggtaaaaaaataaaattttaaattttaaaa

SEQ ID NO: 239381 - DNA, 575 bp, Homo Sapiens
  misc_feature (138)..(138): n is a, c, g, or t
ctgcccgcggctctgtggaccagcagtgcggtgctgggactgctgctcctggccttgcccacgtatcacctctggaaacgctgccggcacctggctgaggacgacacccacccaccagcttctctgaggcttctgccncaggtgtcggcctgggctgggttaagggggaccggccaggtcgggatcagcccctcctgagtggccagcctttccccctgtgaaagcaaaatagcttggaccccttcaagttgagaactggtcagggcaaacctgcctcccattctactcaaagtcatccctctgctcacagagatggatgcatgttctgattgcctctttggagaagctcatcagaaactcaaaagaaggccactgtttgtctcacctacccatgacctgaagcccctccctgagtggtccccacctttctggacggaaccacgtactttttacatacattgattcatgtctcacgtctccctaaaaatgcgtaaaaccaagctgtgccctgaccaccctgggcccctgtcgtcaggacctcctgaggctttggcaaataaacctcctaaaatgat

SEQ ID NO: 239382 - DNA, 552 bp, Homo Sapiens
agaatgcatcctatatccacgttcaaagagatgctgtcaggactgtcgcgttgaatgcaccttcccgcagcaggcccacgcatgggtcctacaataaagtccatgctaacagggaacccaaacccaacctcagtccagacaaatatacgtcaacatcatataatgattcagcctggcgaaaacgaattcctttttcaaaaacatattcaaaaagtgaaaagatatatccagagccaagaagaaatgggagcaagtaaacctggaggttgagagagagaaaaatgagaaaaaattgccagacatcatctgatttacaatcaaaaatgaaaattcaaagaatgagatactcaagtactccatgttatgtagtggatagccaaagatgataaaaatgcaaattctgaaaataagatgcaggaagtacattgtgctctttcaaaactgataaaaatgcaaattaccaacagctgccagtgtatttatgtaggtctggaattcattccgtgcattactcccaacattttaataaaatttaaaagttaaaaaattaaa

SEQ ID NO: 239383 - DNA, 421 bp, Homo Sapiens
agagtattaactagtgaacccttttattattaaaaaaaaaaaaaaactacttacaaccattgaagaaaaaattgcaacaaaaaatgtaaaaattgaccgtctccaacttgtcccctttactattaacaatgtgaccaacagatctgtggcacggacacagtacaaagagttgtcatggcaatgagtttggctgatgcaaaggtcattgtgcagggtcaaagggcaaaatcagtggtccatgttaccccccaactgcagggctccactccacccacacaattttagggaattagaaaaaacaggggaactaccagaaagtgcaaaatatgaagaaggcagctttcagctccttcagcatggagtagaacattcatttttgagcttttactattgaacttgaatagcctgcacattaaaaaaa

SEQ ID NO: 239384 - DNA, 549 bp, Homo Sapiens
ttgaaaaagtaaaggcctaggtagtaacttgctcaacattacactgccagtttttgatagaattaactaccttaatttgttagaattgagactaacacccgaatctcttcattctaacaatgctttgtagcttctaaatgatcccacacggggtttttcaaggtcttcctcctccccaatcccttaattactcagaaacatcttttctgaactcacagcatttgataattatgtaccatgttaggaattatttttcattattgtcacacgttttaagtttagagtcatacttctggaatgaaaactatgactcatttcataagttgaaccaatcatctcatttctttatagttgcctccccaactatattaagctccttgaagataggacacatgccttacatttcttaactcttagctagtattcaacataattaatatgacgtttgatacatattagtttaattaacttcataataaaattgataagattaagtattgaatgtgctgaagaagagctctatatgaggccattgtcaaaactgaccca

SEQ ID NO: 239385 - DNA, 480 bp, Homo Sapiens
attcacatgttgaagtcctaacctttagtacttcagggtgtaacttatttggaaactagatcattatagaagttaaaacgaggtcataagggtgggccctaatcttactaacctgtccctataaaagggaaatttgaacacagtgacacccagagggaagatgatgtgaagacagagagagaagacagccatcagcaagccaaggagagaagtctggaatggatcctcccctcacagccctcagaaggaaccaagccagccagcctctcaatctcacacttttagcctccagatctgtgagacaataagtttatgttgtttaagccctccagtctgtggtactttgtaatgtagccccagcaaactaaaacatgggttggctggtggcattagaacaagttgcccatgaaaaggttacaggcagcctataggacaattgaagatgcattctactttctgcctgcactgtgcatatatgaa

SEQ ID NO: 239386 - DNA, 653 bp, Homo Sapiens
ttttttttttttttttttaatcactgtagtatttctctctagtcgcagacgtacacaaacctatttatttaggtgaccttgtaataccagtcatttattttcatgaacaaaggaaataatcagaaagcagaaaataggtacaaactcagttacaatgcaatagtattttaatgcacatgcaccagagttataagcaagatgaatttgccttaagtattgcaactgactgaatgtttgtgttctcccaaaatttctatgttgaaattctaaccccctatgtgatgacatgtgatgatattaggaggtggggtctttgggaggagccatgtgaagatgtaatgggattcatgctcttatcaaacagactccagagagttctcttgtcctcttttggccatgtgaggatacaagaagatggcagtctgcaaccaagacggctctcaccagaacccaaccatgctggtaatctgatctcagacttccagctccagagctgtaagaaataaatttctgtcgtttataagccacccagtctatggtactttgttatagcaacctgaaatgaataagacaagtattatcaagagtaactgcacatatttatggaaatcacaacatgatataaaaaaattacaaagttacaaattgtctcc

SEQ ID NO: 239387 - DNA, 302 bp, Homo Sapiens
agcaggcttgggccccagattaagatgtcaccaacagtgagagcccagaaattcctttgaatccaattttggcctttgatgatgaagggacacttgggcccctgcctcaggtagatggtgttcagacacagcagactgcagaagttatatgagtgtttcttctgaagaaccaaagctgaaatttaatgagaatttgtacaattaatggaattcctttcctgctataaaggagcatcccctccacccgttttctaggttcttgacatcttaatctggggcccagcctgctggtccggctcact

SEQ ID NO: 239388 - DNA, 599 bp, Homo Sapiens
ttgaattttgattctacctgatttagggatgaatgtttgaattttaatggccaaatttgccggttttaatatccacaggattttttctcctatagccataaactcaaattgggctactgttattcactgtgatgtaatgaatgtgaacgccctggattgaaaagttgccatttgggaaattataacgtggaaaacctgagcatatgattaacatctcccagctctttaatacagaattaggattttgtttttagtactggcggttaccagtgttttaaaggaatttcttgagtgaagcgatcattttaccaaattagagaagcaagtagtatggtgattgccaggaatttctcagatttgaatcaagttctgatgttaaaatggaagattctgtttaaagcttgtattttcaaggaatacttataaacatttttatcaggcatcttcctgtttctctgtaaatacttccttttttgacttaaaaatgttagccagtgaatgcgtgacatatttgtgttcttgtccttttcagttgtcactcagcccagtccatcagtttctcagcccagtacttctcagagtgaagaaatagtcctacc

SEQ ID NO: 239389 - DNA, 582 bp, Homo Sapiens
tatgttttgactaacagatggtacatttatgagaatgagaagaggcccctaatccagacaggtagccaacactacctggattttaggactggattctagccttcacttgtcctaaactaggtgtctttgggtacagcaaagtaatcatactaccatagcttctctgcttagtctactcccagaccataggaaaagttatttactatcctgccatagttaaatgtacactttgtcctatagttaaatgtacactttgtccgatggccaatagcatgataagtgggaagagagcacatttaagaactaagaatttggtgtgggaatccaagctcttctatccactggcagtaaaatatatttgaggagagtttaaggcgtatgagtcgtcttacccacacagtaattatgagtttagattttatttgaactatctctcttgtttgtattttataaagtaatggtgtgttaaggcgcagtgcacccaaatgtaactaagacttagtagcacctaggactcagatcttggtttttcttacaacattcgcactgaaaggaacctggctctttgaaaatgtttgattc

SEQ ID NO: 239390 - DNA, 588 bp, Homo Sapiens
ccagtaagatttgcattttgacggcatctcgctgatacttaaagccttctgtgggcacgttctcaaggtcccctggccatctgcttgcctgttctagtttctctcctcctccacccacatcgtgatatgtcccctcccactcctcagcaaggtggtgtcctctgagactgagtagtcagcaacttaacaccaagggccaccaatgatcaaatccatgagagttgatctgaggagttatgtattagggataagaaacagtaaacactcagtaaatagtggctattattattatatcatcatcattattaccctcaagttgctccaggagaactcctattcaacctccaaaaccccatgtggtttcacccatcctgcagagattgagctcaaaatcagagaattgtgattttgtgattatttgatgagttcccaaactggggtccttagatcagctggccatccctgagtctctcagcatcagctctatattttcctggcatggtctcagcacggcagtccggctgaggagtgtcaacgcagcagtgtcaattcgaatccatcccagtaccatggtgggatcctcagagc

SEQ ID NO: 239391 - DNA, 637 bp, Homo Sapiens
ttgagaaccagtatttgaaagctcgtcttcaagctccaaattgagtgactttgttaagcacattgcacctaaatctaaaagtgcttttataaacaacagaggtgacaaactcaaatgcttacaggggccagatggtcaacatacatgtgcaaatcaggttagatgagaaatgacatgaactcccggcaaagaccacagtctaaatgggaaggggctacttcacaatcatttgttgccatgtgggattaggaaactaatgttgcccaatcatcctactttaaagagactgcagaaatactaatttttaaggtataacatcttctgaatttttttaaatgatggcaataattaaaatttgtgcataatgcatttgcaggcggcacatagaaagtatactatcaactcatctcctctgttgtacatattcctatctgataatcaaatgagaaaagataacccattttacagagaaaaacactaaaggtcaagaaagagttttttatttgtttaaggtcacacaggctagcaagtggcagtgatgtgactccaaactcagccattattctttacacttcatttcactgccttgattattttgtgatgtgtccatacattcagcagagaaccgtcgattcga

SEQ ID NO: 239392 - DNA, 537 bp, Homo Sapiens
tcaaggagctgcactttccaaaaacattacttaaaagatcagcacctcagcatgctagagtatcatgtaccagtcacagcaggaggagtcgcaaacatttttgatctgctgggaaccaacaagactgctttaaatattacaaatttcttagtgagtcagaccactctggaagaggttttcatcaactttgccaaagaccagaagtcctatgaaactgctgataccagcagccaagggttccactataagtgttgactcacaagatgaccagatggagtcttaacaattccagcaaactcaatctcagcgtgtgaccaatggcttcattttgaagaaaagccacagaagatacacttccgcaagatatcttcattttaaagtaaggtaatatactgtatggaaagttacaactgtgttagactaacaagtaattataaaaggaaatttttccttctaaggtcagtgagtgttgttgctactgaaatgattccgtatactcattactgtcagcggcttcaggggggtcctctatatcgc

SEQ ID NO: 239393 - DNA, 662 bp, Homo Sapiens
gccaaaccgcacttgactttcacagaaattttatttgtaatagtcagaacctggaacaactcacatgttattcaccaggtaaacagttaaataagtctgttatttccgtattgtgtaatacaactcaaaaattaaaaggaataaactactactatacaaataagccttagatgattctcaattctgaaggaaaaacccatttcaagttgtaacataatgcttatttttatgtatcttaatgtgatgaagttaaatagtttagagaacattgttcgtattcatctgttagggatggtagaagttagggttgtatgtgattataagactagtggaagggatacgtttttaatgatggatgagttctgcattctgattcatgcagtggttacaaaaatgtatacatgtgataaaatgtcatgtaaatgtgcacatttcaccaatgacaatgtgctggttgtgatattgtacaatgttaatggaaaatatcaccactggggaaaattgagtggtatgtgtaaacggtactatatttgcagcattttgtgagtctttattttaacataatatgtaaatatgtaaagcaactagaagaatggttttaatacaggagagtaacagcttattagcaagagaaaccgtcgattcgagggaatcctcagggc

SEQ ID NO: 239394 - DNA, 396 bp, Homo Sapiens
  misc_feature (28)..(28): n is a, c, g, or t
  misc_feature (56)..(56): n is a, c, g, or t
  misc_feature (92)..(92): n is a, c, g, or t
  misc_feature (105)..(105): n is a, c, g, or t
  misc_feature (178)..(178): n is a, c, g, or t
  misc_feature (219)..(219): n is a, c, g, or t
ctccctgaacgtcaaggtgatctgtttnaacctcggccttccccaaagtgcctggnaattaacagatgtgagccaccgcgcccagccctatntacctctttatcncttaccccagtcagatcttatgaagcataactaagatacttagacactcataattttgctctagtactcattntttttaagagaaaaattcttttctagtcctttgcccgcccnctaagtgaagtttagcttggtcttctaatgagatgtgtatatgaagtgaattgatttaagtatgtattctctgatgtgtttaggttggttgtgtgtatacacatgtactctgtagttgtaaagcttttctgccttcttagtctgtaagctcagagggcaagaaccactccattccca

SEQ ID NO: 239395 - DNA, 495 bp, Homo Sapiens
aggagaggatggagtcgccacccagtccaggcagtgggcaaccggaagggcagtgtcattcaaacatggctgaaacagtcatggtggctacccccggggagtagaattacatgtcatatccaatgctcctctgttttacgttttgtacttaattttttttttctacaatgagcacgtgattaaataacaattctccatggaattccgtcacatgacaaatgccctccagggggtagtggacggagggcatctagggtgtagggggaggtcggctgatatccaggaacactttgatcactggccaggcatggccctgttacccctcttccgcaccccgctcacttacctgggaggtagggggccacagagcacagcacagcagttggtgataatacttttatggctgtaggggttgacagaggcctcaccgcccctcttgctggaccacgagcctttgatgtcttcattagtagtcaggttggaggcgacctcgtg

SEQ ID NO: 239396 - DNA, 571 bp, Homo Sapiens
tgcaaaggagccatgtgccatggcatataagtcagtgtagactggtgccatttgttgtcagactataggtgtggaggtgaaattacaggttcaacagtaattgggacagaaactccaggtaaatggggagtggagaagactgcagtaaattagatggaatgactcttctaaaagttcatctacaaattttccagtgaatatggttgtgtaggatcagtgcatacagaaattctcaggatcttctgtttactatcgctgagatcattatcagaaaatagtctggccgggcatggtgtaatcctaacactttgggaggccaaggcgggcggattgcctgagctcaggagttcaagaccagcctgggcaacatggtgaaatcccatgtctactaaaatacaaaaaattagccaggcgtggcagcatgcgcctatagtcccagccacttgggaggctgaggcaggagaatcgcttgaacccagaaggcggaagttgcagtgagctgagattgcaccactgcactccagcccaggcaacagagtgagactccgtctccaaaaaaaaaaaaaaaaaa

SEQ ID NO: 239397 - DNA, 644 bp, Homo Sapiens
attcaaaatttggggctcagtcttttccattaaatttttaagcatgagttttcattacagattattctgaaaagttgtaataaagtcctagacattcacttttttcaatttgagggtgtggttgttattttacaataaacactggagtatgtttcttgacactaggactatgattttgggggaagaatagttcttaattaaggttgtggatacatttatgttatataacatgaaaaaactattagaaacaaatggttgtagtggtaacatatacattcttggattactgttgcacacaaagagatgcatgctaattcaaattctgtaatcattttcatttaaaatactcccttcgccatgccttccgaagaagtttttcttgtttatttagacttaccttgacaaaacaaataataacactggggtagtgcttcctgatactgggttgaaagaagcagaaggctatttttaccctgccctggcctgagcatgcgaattatgtgagcctttaggctactatgtctgtgtgctacctggctcagcactataaacagtactgcctggagtgttttggttttgtctctaatgatgaagaccaaattagaaacaggtgttccaatttcttcacttccaaaatatcgcca

SEQ ID NO: 239398 - DNA, 525 bp, Homo Sapiens
acgctttatggtttttatttttaatgaaactattatgttaggtaattgatcataatttggtcatttactgaaagaaacagcaacagataacctttgaaaactactggaaggtgaatcatctctcccattcaacatttgaatgacttcaattcacagtgacttagactaaagcaagagaacatcaaatgtactgttataagctgaactactaactcagaggaggaaccactggcaagcccataaaactgaaactcacaaaaccatgatttattgggagatgtttatgtcacttttgagaaaatattaaacaggtgcttttttatttgtagtaaggtcatggagtatattttgagtttcattgtattctaaattgaaattttgtacttttagggtattctgaaattcttaagtgattcagattagactttggatgctataggtaatgcaaaggcagaaaccatttcttctcttattcatcaccagatctctggtgtttcgtataggtcctcacatggctggtgaatg

SEQ ID NO: 239399 - DNA, 673 bp, Homo Sapiens
  misc_feature (163)..(163): n is a, c, g, or t
cgggattttaaattaagaagtgcactaatcaggaacaagcaactaggactgtgcccacaagaacatgtatatgataaaataaatggagttgggaatttatccagtgatcagggcaatttaggaaccttttttattaccaatgtgagaattgtgtggcatgcanatatgaatgatagttttaatgtcagtataccatatctgcaaattcgttcaataaagattagagattcaaaatttggtttagctcttgtcatagaaagctctcagcagagtggtggatatgttcttggctttaaaatagatcctgtggaaaaactacaagaatcagttaaggaaatcaattcacttcacaaagtctattctgccagtcccatatttggagttgattatgagatggaagaaaagccccagccgctcgaagctctgacagtcgaacaaattcaagatgatgtagaaatagactctgatggtcacacggatgcttttgtggcttattttgctgatggcaataagcaacaagatcgtgaacctgtattttcagaagaactggggcttgcaatagagaaattgaaggatggattcaccctacagggactttgggaagtaatgagttgattgaccttgagttgagatggatttctattaaagatatctctagtttaaaaatactaaa

SEQ ID NO: 239400 - DNA, 492 bp, Homo Sapiens
  misc_feature (20)..(20): n is a, c, g, or t
  misc_feature (27)..(27): n is a, c, g, or t
atgaggtgagccctgccccntgaaatncagcctgtgaacctattttttgttaacctgtgattttaaaagggccaggggaggagaaaatgaatacctgagggaagggaaaggagacccctaacatttaattgaagtcccttgggagttccttgagatagatgccctcatacacgttaaccttatgcatccctcacaatgatccttgggaggtgttatttactcccattttacagaggaggaaatggaggttaaatcacttacacaggctgggcacggtgactcacgcctgtaatcccagcactctgggaagccaaggcaggaggattgcttgagcccaggggtttgagaccagcctgcctctacaaaaaaataataagtttttaaaaatcactgcccaaagttccaaagctagtcaacaaagaaaccggttacaaatttgctcttcatttagtgtaaaaatcaatgaaacttttctgaatgtttcagtcttta

SEQ ID NO: 239401 - DNA, 444 bp, Homo Sapiens
gacactcctccctaccttagaagaagacatacacaaacagaaataattcttttttatttttattttttgagtcgaagtctcactctgtcgcccagtggcggcatcgcagtggcgcgatctcggctcactgctacctccacctcctgggttcaagcgattctcctgcctcagcctcccgagtagctgggactacaggcgcgcgccaagacgccgccccgctaatttttgtatttttagtagagaccgggtttcaccgtgttggccaggatggtctctatctcttgaccttgtgatccgcctgcctcggcctcccaaagtgctgggattacaggcatgagccaccgcgcccggtccaacaggaataactctaagaagtttggggacaggagactaagaacccctaagaaaagtcgacgcggccgcgaatttagtagtagtaggcgg

SEQ ID NO: 239402 - DNA, 539 bp, Homo Sapiens
gaaacggaagagggtcaggaaagagaaggggcaagcttaagtgactcagaatccaagaagcaagtctcataggagagctgcgatcgaggttaccatacagtatccaatcgtctcaaccttcccatccatacttccatgctgtctttcctctgaatgcaaggaaaaccggttacacaaacgctgacaaaagaatgtcagacttgaatggaaattcggagcagtacccatctggtccatacagcgaactcccagtgagcaccacggcaatgtaactaattcatgtttccctcttggcagtgcgggaaaggcagcaaagagccaagttttgtatcttaacagttctttagttaagaggcacacgctattttgcattcttccctacttttgataatttttggctgcactagtaatgcatgagtatctgctcatttaaaaaactcaaactttttcagtgaaaagtatgcccttttcttcagaaagtcttaattaaaaaaaaaaatcattgcccagaccaacattttcaaaaaaaaaaaaaaaaa

SEQ ID NO: 239403 - DNA, 504 bp, Homo Sapiens
tcacaataatatacaaaaagtttcacttttaaataaatagcttgtagtggcatgaggtgactagaaatgcacttacatttccttttgcatattttaaggaacagagctaaaattcaatcaaagcatgagattaagagattaaatcacttttcatcttcaaagctgaaacaaaaagcttataatctcacaggccacacaaagcggtttctactgtggttcaaagagttcaactaacttaatttccaagcaaatatcatttttagttccttcagttcttcctaaaacgatggacagttgttttttttaatttatatgtgtttgtaaaccaattgtcttattaacatttactaaaaacaagtcgggagtaaaagctgtaatcacttatgggaattcaaagctctctggggaaatttcagttcaaattgaacctttaaacttacttttaaatactatacttaacaaaaatttatttataattaatgagaaaaaaaaagttggcggccg

SEQ ID NO: 239404 - DNA, 487 bp, Homo Sapiens
  misc_feature (44)..(44): n is a, c, g, or t
tgcgggcggcagcccgtgtggcacccttcccctttgaggacgtntacactggcctttgcatccgagccctgggcctggtgccccaggcccacccaggcttcctcacagcctggccagcagaccgcactgcggaccactgtgctttccgcaacctgctgctggtacggcccctgggcccccaggccagcattcggctctggaaacaactgcaagacccaaggctccagtgctgactctcattggggagggcggaggtgctgacctggccccggccctggcctgggcctctggggccggcccctggctcagcccctccttccaggtcttgatgggagggaggagggcccagaagctggacaacttaagccactccttggcctcccccagccaggggcctgggcaggaaagatggggtggtggactgtttttgcctactttttgtttttgaaaaacatgcactccccactctgaaaaaaaaaaaaaaaaa

SEQ ID NO: 239405 - DNA, 500 bp, Homo Sapiens
ttgctcgatacatccgagctgccctcagtgttccccaaggccgcgtgctggtacactgtgccatgggggtaagccgctctgccacacttgtcctggccttcctcatgatctgtgagaacatgacgctggtagaggccatccagacggtgcaggcccaccgcaatatctgccctaactcaggcttcctccggcagctccaggttctggacaaccgactggggcgggagacggggcggttctgatctggcaggcagccaggatccctgacccttggcccaaccccaccagcctggccctgggaacagcaggctctgctgtttctagtgaccctgagatgtaaacagcaagtgggggctgaggcagaggcagggatagctgggtggtgacctcttagcgggtggatttccctgacccaattcagagattctttatgcaaaagtgagttcagtccatctctataataaaatattcatcgtcataaagaaaaaaaaaaaaaaaaa

SEQ ID NO: 239406 - DNA, 579 bp, Homo Sapiens
cagacatttgcctggggtcacgcttacagtgggcagatgaactggatgtaaatacaggctgccctggaccattcctcagaactcatgggattttcgcgaccctcatcctcagtgaagttagatgaccattcctgcctttcatcccaccgattttcctaagtatctgttgcctgcaactaacactagttcctgtgtcagtaaagtactgcacttggttgcaaagaatagagatggactctgccaacataggcacggaaggtttacggggtggatggcatggctcacagatgtgatgagaaagccccggaagaagtgttgggcacagccttaggcacaacctttcctgggctcttcccatcactgaatgatccatgtatctccgggactctccttctagatccaaagtttagggcggcggaatcggactgctctggcctttgacacgtgcctgtgctttgcctgtcaacgctatggggagagagatgtcagcttacagaaaattgaggttctgtgattcagtttccctctgctctcttagaataaaagtgcttactcattgtttaaaaaaaaaaaaaaaaa

SEQ ID NO: 239407 - DNA, 483 bp, Homo Sapiens
agccagtcactggcaaagggtctagaataacctttagggcagtcaggtccactggagctgagagtagaagtggaggccacatgagggatatatggggacagaaaggatagtttttttaaaatcatggttctgataggaaaaacatgagcaacgcacaatatctattacatttgcctagaagcagaattttttgaggaactttaaaaaatgtacagatacctaggtcccaactttgtagactgattcaagagtgtttgggatttggtataggaacttaatagacctcacagggtgttctgatgcataatcagagctgagatcaactggagttgatgatagtgacttggattattagttttgtgattagtgcaaaacaaatgtttaatctgatcttgacttttcttgccacccagtatgtcagggtggtttttggtttttgaatgttacaaaataaatattttaatttaaaaaaaaaaaaaaaaa

SEQ ID NO: 239408 - DNA, 598 bp, Homo Sapiens
cacgcacactttctgaaatcacactatctggtggtttaatcatatttttaaagacagaatccctgagtgctgagcagattctcaaaacacatttagaatccctgaaattagaaagatcaatgacaaaatatctgtcagccaggccacaaacaggtgtaaaattatgaaaggagtggttggatgtgccaagtttggtaaagtggtgactgcatctgagaaagaggctgtgaggctgaactcttggtggcttccttctgtaacttccagagggagtcttcaacacaggccccgtgctcgtaggaatacggtagcacctatgtaggaagtgcctggagttttctgtcttctttctgtgtgatttttggcctttttatcagcacttctcccctcccaggagcctggggatgccaaacatccagaatgtgatgggacaagatgggggcaggggcctcacctccctgcagaggtccggccaggtctccttgtccctggacaatctcctgagctccctccactggttagcagtgtgttgtgttttccattcatttcagaagagctacattgtgtcactggacatttttaaaaacgtttgcggccg

SEQ ID NO: 239409 - DNA, 450 bp, Homo Sapiens
gctccttgacatttgtggacagggctctgggttcacctctgtcccagcatgtctgtcctgccactgagctggcaggcatttccgagggtgaagaaaaaagagagaagtggcaagagctggccctttataccacttccgatgttcctcccatgttactgggcatttttcaaacgttcatttcatttccaaatgtttagtgagggactcaattgctgccgcctcctggctttcagggcaggcaaggaagcggcagagatgtctgggcacacagtgtgaaggcagctttgctcaaacatgtcctagttgatcagttaattgatagtgattaaaaaccagccctgccttggggaattattactggttttgcgaagttctcaaaaacatcatcttcagtctctaactcccactccatctccccaccaaaaaaagagagagaaaaaaaaaaaaaaa

SEQ ID NO: 239410 - DNA, 667 bp, Homo Sapiens
cactcctgatgggggtctacattaatcttccagtactccttgctgatgctgtgttatgtgtcatctaacagaaatgactcttttgaaataagtaaatctttggctttttgttctgttggtgtgattcaaagcaaaacaaacaaacaaaaacaaattttaagaacacaacaaaaaagatttgacttccgaatagaatgttttctttaagaggcatgaaaagcaactattgttgtgttacagtgttaaaaatattcagttttctttgacaaaaatgtgtactgtgtaagccttgcaaacaaaaaacaacaaaaaagaagcagcagcagcagcctgctgtgtggcatctgaacttttataaaggtttccttgtgccaaataagtgcaaagatttaatttactattaaaaaccataagcatatgttatagttccagaagaattattttgtcatcaagtgattttgatctttagtgtcaatatttatatttagattaatttttataaatgaaaatattttaatggtttaagaaaatgaggacaacaggataatatctttgatgacttctgaaagttatgcttcccttcatgttatatgcacattgccaagaattactgtcaagagaaatgataagtaaaagtcatttatgaaattaaaaaaaaaaaaaaaaa

SEQ ID NO: 239411 - DNA, 504 bp, Homo Sapiens
cggcacgaggaaaatgctgcttttagagagcctggccttgagagaggaaggaaagactagttgcagttaccattctctggtgagctctgactggctttttacaaacagggcttctctttggttgaagtcagccactaagttcatctttaaacatgctatctcaaattccccgaagccacccaaaatgtggtatgaatgaggatagagttacacagaattcagactgctttgccctctcagaacttctagggaacttcccttggtgtttccttccctaacgagctcagccacttgtaaccagcttattgaaagggctgtgaatgtattatgttgattccttttctgttccaggttattatcttgggaataacccatgttttgttttgttttaccctcagtcgctcataactatttaaaacagtatctcactttcaagtacagatgctcctctacttatggggctatgtctcaataaactcacgtaagtaaaaaaaaaaaaaaaaa

SEQ ID NO: 239412 - DNA, 342 bp, Homo Sapiens
cggcacgagggcccgccccgtctgtacaatgggatgctcgggactcggacgggaggatccagtgactgcgagccccgcattcgcccgatcccagcctcacacccccagccagcccccagagaccctcccacacttacgaaggaaatgcatgcggccaggaggagaatccgcaccaggagggagctctacccaggaaaaagaagaaaaggacagattcatttggggttcagcctcatgccccccacacccaagactttgtggctaagagaatcaggccaccttgaggttcatcaagttcatcccattaaaacctcccaaaactctgaaaaaaaaaaaaaaaaa

SEQ ID NO: 239413 - DNA, 518 bp, Homo Sapiens
ttaaattaaaatgtgctatcactgtattgccaaagtatggcaatacagtatgcagtattatttcaatactttaagaggcatgtattacttcattgaacacataagcagctagcctcctttcctctgtaaataaggactttttggcatcctgatgttcctcgctgttcatttggtatcatcctggagttccatcaagactgaggattttctccatggccaataaactattgtcagcatcagctcacgtttggctgtatgacagggatatgtgagaagcccagaaataaatcacaaaaataataaggcatcttctgagtctctctgaagaagccagtgatccaaaatctaacttcatatctgagtgagtcttggtattcttgatttgcttgaagaggctgtgacatattacaaggtgtgtaatttcccaggcatatcacactgcttctgtttcatgaattgatcaaattgtccagaagtaaacatttacaagattgagatttgaaaaaaaaaaaaaaaaa

SEQ ID NO: 239414 - DNA, 556 bp, Homo Sapiens
ttcggcacgagggccccatcagcacttaagccacatgacacaaagtctgtaccgcacgggaaatgttcacgcgcctggccgtgtgcatggcctcccgggctgtgggcagccgcatctgtgaggtgactcgtgaaagtaggtgattcctttgcagaacttcagggactgggagcagaggcccctcactcaacgacgtttgtgcgacatagtattgtatccaccttagtattgtatcgagccttttctgtgttttaatgagaaagcagaacactagtttcctatttaagactttaagggtttgtggggcggggcgggattaacacaacatttggctttgttttctttttcctttgatttccacatcaggtgtgtgcgagtgtgtgtgtgtggagatgttaagagcctcacaaggaaactgggttattggaggccaaggcggcttacagttctctgcgttcgtcacttaattcctgaatgtttcagagaaacaggaatcagaaaatagcagatatcatgtaggaaagagaggttgaccaaagaaaaaaaaaaaaaaaaa

SEQ ID NO: 239415 - DNA, 580 bp, Homo Sapiens
gactcgctttctcaggtttcccagttcatggcgtgtgaggagctgcccccgggggccccagagcttccccaagaaggccccacacgacgcctctccctaccgggccagctgggggccctcacctcccagcccctgcacagacacggctcggacccgggcagttagtggggctgcccagtgtggacacgtggctcacccagggatcaaggcgctgctgggccgctccccttggaggccctgctcaggaggccctgaccgtggaaggggagaggaactcgaaagcacagctcctcccccagcccttgggaccatcttctcctgcagtcccctgggccccagtgagaggggcaggggcagggccggcagtaggtggggcctgtggtccccccactgccctgagggcattagctggtctaactgcccggaggcacccggccctgggccttaggcacctcaaggacttttctgctatttactgctcttactgttaaggataataattaaggatcatatgaataattaatgaagatgctgatgactatgaataataaataattatcctgaaaaaaaaaaaaaaaaa

SEQ ID NO: 239416 - DNA, 638 bp, Homo Sapiens
taattcagattttataatttcagcatagcagagtgagtatatgaattgatttggggatgacaaaaatccgattttgaatcccagcatatagcttaatattcaaccttctctatataattactctatatcagtttcaaatgggaaatataacagaatcttcctcataaggatttatagaaaaaaaatgagctgatgtatgtacagtctttaagatactagtataaatatatatatatatatatacaaacacatatgtaatataaatgtggttgtatgttgttaacttaattatccattaatgtgtagttttacaaacattattattacttctttttcttatgattttacaaccatgacatttcaacttttgatatgggcaactaacagtgacccatctgtcagtcagaagtcctcgtgggtccctctgtctgtctgctaaaagtcctcatgggtccgtctgtctgtgttctaaatgaagtacttcttttctggcctactgcaattttacaaattaccttgtagagattagatacatttgtcccctctagacagaggtaacacctgagtacagaccttaataaatggagtgtggtctgattgaatgaatatttccatgcaggcaaaaaaaaaaaaaaaaa

SEQ ID NO: 239417 - DNA, 541 bp, Homo Sapiens
cccccatcatcctttcctgtggctcctcaggcttcacctaaagaggaatgcagattccaggacagaatttggaaaatatgccatttactgccagcgttgtgtagaaagaacgcaacaaaatggtgacagagaagcaagaccctcaaggatggaaattctttcaactcttctccgaaacccttatcaccattctttgccctttagtatacctgtgcacttcatgaatgggatataccaggtagttggttttgacgcatctaccacagtggaagaatttttgaatactttgaaccaggacacaggaatgaggaaaccagcgcagtctggatttgcgttgttcactgacgatccttctggcagagatttagagcattgtcttcaaggaaacatcaaggtgaaaccaagtccttttcaggagccaagcccaacgaacagcaaagaagctactctttacaagaagagtaaactttgcaagaagtttaattcaggagttttccaaaactttaaccaatctaatctccacgataaaaaaaaaaaaaaa

SEQ ID NO: 239418 - DNA, 378 bp, Homo Sapiens
cggcacgaggatcagtacaacagaagcagcaacagcaacgggggcaacttgaacagccccccaggcccccacagcgccaagacagaggagcacaccaccatcctccgaccctcatacaccgggctttcttcttcttcagcgagattcctgagccgttctatccctgtaagtgcgcagacaccacctcctggtcctcagaaccctgaatgcaacttctgtgccttgccttcccagccgaggctgccaccaaagaaatttaatagtgccaaggaagccttctgagcgatgccttccctctgtgctgtgaaactgtctatgcactacattctgctagctcctcttcaagtaaacgccaagtcacaaaaaaaaaaaaaaaaa

SEQ ID NO: 239419 - DNA, 573 bp, Homo Sapiens
cagaaaagatggttattaaaatcggaggagaaagccaaacccctagatttacgggtgaatttgagtaagcaaggtaatttctaccactctggaaaggctctggaactgaaggttccaggtatttccttcaatggaatgaatggctgatggttggtctaagaagtcagagctttagattccctcccccatgctgcgggtcaacagcctgacagaaggttcagtctatggaggagtttggattggaaacaccagtcacaaggacagaatgaagcctgaatgaaagtctctattctgactggtgacccctggttcccttttccatgtgctctgagaatattgcaagcagggatagatatggcactacttcactccctcactgccactcctctcatccctacccatcagtttgttagattcctctctaaggaagtggattatccaagagaaatgacaataggtgttgacagttgaggatcccctaatgaaagagccatgtctgtgtctaatcactacaggcatatcgctacctggatgtctttgttcagcctgctatatgaaaaaaaaaaaaaaaaa

SEQ ID NO: 239420 - DNA, 476 bp, Homo Sapiens
gaccagaagcatttcagattttagacgtttttggattttggaatatttgtattatagttaacatttcagcatcactaatctgatatccgaaaatcactgttgatgattctagattagtgttttttcatgttttgtgcccaaaaacttcagagtttgtagcatttcacatttcagattttcagatcagggatactcaacttatgtctcttttctatggaagccctttctggaggtcctcgagttcaggccaggccctgtgcttttttgaggcagccctgccctccttcctaggcagctccagggtggtcagtgtcagccctgctgtccttcctttgcccagtcgtgggaagctggtcagattgaaaaagcaatgccagtcgggggtcatggcatagcagaccatattgtcagaaatctttggttgcaagggacagaaactcagttcagtctcacttaaggaaaaaaaaaaaaaaaaa

SEQ ID NO: 239421 - DNA, 464 bp, Homo Sapiens
accagagattttcctttgtttgaataatatacagatttgtgatatttcacagttgttcttgagaaggatttttataaatgttgaaatttgaattagagtgtatgactttttatcctttttgtctcacttttattttgaaaattatttctatcgcaagaatattaagtggatgaattgtaaagaaaaaatagttcaaagaagctaagaagtaagataaagtgtactactaaaacagacaattggaataataataatagtcttgtgctttttggaagacttattggtggagaagtgacaattcaaatgtcattatcagtaaatatcatatattgagaattttatgatgtcacttaaatactaaacaggaaattggaatcctctaagaatctactgttatggtacgtgtaaccattaactttctgctcaataaaataattgccaaaggttaaaaaaaaaaaaaaaaa

SEQ ID NO: 239422 - DNA, 600 bp, Homo Sapiens
aacccagaacttcatatggcagtccatttagatgaagaatgatgatataaaatctggttccttcttagcaaaataaaaaacaaacaagaaaaggtactaaatgatgttaattttcttactttatgatttagaagtccagttataatattaaaactctgtgacatagtttcttttaccaaaaccatgaacctactccccgtatcaggtattttcgatggtttagaagtactcaagtcacatcacattcaagttagaagttttttttttgttgttgttattttaaatttttaacaaatataaacaccagcagatactattacttgcttaaaaaattgggagggggcacttttcatagtcttggaatgctaagaagttttatttttaatattgtgacagaaagctttaagtatttaagagctctgtattatatttgatactcttacagttaaaaacttttcaaaattaatacattgttaattattgaccagttttgaagtttgggtttaactgtagttgaaatggaaggactcttgttttacacttgtattaaagataaatttattaaaataagttatttagcaccaaaaaaaaaaaaaaaaa

SEQ ID NO: 239423 - DNA, 499 bp, Homo Sapiens
atgcttgtatcagctttaaccagctgccctgtgttccatgtttctgggttggaatgagaaagctattagaacactggaagactgcaagccacatacaaatcatctttgttactgacacttgggggagtactttatagtggctgtcaagaccaatacaaaacatggtttgtgcctgaaaaagtcaagtgccattattcaaaaagaagatgttagtaatccaaataactgaacaacatccaggatcttcattgagtttagctgctatagacgcagatttattattgagtctgacttaagtaaattagcatgtaggtttgcattctagatttgatggaataacaaaggttaattacttgcaatgatctatgctggaataggagtaaaaggggagagctatatttagatttaatttcaccattcttaagggaatactatgtgaggggacgggattattatagggggcaaaggaaggagtgctaaggaaaaaaaaaaaaaaaaa

SEQ ID NO: 239424 - DNA, 481 bp, Homo Sapiens
agttctattttaaagtcacagtgggaattccttagtgaggagggataaaaagttcctgaataagacactgagaacatctagatttattattttctctattttacttcccaacttacagaataaactgtaaattaaagaataactccataggaaataaaagaggtcttacaaacttagtttacaaattccagctacagtagttggagttttacttgatctatgtatttctatgtaccctgtaactaagcttctagccatcttaagtgtaaaccacagatcatttactaaagaacatgattctcaacagttctaggaacagttataaatggtctaaaggtgttctacattttgaggccccaggatatccttttattttatatatctgcaaggtagcaaaggatagctatacaccttgacacggcagagatccagtgtaaaaaggtgcttcactagtttgttttgtcaaaaaaaaaaaaaaaaa

SEQ ID NO: 239425 - DNA, 1000 bp, Homo Sapiens
ttttttttttttttttttaagtcagagtcttgctctatggcccaggctggagtgcagtggcaccatctcggctcactgcacgctccgcctcccaggttcacgccattctcctgcctcagcctccggagtagctgggactacaggcgcctgccaccatgcccggctaattttttgtatttttagtagagacggggtttcaccgtgttagccaggatggtctcgatctcctgaccttgtgatccgcacacctcggcctcccaaagtgctaggatttacaggcgtgagccaccgcgcctggcccctcctctgaattcttacagcctcctccatctccactttcctacactgaggacatctaaaaatataatctagatcattgttacacaacgatcacttcccttgtttagtaatggctagcatctgcacaaccatccctgatttaaattcccctttacaacatctcagttaagcctcatgactgcagcgggcattctcaccacccccatttcagaactgggaggactggggctccaaggaaagtggctggcctgaggtcccagagccccttatgtgacacagctcgttctcagccaggcttcttagtcctggtctggtccagtctcctctcttcatgcctacaagtcttgatctaacccaaggcgggcatcacgtccctctttgccactccttcaatgtcagcccgggaatatggacaaaatgagcagctcattaattgactgtggggagataaagagggaaggggtaggggagtggaggttggaagccattccttcctccatctgaggttctagatggaaacacagctcaggaacatacctgggcttttccttatgtgcagagaggggtcagatgttttcagccatctctctagctttcatagactaggccaggaaaggacacaacgaatcaagtccatgaatcccgccatgaaggtacgtgggaagtgcccacattgctgtcagaatcagagaccttgacc

SEQ ID NO: 239426 - DNA, 580 bp, Homo Sapiens
tcttccttcactcacccagcaggtcagttttctgtgcaaacaaacctgtttaggattcttccaaatgttcttcctggggtctttgatatttgtttgttacatcctgctgaagttcgactgtgtttttattttttcatccaacttccatttttcactttttacatgattactcaatccttggggctgtccatgtcatctcttagatttcttaaaagacattttaatgtatggttaggttttatatttttattttttaaaaaagaaatagtcagtgttttcctcctttcaaccgagactatttctggattgtgtgctcctcgtcagttgacttgttttgcacacttttctttacttcatgtccccatcaacaaccgtcctgctccccacctcccccaggaaataaggggcctgctcctctccctactgtgaccctggaggctcttaagatgatgatggttttttttattgggctgagttcacgaattaggggcaggagctggaagtcgccctaggaacaccagatttcctggttctgttcaagttggcatttcttgtttggaataaaaaaaatcttggaaaa

SEQ ID NO: 239427 - DNA, 538 bp, Homo Sapiens
agagaggttcccaaacagttttaccataaccttagttcactgaatgttttgtggtagaaacactgactagtaagttcagtaacaatgcatggctcagattgtggaatatttctgatttaaatgtaatctgtagtacttcacacttcagatttttgaaccttttaacctacaatactgggcttcatttctgttatgccctaatctagtcatgctgaatatccatactgtataatggtagatgcaaaccatgtttactaaattagaactacatatgaattacagtttacttcaagtgttttgttttggtaatatagctttgccaccaagcttttacagttttccttgaatgtacagagactttttattctaataaccagattacagttatactatttctaaagctcagctcttattacatcaagtttcagtgatgtgttgaagtaggggaactttatatggcatttcaaaacattttcataatactggaattttatttattgtaaaatatttttgtctttaataaaataattttgaatga

SEQ ID NO: 239428 - DNA, 641 bp, Homo Sapiens
cggctctctggtagcagggtggtgtgatacggcagcgaggggccggaagaggtggtcggattctcgtagctgtgccggcccacaatgattctgagctaaaacacaaaataaaaccagattcattgccaccagcgctcacctcgcctgacttaaaaaaaaggttatgctcctttagatctgtaaactcagtctcctaactgcccttcatccactttctcatgcatctgaaatcctcatattttgtagaagcctgttctgtaagtctctctactttccagttcgtacaacagacactccttgacaccaaggatctttcacttaatccctcaaaaataaagactcgagctgggtgcggtggctcacgcctgtaattccagcactttgggaggccgaggcaggtggatcacgaagtcaggagttcaagaccagcctgcacaaggtggtgaaaccccgtctctactaaaaatacaaaaattagctgggcatggtggtgggtgcctgtaatcccagctactccagaggctgaggcagagaattgcttgaaccctggaggtggaggttgagatcgcgccactgcactccaccctgggcgacagagcaagactccgtctcaaaaataaataaataaaaataaataagta

SEQ ID NO: 239429 - DNA, 517 bp, Homo Sapiens
gggtgggggttctaggctgtaggtaaatttacatattttctggttgacaattagttgagtttgtctgaagacctgggattttatcatgcagatgaaacatccaggtagcaagcttcagagagaatagactgtgaatgttaatgccagagaggtataatgaagcatgtcccacctcccactttccatcatggcctgaaccctggaggaagaggaagtccattcagatagttgtggggggccttcgaattttcattttcatttacgttcttccccttctggccaagatttgccagaggcaacatcaaaaaccagcaaattttaattttgtcccacagcgttgctagggtggcatggctccccatctcgggtccatcctatacttccatgggactccctatggctgaaggccttatgagtcaaaggacttatagccaattgattgttctaggccaggtaagaatggatatggacatgcatttattacctcttaaaattattattttaagtaaaagccaat

SEQ ID NO: 239430 - DNA, 421 bp, Homo Sapiens
ggactacacagtcaattcagaaatttgaattttcatccatacctccgttattcttactctactcgctcaacaacaggttctgataatgttacttctgccatttctgtttgtctttatttccagttccacaaccctgcttaggctattgtcattcgtggaacaaatatttattggacagattcccatgtgcaaggctctgttttaggtattaagagtcttgctctcttgatccttacattcttatgaaaataattttgattcttgtcagatttttaaccagctgtctttcttgttttagatgaaaactactccaatcaacttcttcaatctgttctgccacattttagccagagtaattgaaaaacaaaattcccattgctctctctttaatcattacccgccatcgttagaatgaagttta

SEQ ID NO: 239431 - DNA, 501 bp, Homo Sapiens
aagaattcatcttctcacagcactgcctcagctggtgtttcaaatgtttcttttggatatgttgtgcacacctgacctgctgccaaggcagaagcctgctatgccttcacgtaattctgctctactgccctgttcctttctttctccctgccttactgtctctccctaagaagaatgatctctcccatcatgctgtaccttcatttgacttcctatcaccaatatctgctgcagtcgatcctccgtgcttttcctaaaatagtcttttttggcccaaaactgtggccatgctaattcttttctatgtccttccagtggcttatatttacatcatggaccaatatagtcattctttattctgaagcctctcaccagcataacttactttctgtgcaagctctggatccttctgctttgagatatgttttcaaattattttctcctcattaagactctgctttttgaaacttctcagaaaaaaaaaaaaaaagggcggccgct

SEQ ID NO: 239432 - DNA, 462 bp, Homo Sapiens
  misc_feature (12)..(12): n is a, c, g, or t
aacttaatgatnttttcccctgtgtatgaaatatgatgctacttgggttcactttagagcttgcatttatttatgtatttattattttagctttagcttgtaattttccagtgatagaaattaccaaaatttgtgtgtgtcaatatgtttttgtatattttattaagtatatttttaggtagctaggtgaatggcagcataaattttctctttaataattattttatattgttcaaaactacttggctaatgagtatttttgctctagcatggaattctggaggagaaggttgcaatgtgatcagtatagacagtgtcttaatcttgagtttaaaagagaagaaagaaaaatacccattcaagtgaagatgataccaagcagtaggatgttgccagtgctgctgtacttatcaaaaagtgtttttaaaaactctttgtttattgtgtgcagctgaggagaaa

SEQ ID NO: 239433 - DNA, 633 bp, Homo Sapiens
tgtggagtgagaggctcagtctgaatattcttggagaaagatgctgagtggcattgcagccttcatatttgggctaatcttcattctggtgggaatcgtcatccagctaagggctcagaaaggatatgtgaggacgcagatgtctggtaatgaggtctcaagagctgttctgctccctcagtcatgctaaggtcctcactgaagcttctctctctggagcctgaagtagtgatgagtagtctgggccctgggtgaggtaaaggacattcatgaggtcaatgttctgggaataactctcttccctgatccttggaggagcccgaactgattctggagctctgtgttctgagatcatgcatctcccacccatctgcccttctcccttctacgtgtacatcattaatccccattgccaagggcattgtccagaaactcccctgagaccttactccttccagtcccaaatcatttatttttctgtggtccagccctactcctataagtcatgatctccaaagctttctgtcttccaactgcagtctccacagtcttcagaagacaaatgctcaggtagtcactgtttccttttcactgtttttaaaaaccttttattgtcaaataaaatggagatac

SEQ ID NO: 239434 - DNA, 471 bp, Homo Sapiens
atattttgagattcagtaagaaatattttaatggtggcaggccctggtccccttcattctgtcagactgcccagatactgcttccttcttgtccgttttgtttaaactttccattcatatttttttcttcctgaaatgtttctttattttgaggaatgcccccaaagcttataacctgtcagtgtgcattattttaccatgaaggtcaaatgctttattttctacctttctcttccccatcctattatcccttagcattgaaaacatttttataggactatttttgttattgtttcccagtggtttttgaggaataatggacctgtttgaggaaatgtgtgttgcctgatctctagaaaaatgtggttacctaagacattttgcatgtgatttggatatgatttcaggggcttatggacccactaagtcccatccatggactcctggttaatggcctaaatgaaaaaaaaa

SEQ ID NO: 239435 - DNA, 385 bp, Homo Sapiens
tttctccaggaggacagcaagaagtctctggtttttaaatggttaatctccgcaggtcactaccagccaccgagaccaacagagtcatttaaggctgcaagcagtatttacaacagagggtacaagttctatctgaaaaaaaaaggagggactatggcatcaaacagcctcttcagcacagtgacaccatgtcagcaaaacttcttttggggtgaggaactgaagtccagaggggtttcttgaactgcccaaggacacactactatttagtgatacaagctgggactaaaactgaggtcccccgacacctggtccagagttctttctactatacatcaaagaatatacaaataaaagtttatcataactaacccaaaaaaaaaaa

SEQ ID NO: 239436 - DNA, 512 bp, Homo Sapiens
ggttgctttttgtctcaatctagataatccattcaataagaagtaaattaattatccttaaccaatggtgggctgagaacaacccctcaaaatagatattttttatgttaaatggggagaaatatctatactttatgttatactggataaaaatgtgttttaagtctaaaaaaaaccagacgagctaaactttgcctagtgtgtctacaaccattttttaggagacgcaggaataccagggcataataagatcagattggtgtaattttgtatgtttttgaaatccttcattaattgtagaaccttgatatgattagaaacaaactgtatttcaacaaacaggtttcagtatttgcacactgaaaaagtgttttgtattttaactataaatatttcacgtatctgtatagaccatctagaaatgtagaggtcttacagcattagaacgaaggaagtttacatgtgctctatctatttttctgagcctcttttaataacgcttgcaagaaggc

SEQ ID NO: 239437 - DNA, 640 bp, Homo Sapiens
tattttaaaattgaaatttggtcacagggtatagtcagatttttataaggtttgggtttgacaacctttaaaagcaaggtttacctcgctaatacttcttaataacatgcatcaaatgatattccctatggtgaagtatattctcaaagttatgttatctttcatttttggcatttggtgcttatggacttagtacccaggcaacaaagatctattatgcacctactctcttgtatgttcgctattatttcccaaaaaaaaaaaggggcatatatgcataagaaataaatattagaattattttgtttctcccacaaagcccatgggagatggcccaacaaatgtttaaaaagtaaaagaagctgggcacggtggctcccacctgtaacccccacactttgggaggccatggcgggtggatcacgaggtcaggagtttgagaccagcctggccaacacagtgaaactgtgtctctactataaatacaaaaattagccaggcatggtggcaggcacctatagtcccagctactcaggaggctgaggcaggagaatcgcttgaacccaggaggcagaggttgcggtgagccaagatcatgccactgccctccagcctgggtgacagagcgagactgtctcca

SEQ ID NO: 239438 - DNA, 457 bp, Homo Sapiens
aaggtgggtagatcacgagatcaagagatcaagaccatagtgaccaacatagtgaaaccccatctctactgaaagtacaaaaattagctgggtgtgttggcacatgcctgtagtcccagctacttgagaggctgaggcaagagaattgtttgaacccgggaggcagaggttgcagtgtggtgagatcatgccactacactccagcctggcgacagagcgagacttggtttcaaaaaaaaaaaaaaaaaaaacttcagtaagtacgtgttatttttttcaataaaattctattacagtatgtcatgtttgctgtagtgctcatatttattgttgtttttgttttagtactcacttgtttcataatatcaagattactaaaaatgggggaaaagacttctaatctttttttcataatatctttgacacatattacagaagaaataaatttcttactttt

SEQ ID NO: 239439 - DNA, 420 bp, Homo Sapiens
  misc_feature (10)..(10): n is a, c, g, or t
  misc_feature (27)..(27): n is a, c, g, or t
  misc_feature (38)..(38): n is a, c, g, or t
  misc_feature (44)..(44): n is a, c, g, or t
  misc_feature (62)..(62): n is a, c, g, or t
  misc_feature (74)..(74): n is a, c, g, or t
  misc_feature (108)..(108): n is a, c, g, or t
ctaagccttnaaaaatatggaaaaagnggccctccctnggaccngccacaccagtgtgagtnagagttttaganttccctccagtgttttatccaatccaaaaaagtnataaaacctcaaaaaatattgaagaagtggggtttatgtatataacatacgagaatcctgttccacagggcctaggtcctttgcctagtattcctcttactagattccttaatacttggtaagaaaagaacctaagttgtaacaaatgcactctgataatatatattttatagaataaatatacattatactctgttggaattaataataatagatacaagcaataattaaaaactacagtgctagagttcctacacttgcttctaacaaactaaaagttgagctaaaattggtccattctattaatgcata

SEQ ID NO: 239440 - DNA, 521 bp, Homo Sapiens
agtgctcccttgttcctccaacaccttcaacaccaccacaaagtgaagaagatgaggctgtagacaaaaagccaactctactcagtgcccaggaagatactcctgaccttctccatgaggacagattacagtatctgcaggaagagggttccggtgtgatgcatcaggaatgtcagatccagtcctgtgagctctcggtggttcagaagcccaggccctcttctcctgcagtgacatccttggcatcaccaccactctgctttggcagtttcctaagctgtgtctgccagaccttctcaaggtctaggaagcagaagcctcccagaagaaagggtaacaaccaggctgaggcaggaggtgatgctgaggtcctgagacctggcccggcaaaaccagagttgagcctcagcaaaacgtgtagccacttgaaattgatagagctttcctttgtgtttagttttatagtactctctgtatgtcattgttcctcttagttgagtttttgcctgtcaaagagatag

SEQ ID NO: 239441 - DNA, 897 bp, Homo Sapiens
agtaactgggactacaggtgtgtaccactacatccagctaaaggagagcgttttttctttttctttttgagacagagtctcactctggcgcctggtcactgtgcccttcaccttctgggttcaagtgattctcctgcctcagcctccctagtagctgggattacaggcatgcaccaccatacccagctaatttctgtatttttagtagagatggagtttcaccatgttggccaggctggtctcgaactcctgacctcaggtgatccacctgcctcggcctcccaaagtgctaggattacaggcgtgagccaccatgcccagctgggagcgttctttcagcaaaaagtctaattcagagactcaccttccatcctggcactaaacaatagtactagaggtaagatctgccaagaatttctctcacttaagcaggatacttactttaaatataattaggcaagacttatttgagtacttgcctaattgtatttaattagaactatgctggatgctgtagacagaagaaataaaatactcaacttggtccctatcttccagcaggttagaggcctttagggaagaaaagcctgtgtgcagggaaagagaacctcaccagaaagtattcaataaaatgccaaagtgatcttacagaacagtgcctgtgacaccggaggggattgttctgtctttgtgagtgaacatacaatgatggggataactggtcctcataccatgcaggtcccatttctgatcaccccactggcaggacaattcacagttcttgagcaaactgagttagggagggtatgctaacgacagaacctatgcaagttcttagaaatattttttgtttgctgaaataaagctcaatcaacacactacctaaaaaaaatcccg

SEQ ID NO: 239442 - DNA, 821 bp, Homo Sapiens
acttcagttctgaataaaaaatgaaacctttcacactttgttaataggctgatctgaacattgaatactaataaatgatatccacattattttggctatttaaatacttcttactgggagcctagtataagctaggatattttcttcccctacacacccaatatcatcatgcctgtgccatagaaaaggaaatgtacctatcaagcctcttcttattcttcatgaataactcaaaatcatgcctcattttattttgctctataattggacctgaattttttgacatattgttgatttgtctttcttttttcttgactaaataatcttctcaagcatcccagctcttcaatgatactatctatggcactgaatgcacattcttcccagaaagcccgagacagtatgctctcatctgaaattagtctgctggatagctgtcactctagggtgagatacccttttggctgtcactctagaatgagacatcctaagtaaggtccactgttttatggatcccatttcttcttctttcctggttttcatcctcattttgctggagaatttcctcaagatacttcctcagtaagggtgcaaaggagactttctgaaaatttgcctgacagaaaatgtcttcactttgatgttcttcttgacagtctgccttactatgaaattctaggtacaaaaattttccttaagctctgaagatgttgatccattgacttctggcattcagtgttgctgatgacaaatctgttagcagtctatttctcatccatttttgtgttgagctaatcgtgatgacctcaatcccgggattc

SEQ ID NO: 239443 - DNA, 735 bp, Homo Sapiens
cagtctcaaaggttaagccaccagtcaccaccgaggcacccctcaggcctggtggccactgtccactattacgtagacagaccccaccctcacccaggccagctgtgggccagtcccgccctgcaatctggtctgctgccttcctcttccatgttggtccccttggccactgtctctgggcatgcaagccagtgtcctggttcagtgcctcggccagagctggggcaggagaggggcctctgggtgagagctgggggtgtctctgcagggtactggcagccttgccacactgtcctcattcccagatggaaagacctgagtgcctctcgccttcctccgggaatgaattcctcatgaaaatgaccaggccacttcttccgagggccaggccgccccctccccgagacctgtcctgccgtccgcgggtgtgtggcctgtaggggactgagagctgggcttgctgggcacctctggaatctgaccctgtgggccaaagaagcaccactgtagtttctgcagacccccatgcggttcattgtgcattgtttggtttctaggatgtatgtgttgctagttttttttaatgaaaccctggattaatgtaaatagctttttggggaacggattctaatgtcacgtatgtgaccgtgtggactatttcaaggtgctgatgcaacactaataaacctggaggggccggaaaaaaaaaaaaaaaaaaaaaaaatcccggaattc

SEQ ID NO: 239444 - DNA, 738 bp, Homo Sapiens
taacaaaaaaagcatttagggtcaaaagacatccaacatacattgtaacaatgcacacatattaattaaaaaaaagacccatgaaataatttttaaaaaactttcaaaaggaaaaaactattttggcttccttctgctgaaattcgcctataaacataccacgccagctagaccagcattccctttcacgtggtctgtacaacatagtactgcacaatgtgagcaattactttgatgaacacattgtttttgaataaaattgttggttctgtatggatgatccagacataaatccatggttccatttcacaaaaatattcataggctggaagagcagtgacaaccattttccaaaatcttcagttttaacaaaaggcgcagaataaactactaaatctagatgttttcacattattttgcatgagtgtcaaatactatgtaaaaattaacgtaaaatcttaagttggccaaaactagtgtctctaaagatcaaaattcttcactcttttagcatggctgataaatcttttctgcctttgtcactaatgcttgtcaaaccaaagaactttgcaaaagaatatgcactgctgaaggaagacagtaccaaaaataccatattgaacttcggtcttaagacacacacagttcctgttggatactggactgtgaaagtttattatcttcagtcttttcatgtcctggagcatggcaagtagtcttccgcttaaataaccgaag

SEQ ID NO: 239445 - DNA, 708 bp, Homo Sapiens
cttgactttattgtgtctgcttaaagtatctacagtaacctgtatcaacttagtcagtgtattaatactaaatttagctccttcaaagcagttggaactatgtgctacataaatttcagcttcacacaaggaagggaaggagtgaaattagtgaacaggcagttacagcaaaagaaaaaacataaaaattgaatagctggctctggtgaaatgagcaaggactttagagtcaaactggcctggatttgaatcctgatcctcattgcttgtagctgtatgatctggacaaatgacagtaactgtttctaaccttgattttctcatctgtaagatgccaattgtaactcctaaggatactgaggattttttaaaatgcgtgtacagttcctgaccagtggtttgtgcctaataacttattacaaattattacccagtaaaaaccttgagacaagagtgaaaacgtaaagctaattaatccattacttgttagcaagcaaactacgtgcttgagaaaattactcaactttcatgttttacttccagacagtagtttgattaaaagaaaaaaaaaaatcacagcccaggcatgtggctcacaccctggcacttggaggccgaggtgggagcatagcttgagcctagcagtttgaaactagcctgggcaacatagatcctatttttacaaaaaaaaaaaaaaaaaaaaaaaaa

SEQ ID NO: 239446 - DNA, 824 bp, Homo Sapiens
caagtgagaatgggccaaatgggattagtgctgaggtcatggacacttacgttaaaagctgtgctggatattgcgtgatcacctatatacttggagttggagacaggcacctggataaccttttgctaacaaaaacaggcaaactcttccacatagactttggatatattttgggtcgggatccaaagcctcttcctccaccaatgaagctgaataaagaaatggtagaaggaatggggggcacacagagtgagcagtaccaagagttccgtaaacagtgttacacggctttcctccacctgcgaaggtattctaatctgattttgaacttgttttccttgatggttgatgcaaacattccagatattgcacttgaaccagataaaactgtgaaaaaggttcaggataaattccgcttagacctgtcggatgaagaggctgtgcattacatgcagagtctgattgatgagagtgtccatgctctttttgctgcagtggtggaacagattcacaagtttgcccagtactggagaaaatgaaactgggattgacccatcaagatgcttggctcaataagaaaaccacgttaggagcaacctttgtatattggagacttcagagtaaccagcaaggaagagaaatcttaatcttcaagttaccatattttccaaatattacatggtacctgagttctgcttccttggatgtcattgcttaaatatagtcttgaagggcttgttttgaaatattgtatatattttttcaaatgtatacattgttaataaattaagaaatgggaaaaaaaaaaaaaaaaaaaaaaaaag

SEQ ID NO: 239447 - DNA, 780 bp, Homo Sapiens
tttttttttttaatcattaccccaatagcctttcacctctggagagctggattcaatgcctgttaagatacaagtgaaaatgagtttggtggtctcatcctaaccctatcggacaagttattccttatacagaaaagccccaaaaacgaaacaaaataaaaacaaaaacaaaaacaaaaaaaacactacacaatttggcacaaatggatggtctctacccaagcctgtgaattgctggtggagagaaagggggtgctgatcagatcaagggggcagcagtcaggatgggctcaaagaaatatcagcctaccctttgcctgacaagcatccccaaacctcacccccaaaccttccagggctttttttttcttttagaataactgaccccaaatgaaaaccacgttaacaaacacattacctccttgggcttagccatagtagacaggcaagtttaaaccagcaggatgctggataacgaagtttgttttaaacagatgtcaagctgagaccttgggactggcctctctcttgcactacaccttacagaaataaacactgaggtatccataccactgaatccggtgttgccatgcgtcatgggaaaatgagactgttgcattgccaactggtgcagcttggtcaaatctggctgtggaatggcatactgtccttgaatggtataggcctctagaggtggtccctccaggtcagggttgaggcacatggacggggtggtgtggggaaagctcgcactgtcgctgcctgtgctgtactgtcctg

SEQ ID NO: 239448 - DNA, 818 bp, Homo Sapiens
gggtagggaagaaaactatcctgcgggttttaatttatttcatccagtttgttctccgggtgtggcctcagccctcagaacaatccgattcacgtagggaaatgttaaggacttctgcagctatgcgcaatgtggcattggggggccgggcaggtcctgcccatgtgtcccctcactctgtcagccagccgccctgggctgtctgtcaccagctatctgtcatctctctggggccctgggcctcagttcaacctggtggcaccagatgcaacctcactatggtatgctggccagcaccctctcctgggggtggcaggcacacagcagccccccagcactaaggccgtgtctctgaggacgtcatcggaggctgggcccctgggatgggaccagggatgggggatgggccagggtttacccagtgggacagaggagcaaggtttaaatttgttattgtgtattatgttgttcaaatgcattttgggggtttttaatctttgtgacaggaaagccctcccccttccccttctgtgtcacagttcttggtgactgtcccaccgggagcctccccctcagatgatctctccacggtagcacttgaccttttcgacgcttaacctttccgctgtcgccccaggccctccctgactccctgtgggggtggccatccctgggcccctccacgcctcctggccagacgctgccgctgccgctgcaccacggcgtttttttacaacattcaactttagtatttttactattataatataatatggaaccttccctccaaattcttcaataaaagttgctttcaaaaa

SEQ ID NO: 239449 - DNA, 782 bp, Homo Sapiens
tgacccagtgagcagctggaagaaagaggcatttagcagaggaggagaaagatgatagccccgtacagaacctgtcagactgagcctatgatgaatgaggttttttagagcaagatcaccctcaaaaccagcttgtggaatgggggctaccctttttaatagcaaattctaagaattcatatatcaatgtccttccagattaaaaaaatggtattttattataacttttaaaattgcggaacatcagactgaatatcatcagacacatacacaaaaccactcatctctaaagtcattttctataccctctcaaaatttggccagtgagttttgcctcagggaattttccagttcaaccccatacaccaacatggaataaatggaaacactagccttttggttttgcccacagttccaaagtgctattacaggtggaatatctgctgcaggaggtcattcttgctgctgtgggtgtgagtaaaatgcttagttccttctaaaatcataattgcaatatggacttctgcttcacgctgcatcctaaggcacaaatcaggtaacctacatctcccaaatgatcaacagagcactccatcctattttaccctcaatgctgagaaattactcctgggcccagaagttgtcacataggtggcttgggttacttggtgctcaggcaacaactgccacaggccccagcttgatgaacaccatcaatttctttaaatatgttgatactaagatggaggcctctgctcagaggaagcaaggacgtaaacgct

SEQ ID NO: 239450 - DNA, 724 bp, Homo Sapiens
atcaccaatgcttgctttgagccagccaaccagatggtgaaatgtgaccctcgccatggtaaatacatggcttgctgcctgttgtaccgtggtgacgtggttcccaaagatgtcaatgctgccattgccaccatcaagaccaagcgtaccatccagtttgtggattggtgccccactggcttcaaggttggcatcaactaccagcctcccactgtggtgcctggtggagacctggccaaggtacagagagctgtgtgcatgctgagcaacaccacagccattgctgaggcctgggctcgcctggaccacaagtttgacctgatgtatgccaaacgtgcctttgttcactggtacgttggggaggggatggaggaaggtgagttttcagaggcccgtgaggacatggctgcccttgagaaggattatgaggaggttggtgtggattctgttgaaggagagggtgaggaagaaggagaggaatactaaagttaaaacgtcacaaaggtgctgcttttacagggaagcttattctgttttaaacattgaaaagttgtggtctgatcagttaatttgtatgtagcagtgtatgctctcatatacaattactgacctatgctctaaaacatgaatgctttgttacagacccaagctgtccatttctgtgatgggttttgaataaagtattcccctgtcttaaaaaaaaaaaaaaaaaaaaaaaaaaaag

SEQ ID NO: 239451 - DNA, 755 bp, Homo Sapiens
taaaatgagggagacagacaggaagttaaactatgcagttacactgccgatttagaaagatgttaagacacacactagatacaaatgaaacccatcctgctcccttcctccagaagacgttgtaatgcagaaagccaaaatactacatccttcttgtagtcagcactgttagtattcaacactttaatatttatggtgtatcacataaaaaacaaagtcatatacttttgcattaatcaaaaaatagcaaatccatataatggcaaaatcaggaaaaaaattctagtatttccacaaaatacataatgtcttacagatgattatgtgaactttaaatgtctgcagccctacagagcttttgttgccaattgaaaaacaaaaaaatcccaacacaggatgttcaaaaagcctaattcataaaaagacaatttattccatgtttaatatagtgttttttaggatggtaacataagtcatgcaacagctctgtaaaacaaaacaaaacaagaaactacgatgtcggctgcgggttaaataaaaagaaaaccacacatacaaaaaagaatgtaaggaatggttagtggtgctgccaattaaaaaaaaaactgtaaatcatcttaccacccaaaagtgatatggaaaactgtttgaatctgagcatggacatggttgtagtcatcttttggaattataagtgaaagtgataggtaactccttgtgttccatttctcagagtagattgcatcccggaattc

SEQ ID NO: 239452 - DNA, 843 bp, Homo Sapiens
gtacatgggattcagtgaagtgctgtttataactgtgaaaagatgtaaatagtcaaaatatccaatagaagattaaatgaattatgattgagtcatacagcagaataataaaccaataaaaatgatgcagaagactatgcatgacctggaaaagatgttcccaatatattgttaagtgaaaaaagcaggttacaaaatggtatgcacaatatgagcccatttttataaaaatatacatatttagcaaagtaaaaggacaaatgatatttatcaaaatattaacattggttctttcaacatagtaggatgactgttgattttgcttaactactcccccattttttcctatttgaatttactacaatgaagtttgttttttaaatggagagtaggagatgaggacattattaacctctgattagcccacatatactcctaaaggctccttctggcaaagtaaatgtttctgttcagcctatatctgggaaattgcttctaccttataaatttgagtgtccttcaaagatgatattcactccaacttccttttaggcaaactatacaatagcaatttttgatattaaaaacttaaaaaagaaatccctcaagttaattaacaccaaaaagaatagatgagaaaatacaaatcctcacttttcaaaaagaaacaatccaagtacatactactaaattatacaaagttacattatttacgtttagtttattgcagagatgaagacagcatactagaagttggcttctatttcacaccgttcacagcactcactctgttctccatttcatccactcacccatgcaaaaggtctgtacacgcaatgatgt

SEQ ID NO: 239453 - DNA, 611 bp, Homo Sapiens
ctgggcaggtagcagtccctggcctctccccctggctgatcactctccctcaggcagtggagatctgcgtctggacaccctcagatcctgtcattgcctgcccagagtccttcaggggcacccctctgccttggtgtgcggtccagggctctcacccaggtgccgcaccctctggggtcttctgtccagctcccttgccccatgtgctgtcactgactctccttgggactcgcctgcctgctcagagccctgcagggcttggtcagctgcctgttcagtgtcaacacttccctgcacatcttaaaactgggctttattttcgctgaaggaactgtgttgggacccttgacatctgtcaggtttgcacatgctgtttttttttctcagcccacgtgttctcccccacgtggggtagcagcaggacagacagtgaatcacagagtctgccctgagcagaggctgctgtccctgggactcctagccatggtcagactgtacaaaacggttttccagaaatgaaatgtaaatccatttttatactgaaaatgttactgaaagtcacttttatgagcatctgccttaataaacagacattgattcccttaaaaaaa

SEQ ID NO: 239454 - DNA, 777 bp, Homo Sapiens
cgggcgtgcagcagtggggagctggagaagtgcggctgtgacaggacagtgcatggggtcagcccacagggcttccagtggtcaggatgctctgacaacatcgcctacggtgtggccttctcacagtcgtttgtggatgtgcgggagagaagcaagggggcctcgtccagcagagccctcatgaacctccacaacaatgaggccggcaggaaggccatcctgacacacatgcgggtggaatgcaagtgccacggggtgtcaggctcctgtgaggtaaagacgtgctggcgagccgtgccgcccttccgccaggtgggtcacgcactgaaggagaagtttgatggtgccactgaggtggagccacgccgcgtgggctcctccagggcactggtgccacgcaacgcacagttcaagccgcacacagatgaggacctggtgtacttggagcctagccccgacttctgtgagcaggacatgcgcagcggcgtgctgggcacgaggggccgcacatgcaacaagacgtccaaggccatcgacggctgtgagctgctgtgctgtggccgcggcttccacacggcgcaggtggagctggctgaacgctgcagctgcaaattccactggtgctgcttcgtcaagtgccggcagtgccagcggctcgtggagttgcacacgtgccgatgaccgcctgcctagccctgcgccggcaaccacctagtggcccagggaaggccgataatttaaacagtctcccaccacctaaaaaaaaaaaaaaaaaaa

SEQ ID NO: 239455 - DNA, 735 bp, Homo Sapiens
  misc_feature (721)..(721): n is a, c, g, or t
tgggagccataacaataaatctggaagtacggggagaacatatcaaaaaggggaaggatggattcccttgatgcccaggattacagggcacctaaagcacatttttttttttctgagccaaccagctaaaggatcactgcagctaaatacagatagagaagcaacaaagccaggcaaatacccatcagagacagtgacaagagcagctgggggcacgggggaggcggaaggaagagaaagaaggggaggagcctccagagtcccagccccaaccccctctgccattggctacccttgctccccaaaaatccctggggttgaagtgaggaggactacaggctggggtgaaaatacacaaggacagcccaacaaaatacaacaaggactagcatcagtctcccccttactccacccccaagaaaaatacccttattgtgactagtatttatgaaaatctgtaagagactattctatgtagtggctctaatcccatatacacagcagctgcctgtgttgggaacttttcaaatcagtgattgcgggaacaaacagtattttcagcttcttacggtgccatgcaggctttaccaagaccttggttaagtcccagtcacatttactttctgtcttacatctagaaaagggtgaggaaagaggggaggggagaaaggtgctcaggtgctaggtaaagcttactgatcagcagcctagactccaccantgtccttcatcccg

SEQ ID NO: 239456 - DNA, 846 bp, Homo Sapiens
tttctgattcctttatttctttgtttatgttttccttttgacatttgagtataatgaagacagttgttttaaagtctttgtctggtaagtttgatgtctgggtttctttagggatattttctgtcactttattttgttcctttgaatgagccacactttcccattctttgtatgccttgtaacgttttttgaaaactggacattctaataattataattactatgtggttactctgtaaatcagacctccccctacaaacacagtgatgttttgtggttttaaattttctttacttattatattgttaaggatttttttttttagtgaaattttccaaagtgatttacaaaactgtttggtttataaggtgtggtcaccgaagtctttttgtttccttaacaaatgttaagctaatgttttgacagtgattttctggtatgtcaggagccaatcaaacaggcaaatacaagaaaaacaaaaagaaaagcaagtaatcattgtccagcaaaatatgtctgtaggccatgcagactggctttgtgctgggttctttaaagccggcacaaagtgtgtgttcactcttgcactgagtgaagttcaagttcactcttgcacagagcttgcactgaggggagggatcggccaaggtaaaagtgtagggtcttcttatgacatttgtcagcatgtggcttaacctatgaatacgtgtgactttgtagactctcccatgtacgtgaatgaggcatgcgccaccacgcccagctaattttttcgtgtttttagtagagacgaggtttctccatgttgatcaggctggtctcaaactcccgacctcagggatcccg

SEQ ID NO: 239457 - DNA, 607 bp, Homo Sapiens
ggagtaaaacagaaataatctattgttcctgagtttgattgtgggaaaatcacttaagataggtcatgtttataacaccagtttcagggacaggtaaatccagtaatttaatttttatatatcttacattaaaatgaacacacaaatacatttctccctcaatctccatgtcagacaaatggaagtgaagtacttggcctagaaaagaataacctgcaagtgccctaataatgttggtattcctagtattaataagttagatttgttttttttgctatttatagtgatgtgtctttttttttttttttttttcccgagacagtgtctggctctgtcacccaggctggactgcagtggcacagtctcagctcactgcaacctctgcctcctgggttaaagccaacctcccacctcagcctcctggggagctgggagtacaggaacacaccaccataaacaggcaaatttttgtatttttttgtaccgacagggtttcaccatgttgcccaggctggtctcgaactcccaggatcaagtgatgctcccactttggcctcccaaagtgcttggattacaggtgtgagccaccatgccatcccggaattcc

SEQ ID NO: 239458 - DNA, 822 bp, Homo Sapiens
tgcaagcaaaggtgagcgccctagaccttgcagttttggatcaagtggaggctcggctacagagtgtcctgggaaaggtgaacgagattgccaagcataaagcctctgtagaagatgcagatacacaaagcaaggtgcaccagctatatgaaactatacagcgctggagccccattgcctccaccctccctgagctggtgcagagacttgtcaccatcaagcagctgcacgagcaagccatgcagtttggtcagctcctgacacacttggataccacccagcagatgattgctaattccttgaaggacaataccaccctcttgacccaggtgcagacaaccatgcgtgaaaacctggccacagttgaggggaactttgccagcattgatgaacggatgaagaagctgggaaagtgagcacatttgggagctggagaacaggggttatccctacccctgtgaactctgttaacagcttacatagggtttcccctttactataactctagcatccccatcccatttgacactgggggcaagggttcttcttgcatgtggggtttatacccctcccctgatgaatacagagtggtagctaggggttggttatcatcagaaggtggtctcccctcaggcctgggggataaggacgtgggcccagccacatgccaactcatgtccaatactgctttgcctggtgtggggaaggattgggtcttgtcccccaacacagcttctgtggctgactgtaatactgtacaactgtttctgaccattaaatgctgttgtacttgaaaaaaaaaaaaaaaaaaaaaaaaaaaag

SEQ ID NO: 239459 - DNA, 710 bp, Homo Sapiens
cactactgccagcccactgtggatgtcagccaggccgacttccccctggagtccttccactgcacctcgccccgcaagatggcctttgccaagatggacccaagctgtaccgtgggcttctatgctggagacaggaaggagtttgagacactctgctcagagctgaccagggtcctcagctcctcctcagccacagagcggtaccccatgttcaccctggccgagggccatgctcaggaccacagcctggacgacctctgctcccagctcgcccagcccacactccggctccctcgcacagggcggctcctcagggccaaacgccccagctctgaggactttgtgtttttataaagggaggggatgaggggaaagatacaacactatttatttttttatttatgtcatgtcgggtgtgggatcttgagctctggcagtgatgatggtacttcctgttgtcagcccctcaagcccagctgcaaccagtctggggccattcagccagggacagagcccacagagcccatacacctgtctcccaccagcggggccctcctggcagggtagggaaggaggaccccgggcacccccctcagggcctgactcacgtactgtagtttgcactggacgcccgggccctccctgtcccaaagcccccttgggggaactgtggctgctgggggccaataaagctgtgtaactgaaaaaaa

SEQ ID NO: 239460 - DNA, 443 bp, Homo Sapiens
  misc_feature (9)..(9): n is a, c, g, or t
  misc_feature (15)..(15): n is a, c, g, or t
  misc_feature (109)..(109): n is a, c, g, or t
catgtttcnagacgntcccaatttaaatgtatttggagccttctaaacaaacattgcctttcaatatgttgctgactgtttttgaagatttaatgaaggcctaaaactncaagcgatgtgtgtctgggattaaagagaacctgagaatctctatttatgtctgacccccaggaaattccctttaagctgcttatcagaggtgcatgctgagagcatgatgggaagatggagtcttccatccgctggtaaaatctggaatctgctctcatttcattttcactgaactgaaaataaggtaacagaccctcaggtctacctataagtaccttccaactgttccacttttgtaaatttagttcagataatacatatgctgaaattcctatatcccccccatactccagatcttcagtgtggaatttaaatataattccttattgtaa

SEQ ID NO: 239461 - DNA, 464 bp, Homo Sapiens
  misc_feature (16)..(16): n is a, c, g, or t
  misc_feature (29)..(29): n is a, c, g, or t
  misc_feature (44)..(44): n is a, c, g, or t
  misc_feature (108)..(108): n is a, c, g, or t
  misc_feature (209)..(209): n is a, c, g, or t
  misc_feature (325)..(325): n is a, c, g, or t
  misc_feature (358)..(358): n is a, c, g, or t
atttaaggtaagattnggaaatagtgccnctgtgtagccccaancccaaaaagcccatatagtatgggggaaaatgacctcacaataaggagccctgtgccctttgancattagggtagaagatagttggtgtaaaagcctaagagccaaggatttggaaatgcggtgaagtcctaagccctaaaccccccagttcccactgtggtaanccctggatgggttaccttagagtccccaaaacttctgtatgtaaaatagaaaccatcactgacatgtggtggtgtgaggatttagtgagatgatgtgcccaaaacacctaaacagngccttagcacccagttggcatttaaagaggagnccaggaacttgtccaagaaggtccatttgcttgagatgttatatttgattcctttatcctaacaactacaaaattgttggtttgagaaagagacctcattttacaa

SEQ ID NO: 239462 - DNA, 480 bp, Homo Sapiens
gaaatcacatggccatacctagctgtaaaaaaggctgagaaataaagtctccagttgagtgtccaagtggctggctaactaaatatcaaggatgggagatatatggggttgattcctttactaaaaggtaaaagggatgactgaattcagggagaaaattactagattctgttatataatatgaacaaaatcctaggaagaaccaaataggcggtagtccattgggtcaggaaaagcttgaccaagtatctgagctatgttttgagagatgaataaaattccactgcaaaatgaagggcaataagtataacagtagttggaaaggtgcctggcagagcaggagccatagattcatctctatatgcctaatactttgcatagtaatgggcaaaataataagcattcaacaaacatttgctgaagtaatgaatgaaactggcttttgcttaagtgaataatcacattattagtaaactaagg

SEQ ID NO: 239463 - DNA, 469 bp, Homo Sapiens
caggatgtatcaatgcatgtcagatgggggtagataactttggggcaggttatcacaacctaagagttggtggagaaaacatgggaatgaattctagagaccacaaaatgaaaacttgaaagtgttactctttctcagcttaacgtttttaaatccaaaaaacaatttttacatttcttgggattcgaagagttgaacttcaggttgccgtggttacagtgtacagtatatattatcagtctgtaccagtagaccagtaccctaactactgaaaagaatatggcagttttccatttgtctagtttctgtatgtacaatttactatccaattaattacttaagtggatttcttgttcttttttaaaaacttattgctacattgataggcagaatagcttctgaaagtgaccagttttcaatttcataggaagaggtgactcattgaaaaatagctcaagcaaagtaagct

SEQ ID NO: 239464 - DNA, 462 bp, Homo Sapiens
ccatgagatctgatcatactacacaaattaccctgcactcaggaatctcctacatgatattgctggaataagtgtccatatgaactacagttttgctgatatgaattaattctgcatggtattatttaaaaataaaacatccttaggctgaatccaggttactttcaaattttggctttgagatttcattctgcatagtaatattttttatcatttaataaacattcaacattaacacattagtcctcaaatctaaaaggaaagtagtggaagcctcattttaaataattgaagcagcgaaaactaaaccttatgaaatctcatattgatgaatgtttcagcatgacttaaaaatatgattgtacaaagaatattatagaagcattaatgtaatcaaaagaaagaaaattatcataatcccattctccaaaaaataaaaattattttcattaaaaaaaaaaa

SEQ ID NO: 239465 - DNA, 508 bp, Homo Sapiens
aagaataataattctacttttttaaaagaataatgtctcttatagtcaccattgatttttctggagtttaattacattattaccatgtattcttattggcctgtagaggaaaaaggcaaaccacaaataaacccagtgacatatatagttttaaaatctacaattttctgatctctctctccttgtttaatatataagccctaatttctgtgtatgtgagtaaaactgcagcctgagtcatttaggaagtaagtattgagtttttttaatcataaatatactagaataaaacagcactccctaacaattaaaaaagagttttatattactttagaatgtaataggtttttgtccttattttatgtcctgtaaattattagttcaatactgttagcattcccggataatgcacacatgatttctgaatgttttctgtaaatgacaatcaatgtttatgaagttccctcctttaatgctgaacaaaattaaaagaagaaaaagaaaaaaa

SEQ ID NO: 239466 - DNA, 422 bp, Homo Sapiens
ttatttagattattactcagtattgctcttgatgttttagcaactcagagaagaccaccaaataagtgctattcatattgtaaaagaagtgatcaaattatttctttttcttatagtgtgattgtacattaagaaatcacaatagatttttaaaaaaataaaatactagaattgaggacttctacttccagaaagaagtagtaaacagggtagatgtattttccctattcatctctggaaaaaatatataaacaaaacataagaagacccagaaagttgaaaagaagatgatgtattctctagggaacttggaaccaaggaatcaacatggaggtaagttccctgtgttttctttttgctgcatacatcctagaccagatgctagagaaactggcaaactggaaacaccaaagggcacagac

SEQ ID NO: 239467 - DNA, 428 bp, Homo Sapiens; identical to SEQ ID NO: 14466

SEQ ID NO: 239468 - DNA, 515 bp, Homo Sapiens
gatcagatgtcgagatgtaactgttgaaagcccacattatgaattcactctcagattggtctcttctttcgccacactccactgtagatataatagaggacgggtagcccagagctgctcaaaaccttataacccacaattttcatagttactctcaacttagagagggctgctttctagacacaccccctccaggcccccagagtgccaggctccaggaataagtagctctaagaaatacagtatttcagtgtgagccacaccccactattgcaaattggagaggagaaggacaaacttaaaaggtgaaaagatttaacagaacaacagggtgaaaccccatctctaataaaaatacaaaacttagctgggcgtggtggcatgcacctgtagtcccagctactcaggaggctgaggcaggagaatcatttcaacccaggaggcagacgttgcagcgagccaagtttgcgccactgcattctagcctaagtgacagagcatgactccatctcaaa

SEQ ID NO: 239469 - DNA, 495 bp, Homo Sapiens
tcagtgcatagatgttttattttttctgccactcattctagagtgcagtggcatgctcatagctcactgcagccttgaattcctgggctcaaggtcttagctttccaagtctcagctttcctgggctcctgcctcagctttccaagtagctgggattacaggcacataccaccatgcctggctttgtttgttttttgtgtggacggggtctcgctttgttgcccaggctggtctcaaactcctggcttcacgcaatcctcccacctcagcctcccaaagtgctgggattataggtgtgagccaccatgcccagcctaaataattttttaaattccagtttttaattattctttgttaggatacagaaatgctttgtgtcctgcaatactgttaaatctccttattagttttagcagctttttttgtaaatcccttaggattttctatgtatgtgattgttatctgcaaataaaggcagttttatttcttcttttc

SEQ ID NO: 239470 - DNA, 490 bp, Homo Sapiens
  misc_feature (24)..(24): n is a, c, g, or t
  misc_feature (35)..(35): n is a, c, g, or t
  misc_feature (143)..(143): n is a, c, g, or t
aaggttaccccatcctaaaaagcnacgcaactggnctgggaaacggtttcgaatcagctcaaggctgtgaccttcctttcagaaacctggcaaaaacatcacccaaggagcccaagaattccccccttaattgtgtgtggggnactttcaatgcagagcccaacagaagaggtctacaaacactttgcttcctccagcctcaacctgaacagcgcctacaagctgctgagtgctgatgggcagtcagaacccccatacactacctggaagatccggacctcaggggagtgcaggcacaccctggattacatctggtattctaaacatgctctaaatgtaaggtcagctctcgatctgctcactgaagaacagattggacccaacaggttaccttccttcaattatccttcagaccacctgtctctagtgtgtgacttcagctttactgaggaatctgatggactttcataaatacttgcttttgtctttt

SEQ ID NO: 239471 - DNA, 537 bp, Homo Sapiens
  misc_feature (9)..(9): n is a, c, g, or t
  misc_feature (135)..(135): n is a, c, g, or t
ttggctgcntgggacaaagaattaataaaacccaaaactcctaagaaagaactggaggaccagagaacagaacagaaagaaatagcaagtgaagaggaatctccagtacctctgtactctcatctaaacagtganagctccattccagaagaattaggcagccctgctgttgaatatgtaccatccgagtctataggacaggagcagccagggagtccagatcacagtatacttactgaagaaatgatttgttcacaggaactagaatcttctacctctcctagtaaacattcacttcccaaaagctgcacatctgtgtcaaagcaggagtctagcaaaggaagtcataggactggaggacaatgtcacctgcctatcaagtcccatcagcactgttatagttggtcagatgagtcattatctatgacacagtcagaaactacatctgaccagagtgatattgaaggtaggatcagagctctgaaggatgagttgcggaaaagaaaatcagttgtgaaccagctgaagaaggaacag

SEQ ID NO: 239472 - DNA, 527 bp, Homo Sapiens
cttcccagggccacttttctcacttgccagatctgggatttcttattaggagtatctcgagaaagatggtggaaggcatgacttgatcccaagagtttctctttttgactcctagaaatagcctttctcacctatcatccttctctgccttttttttttttttcaaactttcttcaagtactctttaaaaacagtttaaatttcattaaaaactgtagcatgaattcatattccaactcattccagtagcactttaggaaggacttttctaggaaggaggttttttgttctgttttaaacgcagtaagacctagcttcagagcactctagggctctagctaatttgttcccctttgtccctaggtgctagtcatctaatgaatgaggtgtttcttagcattatctacagatatggctttaccttcaattgtgtcaggttacatttacctaatgtcagcaagacttcacatttcatgtatgaatatccagatgaaataaagtcctggttgtattcaccatcaaaaaaa

SEQ ID NO: 239473 - DNA, 464 bp, Homo Sapiens
ggtgcactttggaataattttcttctcaccaataataattggatattctggctcggtgcagtggttcatgcttgtaatcccagcactttgaggggccaaggcaggaggatcgcttgaagccaggcgttcaagaccagcgtgggcaacacagacctcatttctaccaaaaaaaccacaaaaagttagctggactggtggtacatgcctatagtcctagctattcaggaggctgaggtgggaggatgccttgagcctaggagttcaaggttacattgagctatgattacactactgcactccagcctgggtgacagagcaagaccccatctcaaatcataatgatgatgagtggatattttctcagtagctgtggagacaggatgattgatagcaagagtgcctgctctaactaaagcacctttctcaagcttttttaaaaaaactatctttgtggaaaaattcaa

SEQ ID NO: 239474 - DNA, 638 bp, Homo Sapiens
  misc_feature (106)..(106): n is a, c, g, or t
  misc_feature (190)..(190): n is a, c, g, or t
  misc_feature (257)..(257): n is a, c, g, or t
atccagatccagtcactccaaaccagagaagccatgactccaggaaccagggcactaccccaggacagaagtcagcatccaaacccttcagaggccagcacaaccntacctgaaagccatctcaagactcctcagatgccaccaacaaccccatccagcagttccttcaccaagaaggatgaaacccacncaggagcacagtcatcgcctgcaaactttagaatcacctcaccaactgtggcccctcctctttcttntgacacttccaccaaccgccatccagcagttccttaaataaggtcaccaaggacaaggatatcaaataactactgttcaatctttactcaagtgtggaaattttgcctgaagtcctccacctaaaaacctgatgccattggtaatgatgtttatgaagataagatcaaagcacagaaaataatatatgtatatatatgtatatatatctggttgaaatactatatatatatatatatataccagctattaattctaggaaatggagtattaagggtgcattttatttcattagttttacttttatgcattttcttcatatcatattttgcattcagaattttcataatttgaaaaaaaataaactttttttttcttaaaaa

SEQ ID NO: 239475 - DNA, 489 bp, Homo Sapiens
ctatatatatatatatatatatatatatgtgtgtgtatatatatatatatatatatatatatatatatatatatatatatatatatatatatatatatgtgtgtgtgtatatatatatatatatgtgtatatatatatgtatatacatatatgtatatatacgcacatatatatatgtatttaaaaaaatcaaaacaaaaaaaaactcatttatacctgtgtattttttaaagctacaatctgttcaatgtttttaaaaatctgtttatatgacattgttaaaataaagttggtcttttgacgagagggaggatgtcacggtcagttgtaactttgccttcacaaggcaactggggtggggggtgggggtagtgtgcctccttgacatttcgttcaagttatagattcaatggagctatgtcttgttttaagttgctttaatgcattgtattagatcttcaaacagaataaaggttgttttgaaactga

SEQ ID NO: 239476 - DNA, 400 bp, Homo Sapiens
acagactttgctttgcagcatttttgtggtttcttctttgtgacaggcaagagtgtgggaaaaccggaaacagctcagcatcaaaaatgcacagaaggggggaaaaagcggagatttcttcagaatttaagtaatataatccaggtatcaaaaggcatgctgtgaggcgttgttccaggaaatagtttccaatttgcctctaaaactctaggacaagtctctgaagctaagttaatactaataaagacttgaacattctctcacttacatgtgaaatgtacagcgttttggggaccccagtgttttcagatattctcctgacttttaggaaaaagaatagcatggcttttcatctgaacagtgaaaagttccccctatgaagtatcctgataaagttaaa

SEQ ID NO: 239477 - DNA, 425 bp, Homo Sapiens
  misc_feature (9)..(9): n is a, c, g, or t
  misc_feature (90)..(90): n is a, c, g, or t
  misc_feature (123)..(125): n is a, c, g, or t
  misc_feature (127)..(127): n is a, c, g, or t
  misc_feature (144)..(144): n is a, c, g, or t
  misc_feature (191)..(191): n is a, c, g, or t
tcaggggancctgccctgccctgggccctccccaaagtgccggggattacagggtgtggagcccactgccccctggcctgcatgcaaccncttaaaaacaaacaaccccagaggggagggggnnngnggggagggatagcattngggagatatccctaatggctacgtgacaagttaatgggtgcagcacnccaacatggcgcaggtacacatatgtaacaaacctgcatgttgtgcacatgtaccctaaaacttaaagtaaaataacaataaaatgaaaaaaaaaagaaaaaaaagaaatatttatgaatgtaaatgtttattgtccatttttaactaataagcaagcttactaaaaactgcacttcacacttagcttaatgtttgagggaattaacttcataaataaaaactagaatttttta

SEQ ID NO: 239478 - DNA, 356 bp, Homo Sapiens
  misc_feature (9)..(9): n is a, c, g, or t
  misc_feature (23)..(23): n is a, c, g, or t
  misc_feature (50)..(50): n is a, c, g, or t
  misc_feature (334)..(334): n is a, c, g, or t
accctgggnccctcgttgtgtcncctgtttggttcggttccttgaaggcncttccggtttgcaatcccttagaacaagctccctacttttctgcctcccttttgtgttaaataacagatatgaatattgaaaccctgggatgggaagtgacttgtacacagtggcaaggcgggtactcaagtcaagactcctgactcccagttccccacaaggagttagtcagcctagagaaaataacgtctccactgcctgaaacacagtgtaatttacatcacacttataaattcaagggaaaattatctgatcactgcagaacattgagacactagaaacntgaaaattgaatttcgagctca

SEQ ID NO: 239479 - DNA, 462 bp, Homo Sapiens
  misc_feature (76)..(76): n is a, c, g, or t
  misc_feature (187)..(187): n is a, c, g, or t
  misc_feature (196)..(196): n is a, c, g, or t
gttctctgaaacatagccccgagtgattcaacacatttgcatgtactgttccctctccctgctgtgataaagcganagtcaccctaatcccccgccccctccgttgcattttttctttccctacaagatttattatgcaccctactgtgtgtatggctctgggatgctgtaataagcaagacagacncccatcttncccttcacggggcgtatgtgtctcgtgcatactgggagggcagggacagggtctccatccatttctgcattccaatgccaagagggtgtcagatctgggtgggtcgaggtagggaacaggtaaacataactcacagtgtgatgccgtgttacagccaggctgggttcctcacgcctgcgatggcagcgctttggggagccaaagtgggaggattgcttgaagccaggagtttgagaccagcctaggcaacatagagagacccgctc

SEQ ID NO: 239480 - DNA, 366 bp, Homo Sapiens
tgcttgttgaaactgaatttgtgattatcttctttttcctcaagaagtcattgagggctgttgtatccctataaaaggagaatttagagtagccaaataaaagggggctgaagtagtctcattacggaaaaagagagtgtgagcagccttttagtaattgattgcctcaagatgtggtattcagccagggtgaagggaaagtagttggggctgtggatctggaggtttacagaagcctttacccatcctgagactcagttctgctgttggtcttcagagaagtgtctgcacctgctgagaagaaatcacaccactgcactctagcctgggcaacagagcgagactctgtctcaaaaaaaaaaacaa

SEQ ID NO: 239481 - DNA, 572 bp, Homo Sapiens
agggctgaacgaagtccttcaaaaatccaccaggctgtcagctgacctcttttgcctgctgctgtgaaggtatagcaccaccccaggtcctcctgcagtgcggcatccccttggcagctgccgtcagccaggccagccccagggagcttaaaacagacattccacagggcctgggcccctgggaggtgaggtgtggtgtgcggcttcacccagggcagaacaaggcagaatcgcaggaaacccgcttccccttcctgacagctcctgccaagccaaatgtgcttcctgcagctcacgcccaccagctactgaagggacccaaggcaccccctgaagccagcgatagagggtccctctctgctccccagcagctcctgcccccaaggcctgactgtatatactgtaaatgaaactttgtttgggtcaagcttccttctttctaccccccagactttggcctctgagtgaaatgtctctctttgccctgtggggcttctctccttgatgcttctttctttttttaaagacaacctgccattaccacatgactcaataaaccattgctcttcaaa

SEQ ID NO: 239482 - DNA, 474 bp, Homo Sapiens
  misc_feature (23)..(23): n is a, c, g, or t
  misc_feature (87)..(87): n is a, c, g, or t
gggtgacaatggcgtgttcttcntgttggtgttctagatgagatcgcctctgtcccagtctccttacagacactgaaacctgttacngacagagcaaacccgaaaatcggcataggaatgctggcatttagtcctgacagctacttcctggcgacaaggaacggtcagttgtgctgacgcaggtgctgtctcaccctttactgtgtcctgtggccccaggtgtagaagcgactggaaaagaaaatgaagttgggggtttccgacacgtcacctcctttcacgtttctgcagtagccgaggtgctcacagaagctccttggaggcgctgggcctttgtcctgcagcagccgcaggtccgcgcatgagtcaggaggcctccaccctgctcacttgctccactctgctgagtagaaagcagggctgggcacactgcagcccgccttttgttaagggtttctccatttgtaaagagct

SEQ ID NO: 239483 - DNA, 572 bp, Homo Sapiens
  misc_feature (5)..(5): n is a, c, g, or t
  misc_feature (17)..(17): n is a, c, g, or t
  misc_feature (22)..(22): n is a, c, g, or t
  misc_feature (60)..(60): n is a, c, g, or t
  misc_feature (69)..(69): n is a, c, g, or t
  misc_feature (74)..(74): n is a, c, g, or t
  misc_feature (225)..(225): n is a, c, g, or t
aaagnaagccctagggnaatcnaacctaagattaattggtcccccttaaagagccatgtncctgaagcnccccncctgtgtgcctagacatgttggtaagaataaggagggaaaatgccgggatatccaaccatgggcagggcaaaaaaataaccctgccccctcaaagaatttccccattccctagagcgaagtaggacaagatggatatcctcaagataagtnccccagggccctatgggaaaaagctgcccccaggcagggcactgaattcctggggagtgggtgggtcagggaaggccttgcttcccttcctcatcccacattctggcatagaagtttgatttcccatgtacatgtttttttttgtaacatatagctccagaatacgttatttttaactttgcactcaataaaaaatcaacttgtagtaattaaacttgttcagtacattcttcacagggacattaggtgctactacttctatcagcaacaagtatatgcttatctattttttatacattggagtctacacaaggcttcctgctttttataaaaggaactgcctctac

SEQ ID NO: 239484 - DNA, 435 bp, Homo Sapiens
  misc_feature (10)..(10): n is a, c, g, or t
  misc_feature (16)..(16): n is a, c, g, or t
  misc_feature (31)..(31): n is a, c, g, or t
  misc_feature (44)..(44): n is a, c, g, or t
  misc_feature (420)..(421): n is a, c, g, or t
cggaaatatnccatanttccgagtagaaagntggttttaaaccngaagtgtaaggagaaagattatgcccctaaatggatttttttttcctcctaatgtattagggcaaaatccctcaatgatgatacctgctcctcaaagaatataaaattgatgagaaaaactttgtggtggttatggtgacccaaagtaagtttcaacctcattctgtatatctttatgcatgtaggtctttttaaaaatgatgatcacaagtccacacaatggacacagtttatacacatccatagtggtgtacacttaactactatgaaaggtttttaagaatttaccttaagtgaaacataaagttattaatgttttacattaattacacattaaactataatatagttttaataaaattttatgtaaattaannacaaaagaaaaaaa

SEQ ID NO: 239485 - DNA, 613 bp, Homo Sapiens
ccaacagattcatgttctcgtcttagctttcatttattctggtctcaatggcttcgggaaacacacatatacacatacaccatgcccttgaactcaaagcaaactacgctctcagggaaatacaaatatcacgttcttatagctgtaaagtatagcttagctatttatagaagactatgaggtactgttgtgagttatttgcttatcctgttttattctgaaaaatgaaagtgctcaatagaatttttaacgttggcaacaccataaggatttcttatgttaagtcccaacttggggttgcaaaatcattttttcccttaatacctgggtgttgtattagatctcataatttgacaagttaaccttttagaaatccacatatatctcaaatctggctactgcaaaaccagttttgacaggtcagattttcatatgtataggtataaatagccaacactcagtgaacaaaatcctttaagcattttggttacataaagttgtatgttttaagtgatcaaactaagaatattgtttataggttttaaaaaccaaaccaataaaatttttatttattcaataaaatatgcacagaacggaaaaaaaaaaaaaaaaa

SEQ ID NO: 239486 - DNA, 496 bp, Homo Sapiens
gcacccatctgtagtcctaactgctcaggaggctgaggtgggaggattgcttgagtccaggagttcaaggctgcagtgagttgtgatcacaccattgcagtccagccaggttgacagaatgagaccctgtctcttaaaaaaaaaaaaaaaaaatcctggtgatgcttttctggattaaaaaataaaataaaataaaaattggcctcactactctagcttatttgcattttctaataaatgttcagagtcaccttgtcagttcctaccaaaaagcctgtcggtattataattgagattgcatgaagtctgtagacaaacttgaagagaattgacacttaacagcagtgacttccagtctgtaaccttagcataagttctatttgtctcctttaatttttctcagaaatacctgtagttttctgtatagagatcttgaatgtattttcttaagtttattaatagacattttcacaatatgtaaaaaaaaaaaaaaaaa

SEQ ID NO: 239487 - DNA, 528 bp, Homo Sapiens
  misc_feature (80)..(80): n is a, c, g, or t
aaatcgaaatacctcatctctatggctttatggctgtacattaggacctagaacagtggcccattgctcttagactgganccatgtccactaaaataaacctaagcagatgttgtagacctagccccacaggactgcatttagctgcttcagtgacactttgatgaaagtatggagaagtggagacattatagataaaatatatcaattcccagagaaaactcttgacttaaaaacttaactgtagtaaatatatctttttcaggtgatgaattatttttttaaaaaaggttacatataggaattctgcagtataatttggaggctattagtgctatattaatggaaattaattattttttaagtaagtccaaaaaataatctagaaagtaagtttccagagcaaatctgacctagcatttggtatgctaggctctgcttttcatgattttgaaataaatcataattagacttaacaatatggagaaaataaacttgtatttttaagtgttaaaaaaaaaaaaaaaaa

SEQ ID NO: 239488 - DNA, 450 bp, Homo Sapiens
ctcgggaggctaaggtgggaggatcgctggagcccaggaatttgaggctgcagtgagctgtgattacaccgttgcactccagcctgggtcacagatcaagaccctgtctcttaaaaataaaagttggagacaagagctggctcacctgaaaggagggattagtaggtaggagggtggatggaggatggatggatgtgtgggtggataggaagatggtattaagttggtgcaaaagtctttgatattactcttaatggctttaataaaaagcttgaaggaagaatgattggttggatagacagagataaatgcatactggaaacaaagataaagataaaacacaagttataccaggccagcaactctattttgttcactgcctttagtcccagcctggcacatagtaggcactcaataaagcctgatttgtagcaaaaaaaaaaaaaaaaa

SEQ ID NO: 239489 - DNA, 428 bp, Homo Sapiens
cggcacgaggggttgcttggacctgggagtttgaggctgcagtgagctgtgatcatgtcactgcaccccggcctgcatgacattgtgagaccttgtttcaaaaaaaaaaaaaagatgtgaaacgtctgttagcttgtatatatgtcagaataatttccaaatggatgagcgagctaaatgctgaatgttgaaaaaatcatatagatagtagaatcagatggattattgtataacctggagaaagcttttctatatgattcaaaatctagaagcaataaaaaaaattaaatttatgaatgattttaaagtgttttacatgaccatagtagaatcagatggattattgtataacctggagaaagcttttctgtatgattcaaaatctagaagcaataaaaaaatattaaatttaaaaaaaaaaaaaaaaa

SEQ ID NO: 239490 - DNA, 482 bp, Homo Sapiens
gaaatccactaagaaaatcattcacatattggttcactcaacaagcatttattaaatatatattcactattctagactaatagcaagaccggggatcttgtttaggaagaagcagtccctgttctccagaatttgcaaaaccattaaaaaagcacctactttaagccattttttttcagcaaggagtcattctgccagaaaaatgtagtacacaaatacaggataatataacaaatgtaaaatttctcatttctagtgaattaaactttccagtaattttacatctcacctcattcttatgatgctcagtttgcttaattattggcaaacataatggtaaaatgtttgtactgtattagagctttactgttcgattattaagatatttatccagtatcttagagatgctggacttcaattttccttattttatctttttaaaataaaatatcatgcatgcttctgaaaaaaaaaaaaaaaaa

SEQ ID NO: 239491 - DNA, 443 bp, Homo Sapiens
  misc_feature (61)..(61): n is a, c, g, or t
  misc_feature (74)..(74): n is a, c, g, or t
  misc_feature (248)..(248): n is a, c, g, or t
  misc_feature (358)..(358): n is a, c, g, or t
cttaacaagccccattgtctcgggataagtcccctacccctacaaaatgaaaccagcccanggttaaatcctanggaaccaagtttgaatgcataaattcagatccaggagaggactttcttttcctatgaataaagaaaaccagaacctacaaataaaagacagctatatatcctcaaaaaatgacattcccaggatggtttcctcactgattaaaagaaaaatgttttagtgaatttgatgctaantctgttctagaactgtattatttgcagttctgttgtatattaatttggtgaataaatctagtaatgaaaagttcataatatgggaggctaaggcaagaggatcacttgancctgggaggcagaggttgaggagagccaagattgcgccagtgcacttcagcatgggcgctagagccagaccctgtctcaaaaaaa

SEQ ID NO: 239492 - DNA, 440 bp, Homo Sapiens
  misc_feature (1)..(1): n is a, c, g, or t
  misc_feature (54)..(54): n is a, c, g, or t
  misc_feature (430)..(430): n is a, c, g, or t
  misc_feature (432)..(433): n is a, c, g, or t
nacaagcaatagtgaccatgagcacttgactcgctgggttatcaggctttggcnccaaatgtttggcttcaaatatgaaaaaattaccatgaaagatgaaactatgcaatggcatggctgttggtcattcacatctctctctgccaagaatggagatgacgctgttgaaggaagaaatgtgttttctcctttttctcaagtgatatttgccttaggtcagattctactagtttaaagcaaaacgatctcctggtctgattcctttgggtctctaataatggaaactgcaaggatcagcataaagtgttcctttgttctgacgttggtataacattgcttcttgaaaaatgaaagtatttggacatgcagacagaagcaatattattcaggtcttccttgttgcaagtgagggaaatccaattaaaacctnannaaaccta

SEQ ID NO: 239493 - DNA, 593 bp, Homo Sapiens
gttaatactcctacttatcataaaactgtgttagaattcagcagctggattacataatactattataataagcctttattattgagtaactttacatacataatatttatatgcacaagtatttgagagcttataggtcaagccctgtgctaagtactttgtacccatgatctgatagaacccttataacaccttgatgagatgcagccattttctacacactacacatgatgaaaccagcacaggaaatcagataacttgcctgctcttggccaccacgcggtgcgctgctgctttgtgttttatgggaaattgcacatggcaaacattcaaccataggcttcctgcctttattattaaagggcaaatatgggtaaggaggatagcatggggcttgatttgttcaatgacctaaaaataaactgatcttattcataccctgccttgttctaggaaaggattatagtggcttctcagcagagggcagggcaaggaacaggtgctcaggaattggagcatctggcacgcgggcccccactgcactctgagggctcactctctctcagacacgacacatcgatgtaccagtcaca

SEQ ID NO: 239494 - DNA, 491 bp, Homo Sapiens
gaagagtttcagagtgaccctaagccttctcaatacagaaagccttcgctttttcatcaatcaacctcaagcccatatgtatcaaaaagtgaaacacatcagccaatgacttctggttcttttccaattaatgggctgtattctcattcagaagttttaactgcaagaccacagtctatggagaattcaccaaccatcaatgaacccaaagataaatcatcagaattaaacaaggcttgaatctgtattacccagaagccctgctggtaagagagttgtcactactagattataaaaacttggtggggccgggcgcggtggctcacgcctgtaatcccagcactttgggaggccgaggcgggtggatcatgaggtcaggagatcgagaccatcctggctaacaaggtgaaacccgtctctactaaaaatacaaaaaattagccggcgcggtggcgggcgcctgtagtcccagctactcgggaggctgaggc

SEQ ID NO: 239495 - DNA, 639 bp, Homo Sapiens
gtctcatcactgcaatggcacaccctgggtaaaattgacttccccaatgcatatcatagccagctcatggaactggctttgttttgtgtggttgcacctgacctggtgtccatagtaagacctgtagcattcggtcacttgctgccacaccaatgcagcagtgacacacaggaatgaaatatggaaatacatataaataaaaccgcaaagagtctggggcaagggctctgcagagctggtgctgcgagacagtgcattcctcagtgcaactggagaacagatgctgaatcttaagtgtttgctgtttctttcactgcgaaaggggatttgaaagtcacacatttattcttttcaggtatgggtgttgtttcatcagtgtctttgccccagaactggtgtaattgaagcagaagaaacacatttagacggaactgaggagggtgtgttctgttttcttccacgggctttgtaatcaacaggaagggctgtgaggccaagatagcagaatctactccctgtagataaaagagcaagactttagacaaaacgtcgacccatattgcgagccaactgtcaaccactattgtaagaaagaatatataggttcgtagaagttggtatccttcagtaaaagtagtt

SEQ ID NO: 239496 - DNA, 532 bp, Homo Sapiens
ttgcatatggcaaggccaagtccaagaaccacaccacacacaaccagtcccgaaaatggcacagaatggcatcaagaaaccccgattgcaaagatatgaatctcttaagggggtggaccccaagttcctgaggaacatgggctttgccaagaagtgcaacaagaagggcctaaagaagatgcaggccaacaatgccaaggccgtgagtgcacgtactgaggctatcaaggtcctcataaagccaaaggaggttaagcccagatgccaaagggtgtcagcctcaagctcaatcaatttgcctacattacccaccccaagcttgggaagtgtgcttgtgcccgcattgccaagggtctcaggttgtgtgggccaaaggccaaagccaaggatcaaaccaaggcccaggctgcagctccagcttcagtttcagctcaggctcccaaagatgcccaggcccctacaaagacttcagggtagagatctctgtctgccaacgtgaggacagaaggactggtgtgacccaccttggcgt

SEQ ID NO: 239497 - DNA, 316 bp, Homo Sapiens
  misc_feature (34)..(34): n is a, c, g, or t
  misc_feature (44)..(44): n is a, c, g, or t
  misc_feature (92)..(92): n is a, c, g, or t
  misc_feature (183)..(183): n is a, c, g, or t
  misc_feature (297)..(297): n is a, c, g, or t
agttacaaaatagacatttttaaagtttttcaantccttgttantctttaaagctctaaattttaaaaatttcatttggccaggcaacttgngtacgcctgtagtcccagcactttgggaggctgaggcagaaggatcactggaggccaggagtttgggaccagcctggcaacatggtgagantccatctctacaaaatcaggaaaaaaattagctgggcatggtgatgcatgcgtgtagtcccagcttgggcccagggagtcaaaggctgtagtgagctatgaatgtgtcactggntccaccttaggcagtagag

SEQ ID NO: 239498 - DNA, 413 bp, Homo Sapiens
  misc_feature (42)..(42): n is a, c, g, or t
  misc_feature (58)..(58): n is a, c, g, or t
  misc_feature (96)..(96): n is a, c, g, or t
  misc_feature (119)..(119): n is a, c, g, or t
gtcagaataacgaattctcatacatcctacagcgtggatggncttagaaaacattacnctaagtgaaaaaagccagacacaaaaggacagacactntatgatcctacttgtatgaagtncttagaatattctaattcagctgggtttggtggctcacatctgtaattccagcactttgggaggccgagatgggtggattgcttgagtccaggaattcaaggcaagcctgggcaacatggcgaaacccatctctataaaaaaaattcaaaaattagtcaatgatggtggcctgtgtctgtagtcccagctactctgaaggttgaggtgggaggattgcttgagactggaaggcagaggttgcagtgagccaagattgtaccactgcactccagcctgagtgacacagcaagatc

SEQ ID NO: 239499 - DNA, 363 bp, Homo Sapiens
tacccatgtgcgagtgccctgtgggttagaatgtcctgtatcggatgccccccttgctgttcatgtcaccagaggcccttggaaggtatctacggtggagtgtccttattctcaaagccactgtgtgccaactggtggacccagtgcatttctggcctagctaactctacacacagaatctcaggcaggaaacacttgacctagaagcctttcatttctaaaaagcaactgtaggtcgggcgcggtgactcacgcctgtaatcccagcactttgggaggccgaggcgggtggatcacgaggtcaggagatcaagaccatcctggctaacacgatgaaacaccgtctctactaaaaatacaaaa

SEQ ID NO: 239500 - DNA, 486 bp, Homo Sapiens
attgtaagcttacccaaaattgatagatgtcaaccttttaacagaagaacagaagtttaagttattgtttaatgtaatcagttttcattttaatatctttgaaatctttttcaaaggactgtagttttgtaatggacttttcaagccttccttccattgtttttcttccgttcactggctccacacgtttcctggggagtagcctggaatttaaagttgggtgcaggttttagaaagctgttgctgttaacaataattctcccggccatctccactccactactcaaaaatgcctgaatccttgctcagaggagcaaaggtatcttctcgtccctttcttacagccattttcttgcttttccacaaagatattatttaaagtggaatatttttgtaactgggataccaatgagcttttcggtcttttcctgacttggtaaggtttatgggtttctaaatctaataactacagtcataccaccctga

SEQ ID NO: 239501 - DNA, 558 bp, Homo Sapiens
ctgctcattctctcgaggcataggcagccacacttgaattttgccaagtatgcagataattccaacttgtagtcaggatcatcaggtaatagcattataaggggagctgtacagactgtatactttctacagtttgttgaaatagaaacatttatatggatacatacatctgcaaaggttagggagaaaacggtagccctggcagagaagagctagttagtgtatttcaggatagggccaagggaagctgtcatttctctactaagtctcattgtggaaaagccacaaatgtccctagtacagtaataaggaaaaaaaggctgagcgtggtggctcacacctgtagtcccaggactttcggaaggattgcttgagcccaggagttgcagatcggccaggacaatgtaagaaaaccccatgtattagaaaaaaagaattagccaggcgtgatggtgtgggtctatagtctcagcttgggaggctgaggtggcaggatcgcatatagcccaggagttcgaggctgcagtgagccatgatcgcatcactgcaccctagtct

SEQ ID NO: 239502 - DNA, 458 bp, Homo Sapiens
tgcgaaggaggttccagggactgatccatagaagggtgtcagaacaacttcataataaagagttgccttattttcttggtcaaggggaacttcctgtgtgccttctatcctgatgacaccccctcactgaaatcctggtgttgtttccacagagctgtctggccttttgtccttgatccttggttaaggaaatgaccaaccaggtaagacctgtgttgaagggaaaaacatcaattggtctctttgccaagttcaagtccagtaggttttctggatgtgtagtcaagaaactagcatctcattcttgcccggctcctaaagagctgggtgaccctgggtacctagtcaccacagtgttaggtgggactagtgaaatgcaaatactgagaggaggattggttcatccaagtctttaccacaatttagtgagtaatagaagaagcttaaaagatgttgta

SEQ ID NO: 239503 - DNA, 417 bp, Homo Sapiens
caggcattgtggtggagtctccatcatcagcgatggggaatgcacagtaaagactgttaggtgtcagcacagaaatgagtcttctcacttgggctgtcctcacatgccttttgctaggaagtggttttggcctcttttggtgcattctttctcacatgtcaatttagaggaaggaactaatgatttgaaggcaaggtctggccttcaacagtgaagtcaaaatgagactgcaggtccactgattgcaccgttcagtgcttttgactctgaagattgttttatcagtccagctcactgggctggttcatttacttaacaaatatacacagagctcctattatcacccaaattcattctgcgcactgaggatgtcctggtgaacaggttgacaatgtgcctgctcttatatttgaatga

SEQ ID NO: 239504 - DNA, 487 bp, Homo Sapiens
ttagaagcaatgtagatggacaaaatagggtataaattaaggtgcatccatacaaggaggtaccctgtggctatacagaatggtaaaggagctctttagttactcaaatggaatgatcactggaataaattaaagataaagtccacctcaaagcacataaagtattctaacatttgtgtagaaaggtaggagaggggaggatgtacatacagatatttgtaaatacatacaatggaaagataaaacaagatactgactacaggaatgtctagttacttgaactcagaaatcaaaaattcagatagacatttcagaaatattttagctattggttgcttctgggggtgtgggaaactagggtcagggatggggagatagttttcagtatatacccttgtaagtctttggttaactttgaaaagctctttattgtggtgtcataaatacaccttttaaatttgaattattagatgtattaaaattaaaa

SEQ ID NO: 239505 - DNA, 621 bp, Homo Sapiens
atgagggcatccgtggttctctcctccttgggctacctggtggttccaagtggtgcttacatcttggggcgttgcacagtggctaagaaactccacgatggaggcctggattattttgagggctatagccttgagaactgggtgtgcctggcctacttcgagagcaagttcaaccccatggccatctacgagaacacacgtgagggctacactggctttggcctctttcagatgcgtggcagtgactggtgtggcgaccatggcaggaaccgctgccatatgtcatgttccgctttactgaatcctaatttagagaagacaattaaatgtgccaagaccattgtaaaaggaaaagaagggatgggagcatggcccacctggtcccggtactgccagtactccgataccctggcacggtggctggatggttgcaagctgtagccacctgcatggcccctgcagcactcaccagttgcatcttgtgaatgaaggtgcttttctgcttgctgcttcagtcaatccttttgatgatctcaccactttaagagttccagatggaaaaagacaaaagtttgcttcatccggggatgcaggatgcagaataaaccaaactagttactc

SEQ ID NO: 239506 - DNA, 529 bp, Homo Sapiens
cagtattttgtgaatgagcaaagcaaacaccagaagcctcgaggagtcctgtctttatctggagccatagtgtccctgagcgatgaagctccccacatgctggtggtgtactctgctaatggagagatgtttaaactgagagctgctgatgcaaaagagaaacaattctgggtgactcagcttcgagcttgtgccaaataccacatggaaatgaattctaagagtgctccaagctcccgaagccgaagtctcactttgctcccacatggaacacccaattctgcgtctccctgtagccagagacacctcagtgtgggggcccccggtgttgtcacaatcacgcatcacaagtcgcctgcagccgcccgaagagccaagagtcagtattccggccagcttcacgaagtcagagaggtacacactctcctgacagaggaaagctgtttgctgcactggtttactggatagattaactgggttgaggctgtgtaatttaatatgattttaaataaaccttttacagagtctg

SEQ ID NO: 239507 - DNA, 557 bp, Homo Sapiens
atataaggctatagagattaattcagtgtctaacatttgtatttatttacatagttattgacctatgatgactttctagtcttaacattttatcttttaattgttgttgttcttcctttcaaagacgtggttcttaataggttcactgaatgcacagttgaggcacttcttgtgacaccagttcccaagtagcgttaataattgggcctgtgtcataaaatgcacggatcattaataactaaatgtccctgacacttttcactacagggctggacttagtaactgaccaacttcgggggggagggttggggcaagggggggtgggcgttagaacatgatcaaaaaatgtctccgctcagggatttatggtggattattgcagacagtgctaaaaatatagagcacaagacaagtttactaaattaaaattttattttttgagaaactgttatttgtataaattatcaagatttgtaggctttccttttgtagaaataattgttttatgtgccagagaatttcaattttgttttcaacaataaagcattgataagaaa

SEQ ID NO: 239508 - DNA, 453 bp, Homo Sapiens
gcgggcaaggcccccgatcacgtgataccgccccccaactccgggcggaagaggccagcgacagcgctgcacgaagcgagtgggcgggcgctcgtgcccggctaaaagatggctgctggcgcctggcagccaccgcctgggaggttactgtaaggcccgcagctcccgccagctcccgcggactgctgccgcctccttaccatgaagccagtaagtcgtcgcacgctggactggatttattcagtgttgctgcttgccatcgttttaatctcctggggctgcatcatctatgcttcgatggtgtctgcaagacgacagctaaggaagaaatacccagacaaaatctttgggacgaatgaaaatttgtaactcttctggatttaattatctgaaaatacagttctttccctcatgcttatgtagatataaaaataaaattcataatgcaaagtt

SEQ ID NO: 239509 - DNA, 533 bp, Homo Sapiens
acggcttcaacggaactttctgtggctgtgacctggtgagctggctaattgaagtcggccttgcctccgaccgtggtgaagctgtgatatacggagacaggctggtacaagggggagtcatccaacatattaccaatgagtatgaattccgggatgagtacttgttttacagatttcttcaaaagagtcctgaacagagtcctcctgctattaatgcaaacactctccaacaggaaagatataaagaaattgagcattcatccccaccctcacattcccctaagacctaaattatgcaggggagaaccctacatggaatcatattctagccgcgtattcattagtttttagctgggtgaccttgggcaagttaacagaggcaacctctctgagcctcagttgtctcttctgtaaaatgtgaaaagatgtgctcccaccacatgcgcagggtctgtgattttacatgtatgtaaaacacataggaagctgacttaggaaaaagagaaaccaaattaaagttccgttgagccgtc

SEQ ID NO: 239510 - DNA, 558 bp, Homo Sapiens
caaggaagtaggctgacccctcaaagtgtgccagacaagccattttaagcatagttgggtgagatgcaaagaggaagcctgcatattcgctgcttacgtgaaatgtttggcgcctactcatgctttctatccacagagtctcactgatagtttgtcagccttgcatcccatctgccccatgtgggtcctgtgaagctgctggtcaacctatcccctggctttgggggaatgcaacccatgtctggccaactgtggtgccccatttcccagtctagagttgttggtccaagaggaggctctctcttactctgaaatcatgagctgagggtttactgtgtatgcctgaagctatcagacaatgaagaaagaagagagagaaagagagagatttgagcacctgggtccagctatgactgaagctagcaagacacccatctttgttctctgaaattatgtaagaaagtaaactccctttttggaattttgcttgtttacttttgcttaagttaacttgagctggaatttcatcatcacaattaaaaacatcctaacaactta

SEQ ID NO: 239511 - DNA, 371 bp, Homo Sapiens
gaatttattgtaaacggtgtgcctatgatgctggttctgttgccacctgggcacgcagcaccctcaagtggacatttctagaaaccgcttcttacttgctcctaattgattacttttgcacattgcacagaacccaacctcgaggcctgctccctgccagttgcctgaaatcagccctgaaattctgaaaccaaagagctgcttcctgagaacaagttatttaccttagaattgaaaatgtatatccttttatgggcctttccaaatctgattagaaaaaccacaaaaggaaacagaagagaaaataagagccacagaaagtacaatatgttttattaacaggaaagccagaaataagatattttaaacat

SEQ ID NO: 239512 - DNA, 452 bp, Homo Sapiens
  misc_feature (23)..(23): n is a, c, g, or t
aatggtattgtctctagtgttgnatttgacatttaaacctgtctgccaaacttgaaccacagtcatgtctaagcactagtttaaaataaatcaggattttaagacttgagcttgttcattatctaatgtgtgtcaggtaagactcattcttcacccttgagaaatctcctttctgagttatattatcagatgttgaacgttcagtgtgattgatatgtttcccctcatctacttcatttttggttgttgaatattagtattaaccattggaacagcgtaccctgtaagtaacatttgaagcatttaaagagaaatctgtggaattattgtgggtggtctataatccttaagtgcaacgaatattgttagtagacttaataagtaacccatctgtatacatcactactttttaaatgtctgtggttacttttgacaataaaaattccaaatac

SEQ ID NO: 239513 - DNA, 492 bp, Homo Sapiens
cactaaaagatcactggtggatcattagggtcactaatgagaacactggtcaaggttactcatgagtcactgggcctgggccgaaatcatcagtggaactttgattaggatcataaaatgggaagttggtcaaaatcacagatggctggcggggcacggtggctcacacctgtagtcctagcacttggggaggccgaagagggcagatcccttgaacccaggagttcaaaaccagcctggataacaaggcaaaaccccatctctacaaaatagttcgctgcgtgtggtggtgcacgcatgtggttccagctactcaggaggctgaggcaggaggatcacttgagcctgggaggtctaggctgcagtgagccgggacgatgccactgcactccagcctgggcaacagagtgagaccctgtcccagcactctgggaggcagaggagcccagttggagatcagcctgggtaatatagtgaaacttgatctctaca

SEQ ID NO: 239514 - DNA, 435 bp, Homo Sapiens
aagatgatggaaagggtttttacaaaggcactgtttagatatacagattataattataattacattattattaaatatttattcttcaagtactttttgcagttgtcctctgacggtctagaatcacttaaatgcttgttgaatgagtgagatgtttagaactacgacttgctctgtcattccagtgtcgtttaacctatgcagtaagattctgtctttgtaaaagtagttcgtagcagaagccaggatagtttggtaattaaacgcccaaactaaactcctcattcctacccttaatatttcctggctgtatgatcttggccaggtcactctctaaaagccccggtttcttcattattatcattattataatggggagaataacagctatacctgaggtttgttttgtgattaaattaaatgagacccaaaaaa

SEQ ID NO: 239515 - DNA, 465 bp, Homo Sapiens
gaatgcccttagttctctattcaaacctcttcaaggccttctcagccttcacaccattctccatgaaacctttcttgaccacaccaagcccatagagctctgtcttgcacacactggcactgctcatttggtgttcagtcacatgctgtttggggaggtttcttgtttttttgttagtattcctgctgttatttctgagctcactttctagctctgtgaatacagggtcagcccttacgccacactggggtcccgtagatgctctttgtgcgattagggaatgctaattagaatactatctctgggctatttatgctgcatcagtcttcctgtcaaacaagttacagttgtgcttatctgtatttccgatgagaatcaggaatttttcttctgtttaatgaatttctgattggtttcaaagtattctaacataagtagccaaattgtactataggcctttaaatg

SEQ ID NO: 239516 - DNA, 483 bp, Homo Sapiens
agttaatcagacccagccagaagacactagtggccagcaaaaacctcatcttggggagcggttaaagacagggcttataagcaggagccccgtctgtagctgtgagtcagcatcaccatgtccaaaacaaagtccacgagtggccaaaacccaacagaaacgcaggaactgcagctctgcggaagacttcgaccaccacgggagagtttctcttggaagtgatcgattagtcccgagagaaataatagtggaaaaaagcaaagctgtcagggttttgccagcttcagagttgtcagatccagggttacttttgaaacaagatttggcaaaaaccacgtctaaggaagagttgcatgttttggaaagtctctcctccagacatcttatgaaaaataacccagggcaggcacagcaaaccggcttagccacaaacactgaaagattatctacaattcagaacagcccaacaaagaaaaaaaaaaa

SEQ ID NO: 239517 - DNA, 551 bp, Homo Sapiens
ttgctgggcttgatggaaaggaagggacattcctgctcttagagagcggtagccatccataataaccaacttggatatgacgtcaaaagtgatgggggcaccaccattgagggcaggggaggacgtgatgcgactcacagagcacccagcaccggactgggtcagaaggacattgtcattcttcactagaagaaaggttaacccaagaggttgatctttaaagtctttgaataagtgaaatacttttggaattaggacacaaaataaaacttgtcactgaatcagaggtagagtgtctgaaagggtggattgactcaggaaagtctaaagtcagatcgcatctgttaggaagagcccagaagaatatctttaacttagtttgtaaaagattgactcatctaagcagaatgaatctatttccttgcagtattcaaataggtgcaaagagaaagggaaggcagttggttctataagtaaaatataagtttgactaaagataaaatcttaacaaaaacctttttagaaccttaagaaaccttatataatgtaaa

SEQ ID NO: 239518 - DNA, 455 bp, Homo Sapiens
agcctgtctgttgaacataaatcttgatttttatgtaatcagatttttctccttacggttatgttcttggaattttatttaagaaatctttttctatcctgagaccacaaaaatgtccccaccattttcttctgtttcatagttttgccttgtatgtttaatcctttaaggcatgtgtagttcattttatatggtgtgaaatagttcttattcatttattcaacacatattggtggagtgcctgctgaaggtagtactcttcagagtactttgtatatatttgtgaacacatattcttgccctggaagcttatgttgtccttcaaggtagatccctactcggtttccacctgttttcttcagccctcaggatgaattccacaattttacacatagcaccagttaaggaataggctttattggagaaaaggaaggcttattagaccagcatcagaa

SEQ ID NO: 239519 - DNA, 727 bp, Homo Sapiens
  misc_feature (125)..(125): n is a, c, g, or t
  misc_feature (308)..(308): n is a, c, g, or t
atcctgtgtggtaatttttcatctgcacatatgggaaaaatccaggttcaagcttggaaagatcccctaaaaacttggcagaatataatatgtgaatacccagatattcaccacagtagtcgtcntgtgttggtacctggtccagaggatcctggatttggttccatcttaccaaggccaccacttgctgaaagcatcactaatgaattcagacaaagggtaccattttcagtttttactactaatccttgcagaattcagtactgtacacaggaaattactgtcttccgtgaagacttagtaaatanaatgtgcagaaactgcgtccgttttcctagcagcaatttggctattcctaatcactttgtaaagactatcttatcccaaggacatctgactcccctacctctttatgtctgcccagtgtattgggcatatgactatgctttgagagtgtatcctgtgcccgatctacttgtcattgcagacaaatatgatcctttcactacgacaaataccgaatgcctctgcataaaccctggctcttttccaagaagtggattttcattcaaagttttttatccttctaataagacagtagaagatagcaaacttcaaggcttttgagatttttaaagatcatctgaagaaaattcatcagttttctgcttaactctgtatcttatgtgattctgatattacaataaaattatggtaaactttaaaa

SEQ ID NO: 239520 - DNA, 494 bp, Homo Sapiens
agctgctctaggctgaggcaggagaatctcttgaacctgggaggcggaagttgcagtgaagtatgattgtgccactgcactcctacctgggctacagagtgagactctgtctccaaaaaaaaaaaaagaacaatgattccttgatacccagtccatatagtatgatcccacttgtctcaaaaatatcttttgaaagttaatttgttgtctctctcaagtgtctaatctagagcagtctcctcttcctctcacctccttttttatccttgcaattgaattgttggagtcaattgctcttaaaagaatgtacagcatttcggagttgtcttttgcttcctagaggtgtcttttaaccagttcttccactatattttttgtaaaaggaatcagctgtaaagatgtaaccagaggttcagcaaaccaccatggcacacgtatacctatgtaacaaacctgcacgttctgcacatgtacccctccagaacttaaagtgt

SEQ ID NO: 239521 - DNA, 553 bp, Homo Sapiens
cactatgcttaaaaaacactgtatttttgtgtgaccaaaatagtaaatcagtgaaagaaggttatgttctccattcttcaaaactgagaagtttattagtatttagcaaatctagactcactggttaaagtatgccttggtttaactattagtttattatatcaatactgagtttaagatcacagatttgagttgatagtgttaggtagctattacagtattaaaaagatagtgttttgcaattatgtattatctgagtgcccattttggcagtgggtttctagttgtgttttgctgagacccagggctgctgtacagattaagggtaggactaagggacatttcagcaagctgggctctaacccttttctccttctcaccctcacccaatatctgcatttatttattctgcacaggaaacctttcctctttgaaaaaaaagtttatattatatttaaaagtttggagacagttccatgcttagcagttgttctagtgaatctaaacctaaatgttgatgttcttcctttataccattgtagggatctggtaa

SEQ ID NO: 239522 - DNA, 430 bp, Homo Sapiens
tgtcccattgttctaccatccaccatgtcaatgctaccctgtcacaatgactgagactttttccttactgtattctcacgtagagcccagtagaataattacagggcttggagtcccatttcttcagggaatataggtggttggaattctgacaccagataaatcaagtatgctggaaaaagaattcctattttaggcaaaagctttattggaagtttgcggcatcctttccgcattgttcattgctgttcagagtgttgctgctgtggtgctataaatgctcccagcagctctcaggttttctttccttccagctagcctccccctaacttcccactccagccaaaaaaagatgcactgtataagtctctgatgagggataaaaatcctttaaagtgtattattaatcttgagctttcagcaaaaaaaa

SEQ ID NO: 239523 - DNA, 559 bp, Homo Sapiens
tgggcaagtactatgtatttgattcatactatagcctggtatggatttgaggctatgaagagcaaagtaaaaacttcactggttaagacacaaggtttcaagcaatttcaatatgagtgtaagttttcctagattcatcattcaagagactaacttttgcaagacagtaccttagttggtgttcgataccagcaaagcagtggtatccactgtttcttctgattgatgaataggaatgctattataatagagaggcatataattatgggaaccacaactgaggcaatggagtccagtgaagaatcttcacttgggtgcagcctgttatctctgtaatctacctggaggtgacccatatctaggagaaaaaaaattataagcatttattacctaaaccagaattgttaaggattattttaatgacattgcaaatagagatcagcaacttggttttattgcttcccagttttttgaggctaaaaatgtgattaaaatctaatgttgatccaaagagctcttagtagagagcagagcgcttagggatgaatgttaaaaaaaa

SEQ ID NO: 239524 - DNA, 501 bp, Homo Sapiens
  misc_feature (20)..(20): n is a, c, g, or t
  misc_feature (114)..(114): n is a, c, g, or t
  misc_feature (194)..(194): n is a, c, g, or t
gggaaagcgggtttccagtnaggagttaaaagacggcgggatgtaaaagaatcatataggggatgggccggaattgatgttccggccgcatggcggccggggattggatgacgnatcagaagtagagaagaagtaactttgtgaaggtagtctggggagttagtagctgatacagatcagcatttcctaactangagatttcataatattctctcttgtctcgattctgagtcactggtgcctgctgtggtggcattgttcatgaacatgtacagttattgggaagtgatcttgtctttcctcctgccttcaggcactgctacctaaattacaccccgacagatgtattcccattcttctttaaaagactatgtcatgagctgaactattaagttttaaagttgataagcatcaggctaagcatatttttcctgccatctcccacggaggtataacattgttttctatacttagggaatttaccaaaaaaaaaaaaaaatc

SEQ ID NO: 239525 - DNA, 447 bp, Homo Sapiens
tctgactccttctgctgactgggatccagctccaaagccatgcctgggaagagactcctgcctctcccaggatgactccgtcccgccacgcctctgctctcagcgcccacagggactcaccaagctggactttcatctaaaactagacacacgtgacgccagcggaccacagacccagtgcaaggggagctgtgtgggttgtgctgaaggtatgttaaaattcatacaggacacccaaaacaatcaatcttattgcatgataattttaaaataataaaaaagacttgtggcaagctgaaaaaatttttgataactttactaccaatggctaatgtgcaaactcctacaaattgagaaaaacaggcaaaaaatataaacaacagtttataggaaaagaaatacacagtttttaaacctatgaaggacagctttactcattagttaaaa

SEQ ID NO: 239526 - DNA, 511 bp, Homo Sapiens
agaaagatgggttttctcattcacctcactgcagagcctttcagggcagccttaagtcagctagagcaccagctaaacatgcaggtcctgacaacaaaatcattttgattgcatgccataaactctttgattaagaggattgattaagataatctggccttgatgagtggtggtggtttcaccttgagctttaccagttattttgtcaggtagcattccattaaattaggatgcatcatctttgagactgatggatttttgattcatttttccgagttttattgaatttggaatgacaccgagatcccaatagcctgtacaaagtgaagacagtaggtcaacaacagagccattcttgataatacagaatatttcacaccaggcacagtggctcacgcctctaatcccaacatttgggaggccaagggaagaggattgcttgaggccaggagttcgagaacagcctgggcaacatagtaagaccccatctctgagaaaataaaaaaaaaaa

SEQ ID NO: 239527 - DNA, 472 bp, Homo Sapiens
ctagactgtcagccctgtgagggcaggacctgtttggtttaacactcttctcccagctcccatgagtgcaccagccctgccggggcttgtgtgggttctgccaatgtatcccccagggactctccttgccctgttcccacatcaggccagctctctttcttctgagaccctgatggccttgctgctttgtggtcccatgaggcatctctgctggtctgcccatctatacctggtattgctcctatgtttttgctctcagagggccatcttattgctcccacttccagcttctcaatagggcctcagtgtaatcttcatgaactttccaaattgtttttagtctcacaaagcccacttccattcattaaagaccctgagcaggttggagagcatttatagtcacagctgagtctgtgaatataaccaacaactgtgatgacccctctgttaataaataacttggacatcagca

SEQ ID NO: 239528 - DNA, 557 bp, Homo Sapiens
tttttaaaaacctgcaaagatataaatttagccaagttacctgacgggtgagaagaaaagagcaggcaaaattagtgatttttttagaagtctgctaaatggatatattgtgtgtgttgctgttggaaatagcccccacccatcctcccaatccaaaacgtaactgaaatataatcagaaacattaaagcctgtaaaaaaaaattgctgcgtttttggtaaagggtgtaatttgtaaacagtgcaatttaaagtgaccttagtgatgcagagttcctgagtggtgtttgtagaatgagtttatcatacattctttctactactggaaaaaaatggatgcagtctggactgttgtaaccttaggttgtaatctgatttggaaataagtacatctttaaaagttgctacagatttgagttcatgattttgttaaaaattgctatggagtactttgttatataacagaagccatcctgaaatgaaactagtctaaaaaaattcattgttctacttagttgcagctgtacctgaaataaaaatgttattgatgactgaaaa

SEQ ID NO: 239529 - DNA, 444 bp, Homo Sapiens; identical to SEQ ID NO: 92544

SEQ ID NO: 239530 - DNA, 564 bp, Homo Sapiens
  misc_feature (56)..(56): n is a, c, g, or t
aagcagcaggtaaagggacaggtgacttaaaagaagacaaaattgctgggagatcnccggagatcccaggcaccactgatggtgccttcaaaagcttggctcagagatctcttggagcagcctggagtcaggggcctagcttaaattccagttcagccacttgctagcaggctgtgggaccttgagcaagccacagaatgttcctgggtctctttcttcttctgaaaatggaaactttgcaaactataaagactcaagcaaatgaaagccagaggatagtaaatccaagatctggttctttgaaaggtccaaaaaataataataataacctcctcatgaggctgatggaaaaaaagagatagaaaaaaaaaatgcaagattcggaataaaaaaggaatcataaaaagagtaattatagccaggcaccatggtggtacacaactgtagtcccagctacttgagaggctgaggcaggaggctcacttgaggctgtagtgtgctatgatcacacctgtgaatagccacagcagtctagcctgagcaacatataagaccccgactctt

SEQ ID NO: 239531 - DNA, 523 bp, Homo Sapiens
  misc_feature (282)..(282): n is a, c, g, or t
tctcctagatacagaccaaggttgaacaagcactcccaggggaataaagccactagttgagccatgccaatcaaatcctctcttttggaaacttgaacaaagacatagagattacaatgagaatttgaaggaggctgtataagatactagactgacagccgtgcatggtcatgagcagcccagggatgaccactgggagaagagaaagcggagagcagcagagatcacagaaatcatgaggccctgaaaagtgaagatcccgccctcactttctcactttcntgatgcagtcatgtgaaatttgtctttacttccatttacttcctttccaactctcagtgttctgaaatgtaccattacgtaaaagtgacagaaaatgaagaaaaaccattaattcctagtgggatttcccatttttactctcactccccattaccaccaaataaaactgtttttgttgagcaaacttttctataagcctctttgcattcttactttgcatcccaggaggtacaagtaagaa

SEQ ID NO: 239532 - DNA, 498 bp, Homo Sapiens
actttccctccatttagtcgcacaaagcccccaccctctatactcgtctctgcctatttaacagatcctacctatgctctaaggcctggttcataggccatcttccctttaaatctttgagctaaaatgttttctcagttctgtagtttttaatctaatttttacttggagcacttttaggatgactgttgccttgatagtatgattttgtacacatttcttaactactctagcagatgttaaaaaaataaaaaaaaggagagaaatcatcactgtagcttctgcaatgctgtgcattattagaaatctttaaatatttttcttaatatactgtggtagggagaataatggcaccccaaagatccccatgtcttattctttgagttagtgggtgcagcgcaccagcatggcacatgtatacatatgtaactaacctgcacaatgtgcacatgtaccctaaaacttaaagtataataaaaaaataaaaaaaaaaagaaa

SEQ ID NO: 239533 - DNA, 486 bp, Homo Sapiens; identical to SEQ ID NO: 85452

SEQ ID NO: 239534 - DNA, 566 bp, Homo Sapiens
tcttgacaccaaccaaatggctgcctgaaagaattttttcaagcaacaattatttttcttatcttcagggttaaaatgtataaaagtatgttatgtataattaatctgttatgtcataagtgatcatgcaaacctaaatattatggcagcctgaggggctgcttcgtatttgaaacatgctttgtctcaggcgttgacgtatgtatgcattttgttactggcgttttgtataaggtgtgagacacacctttccagatgaaaccatatgtgccgcactgtgcactactcataacggtgataacctcaagaccatcaggagaaatatttaaatttccgtgttatgaagaaagaaaccaaattattagttatgctttttaacacaaattaccagtttacataattaatgagggtgcattttaagttctaactttattgtataaggcatcatttgaaagtaccaaggaagtcttctttgtttttagtgatccgtgagtggaaggaattctagttggcagtatttgattgtaagaaatcaataaagtaattgtgttaaaaaaaaaaaaaaa

SEQ ID NO: 239535 - DNA, 467 bp, Homo Sapiens
tgctgaatgaggaccttttactgtaaggagttcttctctcaatgtgtgacctgccctgtctatcaccagtgggtatctgagcttaaggcctctgtaatgagatgtgaaaagagagaattgatgtccctgactaacagcatcagaccttttgacacctgcttgaccaggatttggataaaaggagaatttctgcaggaaaataactcttagaaaagaaacttaggaatacagagatttgacagagtggctgatgtcaaggagaacaaggatgcagaagaaactcaagatgtatgtattaaaacaaaagaacaataacctgaagggaccatgattctgttattgtatataacacaaggaaatgccccagattctcctttaaaagatataatgtacatattaagtatactagcctttatagttactgctatctacatgtttatcaaaataaaagactattttattataaa

SEQ ID NO: 239536 - DNA, 478 bp, Homo Sapiens
gatcaacctgggcacaggacaggtgcagaggagcccagagaagggccttgacaagtcaggagacccaatttggggtcgcaattgtcactcactccccaggcgtttgctttgatcttcccctcccaccatactacttcttctgctacctggtttctccctggtatttgaggatcctccaattgccttctggtcttacagacgggagaataaaggaaaaatggcatcgtttccaccttaaaagttacaagcacttcaccagatggtacagtctaggtagagcctttgtaaaacaaatgcccgcccactgcttcaccctcctcatttccacctcagcaaagcattttagcagaaaagctgacccagagcagtagctccctgctataatcctagcactttgggaggctaagtcaggagtatctctttagcccagaagttcaataccaccctaagcacaaagtgagatcccgccttaaaaaaa

SEQ ID NO: 239537 - DNA, 586 bp, Homo Sapiens
  misc_feature (68)..(68): n is a, c, g, or t
ctgcgccccagccattgctgagacgacatcccttccagcgccgccacgtagtcagccccagcccagcngcggtcctggaagcacggcaggcagacgacctgctcctcactgggctcaggcagggtcacccgcccagtgccgctagctgcaaattgctttacatacagtgacccaaagagcaagtcatttcagggccccaccactctgattggaagtcataagcttgacaactgattggcctctgtcacccaagcgggtgtggggacactaggcccgcaggtgccactggaagaggcgttcagaagcactgcggtgctccagctcctggatgcagatatctccccacaaacctaaacaatttcgagagggacttgtgttctgcaaccagtcacagaatatcaggtgagctgggcgtgtcttcactgacccacccgcccagggatgctgcactcctctccaccctgctcagaatcactagaatgaccgttctgtggctacagccctaaaagagctactaaaaagaccagaagtagtatgagaacttatgaatacgaatataaataaaggacatctggagaacttaaaa

SEQ ID NO: 239538 - DNA, 364 bp, Homo Sapiens
  misc_feature (21)..(21): n is a, c, g, or t
  misc_feature (26)..(26): n is a, c, g, or t
gacagagtttcctgtgaagtnaaagngccccgccttgggcccctgggagcaggaagtgagttggaggggtaagcggaggcaggcaggactcttgggtgactcctgaaaggttaagaagaagggatagaaggactgttgagtttcatgtggggaatgaatcgcttggggaaaagaggtggctttaccccggagggtgacagtgaacccttcaggatcacccttgggagtggattctgagaccctagtaaagtgagcttaaggtatggttccaatccagcttccctgtcctctctgtgcttctctttcttcatctataaaaccccgttttatagcctgggaaacatagagagaccctgtctctaca

SEQ ID NO: 239539 - DNA, 484 bp, Homo Sapiens
tggtcagaaagatggttgaaaaatatcctaagtgccatctagtgagaggtgcctgtgcagcgagcagtaaacatggaagcactgagggtcttatgcagaaactaatagaagatacatggccaagagaaaattaaagcttatttacttggtatactagcccaaactctttgccaaagtttgagtaaaaagactattgttttaaaaaatcaaaataaacctaaggaaaataaagatttgctatattggcaatagtaaatcaacctccaaaccctaagaaaagaggcttctaagaaaaggttctcttatgggtataaagattgagatggggttagcagggcatggtggcacatgcttgtagtcctagctgaggccagaggattattcgagcccaagagctcagggttgtggtgagcttggttgcatcactgtgctccagcctgggcacagaatgagaccctatttttaaaaattaaaaaaaaaaaaa

SEQ ID NO: 239540 - DNA, 420 bp, Homo Sapiens
atttttgttgatagttcatgtttttcccccagccacaattttaccggaagggtgacaggaaggctttaccaacctgtctctccctccaaaagagcagaatcctcccaccgccctgccctccccaccgagtcctgtggccattcagagcggccacatgacttttgcatccattgtattatcagaaaatgtgaagaagaaaaaaatgccatgttttaaaaccactgcgaaaatttccccaaagcataggtggctttgtgtgtgtgcgatttgggggcttgagtctgggtggtgttttgttgttggtttttgttgcttttttttttttttttttttttaatgtcaaaattgcacaaacatggtgctctaccaggaaggattcgaggtagataggctcaggccacactttaaaaacaaacacac

SEQ ID NO: 239541 - DNA, 474 bp, Homo Sapiens
taaagctactgagtagacccaccctatttcccaccattctctttgtttctctttcaccataggcttctttcccatgagaaagtaaagattttagtctctctttccacagtctgaagtaaatcactatctttctcaactggacttccaaggcaaagatttctttccatttatctatctggagttttacaaagttggcctctggattcccttttcccaaagctaattcaccacaaaggcacccctcaagtcaaggagctggactttcatacacctgcacctgtcaatcatgggtaaataatttgcaggcaaggttgctgggtgctgtgggattgacataaactcccaggtattgccagctctgagcctcaggcaagcttgtgactaaatgactccagtagtctgaggacagtccttactcagaagggtctttggaagcaaaagcagacataggcatgagagggtaaaaaaaaaaaa

SEQ ID NO: 239542 - DNA, 473 bp, Homo Sapiens
  misc_feature (3)..(3): n is a, c, g, or t
  misc_feature (57)..(57): n is a, c, g, or t
  misc_feature (82)..(82): n is a, c, g, or t
  misc_feature (89)..(89): n is a, c, g, or t
  misc_feature (114)..(114): n is a, c, g, or t
  misc_feature (126)..(126): n is a, c, g, or t
aanaaggccaaagggctttaacacacataaaaccccattaattttccacaaactccngaggtttaactgtccatctgaacangatcaangaaacctaaccttaagaggagttgnagtaacttgccnaagactatccccaaagaccctgggattccttccacaccccagcctaaccctaaaacctgcattcctacccacccacgttttaaccgccctccctatatacccaatgaaaagtggtcccataaaacccagagttggagaaacacaagctcttgcacagaaaatcagtttcatcaaattatgtgctgtagtgtggaagacaaatgcccacaggaatataagcatcttatgagaaagagtaagtggcaagaaaacaccatttctgcatgtgatgtgtgtgtgctaataccagtaagttgtgaacatttattctctacaagtggaaccaaacccatatgccatcaaaattt

SEQ ID NO: 239543 - DNA, 351 bp, Homo Sapiens
  misc_feature (6)..(6): n is a, c, g, or t
  misc_feature (13)..(13): n is a, c, g, or t
  misc_feature (349)..(349): n is a, c, g, or t
  misc_feature (351)..(351): n is a, c, g, or t
attaantaaaccnccatatataataattaacctccataaccccaaggaccctcaatgtaaggggtaagattgcaaaattccttagaagcaaacatagaagtagatctgcatttccctcagatttgacaatggattgttagatttgacacccaaaagcactagtaacaaaatttaaaaatagattagattctgcaaaaatgtaaagcttttttgcattaaaaaacattttcagccaggtgcagtgctcatgcctgtaatcccagaactttgggaggccacagcataaggcttgcttgagcccaggaatttgagaccagcatgggcaatatagtgagaccttgtctctcgnan

SEQ ID NO: 239544 - DNA, 385 bp, Homo Sapiens
  misc_feature (3)..(3): n is a, c, g, or t
  misc_feature (61)..(61): n is a, c, g, or t
  misc_feature (89)..(89): n is a, c, g, or t
  misc_feature (102)..(102): n is a, c, g, or t
gangcctggatccagggaacccccaaggccccctcagcccacaccccgaaaactggggaanaggggtggtgatccatccatgcaagaanaggaggctggatncagggaccccaaggcccctcagccacacccgagactggggagaggggtggtgatcatcatgcaagagaggaggctggatcagggaccccaaagcccctcagccacacccgagactggggagaggggtggtgatcatcatgcaagagaggaggctggatcagggaccccaaggcccctcagccacacctgagactggggagaggggtggtgatgaaaacagggctccctgctgcatcagactagctccaactcaaaccttattttttttttttttttgagatag

SEQ ID NO: 239545 - DNA, 663 bp, Homo Sapiens
tgagcaaggaacctgtaccagaacggcttcacatcatagcacgtcaatgggagcaatagcactaacttaactcaggccaagacttgggcttgggtcctctgtggctgctactctcctaccacacctttgcttgggagtgcacttacacagctttctttgtaatgatacaaaaagttgctgccttttggtagttaggctccagaaaggggcttccaaaccaaaatgcacttttaaatagaaatgcaactgactgcagggaggcacagaatcctgattgcctgattagcatatggtactcagggcttaaaaccaagtatgcaaacctcacatttgcacatttccatggtgattcagctcactttcaaggtagctgaaaataaaagcaggataggggtttttgaaattgactggcttctttttacctccttttggaaagcagaaggggaaaagcactgctgccaagaacttcatcaaaactctttaactttaggcattatttaggtgttatgatagagtaactgctgtacagtaccctcttacctcaagatcaaggctgggcgcagtggctcaggtctgtaatcgcagcacttcggctgaggcgagtggatcactgaggtcgacttcaagaccagcctgaccacacaccagaagtccggtccggct

SEQ ID NO: 239546 - DNA, 387 bp, Homo Sapiens
cgacactcttggttgcccatcagaaactaaatcatgggctcactaggagaaattgtcagtttaaaaatcctatgcttttcaaagaggttttattttggataaactgttgcaattatagacctagagaagacatttaacccacccatgtttcagtttctattttcttcctcactagattatttgattcacttttcaatttttaaaaattagatttattgcagactggcctcaagctcccagactatattttttagctgcattatttaggggttgaaatgccagcttttgagacttttgaaaaattcacaggctgggtgtggaggctcatgcctgtgaaggttgcagtgagctgagatcgtgccactgcactccaactcaagagtgtcg

SEQ ID NO: 239547 - DNA, 464 bp, Homo Sapiens
  misc_feature (52)..(52): n is a, c, g, or t
tggcccgagccccagcatggcctccgacccagctccgggtcgtggcgccgcntgggggtccctgcgccccggaaagagacagcaggcactggaaagcgaggccggtgggcgggcgagtcgggaggctcgggcggccgaggtccgggagcggatcccaggtggcgggagctggtgccctggcaggagggactggcttacgccaccctgtgcaggatcgtcttctcagcttacagagcctagtgtgattcaacaaccctccatctctgcccccaacatgcccaactgatctggtggagggaactgaagatgaaggcctctcaggcaccatggatgggatgggtgtgtgtgaagggggcagggtccccaggagctgccccaggtctggctggacagttgcacgggaagtcctgtttgtgaactcaacgtttccacggcttttccattaaactttaccccaaatcaaa

SEQ ID NO: 239548 - DNA, 407 bp, Homo Sapiens
aggcaactctcctctgtagagtgaaagactataatggtggccatgtagaaactaatattccagaaggagagagctccaagaaggggattccagtgaaccatatgtacactgtgtttgagagacattagttccccacggagaagggatggatagtctgtgcttcgggggtctaaggaaggcttcctgcaggtgctggtacctccttaggtctggggtggttccttataagtttccttaccctgcctgcatcacctctgcctcttatgacctctgtgcaaagactgggaagggtcacccccaatggctgtgaacgaacctgtttgtgattctaaacagggcacgggaccatcctacaataaaaattacccagcctaaaatgccagtagtgccagtagtccctgtttaga

SEQ ID NO: 239549 - DNA, 337 bp, Homo Sapiens
gctctgagacacaaagggtgcatattcactggggtccttgtagggacacaagggatgcttattcactcagatccttgtaggtacacaatggatgcatattgtctcagatccttgtggcatattactatcagtggttgaagtggtagctgtgttatattctttcattttctcaaggctatgaagaagtgatacaaacgagtttgttgactgttcacttataacttgtttattaagcagttaaaaatttgaagatatttaacccttttttcattttcatctttttttttcttttttttttgattgagtcagggtttcactccagtctattgaaagaaaa

SEQ ID NO: 239550 - DNA, 297 bp, Homo Sapiens
  misc_feature (71)..(71): n is a, c, g, or t
  misc_feature (89)..(89): n is a, c, g, or t
  misc_feature (91)..(91): n is a, c, g, or t
  misc_feature (179)..(179): n is a, c, g, or t
agaatgatgttttaagtatataaaatgcccaaacaaagttaaattacagttatcaaagtatttttaaaacntcatagtgataaatgagncnatatagttatattgttaatatagttaacacattacatgatttggtgagcctaattgctgttactaattagaggagtaaaaatgtttcncgataactcagcaattgtaatgagaaatgaaacatctaatgtcttttgggttacaaagtaacaggtactgagatttgtggcctaaattcataataaagtgaaatgttcaaaaaaaaaa

SEQ ID NO: 239551 - DNA, 591 bp, Homo Sapiens
ttcatggaacaagacaatacaaatttgatcctaaaacgaagagaattttgactctcaagaaagctaatagctggttcaactgcaggaaaaattgaacattactaatttgaatggaaaacacatggtgtgagtccaaagaaggtgttttcctgaagaactgtctattttctcagtcatttttaacctctagagtcactgatacacagaatataatcttatttatacctcagtttgcatatttttttactatttagaatgtagccctttttgtactgatataatttagttccacaaatggtgggtacaaaaagtcaagtttgtggcttatggattcatataggccagagttgcaaagatcttttccagagtatgcaactctgacgttgatcccagagagcagcttcagtgacaaacatatcctttcaagacagaaagagacaggagacatgagtctttgccggaggaaaagcagctcaagaacacatgtgcagtcactggtgtcaccctggataggcaagggataactcttctaacacaaaataagtgttttatgtttggaataaagtcaaccttgtttctactgttttatac

SEQ ID NO: 239552 - DNA, 566 bp, Homo Sapiens
  misc_feature (25)..(25): n is a, c, g, or t
  misc_feature (69)..(69): n is a, c, g, or t
ttccttacttcagggtattcgcttnccatgaagagccttggcaataagttcatgcacctgaccactacnagtgtcaataaaaagaatgccgagtaccaggccaatgcagatgaaatggcttgccagggccacaaatggtactgagggcagagtgtcccagtccagtgaaggcctagaggaatacagggttctggggttttgggaggttcaggggcatggcgagtggaggattaatataagacccagagataacacttaccaattcagaattggtctatttgaggccggatgtggtggctcacgcctgtaatcctagcactttgggaggccaaggtgggtggatcacctgagttcaggagtacaggaccagcctggccaacatggcgaagccctgcgtctactaaaaatacaaaaattagctgggtgtggtggcaggcgcctacaatcccagctgctcaggaagttgaggcaggagaatcacttgaacctgggggacggaggttgcagtgagctgagatcgcgccacttcactccagcctgtgtgaaagagtgaaactccatctcaa

SEQ ID NO: 239553 - DNA, 562 bp, Homo Sapiens
ttatgtctttgtattgcacatttttatatatgtatatatgtgtaaatagagatatttatatattcacagacaaacacgtgtatgcacatttcacaatggaggaagaagggatatggtgtgcactgaggtaaagtgagcagggatacagaagagagctggagcctcacagtctgattctctcattgtacataacctttagggtctttgtttccctgagttctctggtatggggcactgttggcttgggctggtaccctgttattctctgtgatgaagggattcactggaggtaaaaacgtaatcatttccaaaggttgagaataaatgactttgaggaaagggtgttcattatccgttgcttctatattataatcagttgaactacaatacggttatctattgattttttttaatttttctgacaaattattgacaccaaattgaataattcatgacctgcatgcttcagcttctttctccctggtttccaggtgctattccctcaagaaatgcaaattaaatatgtcggtcttaataaatcaggagggaagcataaaaaaaa

SEQ ID NO: 239554 - DNA, 300 bp, Homo Sapiens
  misc_feature (11)..(11): n is a, c, g, or t
  misc_feature (84)..(84): n is a, c, g, or t
  misc_feature (113)..(113): n is a, c, g, or t
  misc_feature (241)..(241): n is a, c, g, or t
  misc_feature (290)..(290): n is a, c, g, or t
  misc_feature (296)..(296): n is a, c, g, or t
ccttattgggnggcattttccttttccctcccagattttgtttttgactgttaaggtagccttgttatagctacaaacaatcgntcaagcctaaaagggcatttataaaccancctacatctacatttttttcttactgttgatggatttaaaaagccgtttcaagatgaaatcttacaagtctttttcatgtcttctgagggctgagatataactttgaagtagagcccaaacatgaagntcatgaagacggcttcttctccaaatgatgttatcttaaaaacttgagnaaaaanaaac

SEQ ID NO: 239555 - DNA, 539 bp, Homo Sapiens
gtgttccttgtacactctggatattagtcccctgttggataatttgaaaatattgttcccatctacagttggtctcttcactctgttgttttctttgctgtgcagatttttagtttaatatagtcccacctgcctattttttgttgttgttgcctatgcttttgatgtcttaaccataaaatctttgcctagaccaatgttcttgagcatttcccctatattctcttttagtagtttcatagtttcggatctatcatttaagcctttaatccatttttggttgattttttaatatggtaagagatatgagcctagctgcaatcttctgcatatggatatccagttttcccagcaccatttattgaaaagggtgtcctttcttggtgcctttgttgaaagtcagttggctgtaagtatatgaaattatttctgggttctctattctttcccctggtctatgtgtctgtttccccccggtaccatgatgatttggtttctactataacagttacaaagctattactatagctttcttattg

SEQ ID NO: 239556 - DNA, 577 bp, Homo Sapiens
taagtctaatcaattcccaataagacgtataaaaaggcatatacatccagataaactatagtaaaattgaagaaaattgaagacagagaaacacttaaacgcagtcagaggaaaatatttatttcaaaaaacagcagaaaatatggatgcacataacagtggagttacatcattaatgtgttgaaagaaacgagctgacaacctagaattccatactcagaaaaaatattttttaagaataaaaattaaatacaaatattttcagacaaacacaactgagatgatcagcagacctcctctaaaggaaataatagtaggggtacttcaggtggaagggaaatgaccctagaaagtcacagaaggataaaacacaatgatagtggcatatatgtgggccatcaaaatgaacatcaacagtactgtgtcttgtgaagttttaaatacagaaataactaaaatatccaataaactgttttagcattgtctgggaagaggaaaaaatactaatttacattagacattgataagtcaagaacgcatgttataatctcaagtggatcatttggggggggatcct

SEQ ID NO: 239557 - DNA, 575 bp, Homo Sapiens
atgctgctgggaatataaatggtacggcccctgtgaaaactgtggcagttcatcagaatgtaaacagggagttcccgtatgagccaacagctccactcctgggtttctgtgctaaaggactgtaagcagagaccctaagagatatgtgtacacccatgttcatagcagcattattcacgatagccagaaggtaaaaacaacacaaataggcagtgacagatgactagactaaccaaatgtggtatctgcatacaacagaatattattcagccttcaaaagaagggaaattctgacacatgctgcatcattaatgaaccttgaaggatattatgctaagtgaaataagccagttgctaaaggacaaatgctgtatgattccacttagatgaggtgcctagagtagtcagattcatagagacagaaagtagaatgtgggttgccagggcctggtgggaggagggaagggggatagggtagtcgaattcacagagttggcagagtacaatgtggctcgtctcagacacctggagggaagagggaagggggaattgctgattacatggccgcagatata

SEQ ID NO: 239558 - DNA, 536 bp, Homo Sapiens
attttttttctatttttagtagagacggggtttcaccatgttggtcaggctggtcttgaattctcgatctcaggtgatccgcccgcctcggccccccagagtgctgggattacaggcgtgagccatggcgcccaaccatcttttgcaaattttattaaagacaatgctaaaaggaagtgacaactgaaactaatggtcacagtcagtcaagacttcccttttctgaggggcctagcaggaagagaatatttagactgatgcttagtgtaagaaggaatgttgtacaggttaaccagcaacacaaagacatattcaaaagacctaataggtcagaagaataacataccacaccaaaaacaaatctgtatggaaatctagaatcatgtgcatagaaaaagaattttcatgaggataaaaagaagcaaagagaagtaatgctcttattggggcgtgcatcagtggacatgtgctaaccagtaagaacagcaggaggcctaaatgcccatgttcgtaggagagacattggggatcctcta

SEQ ID NO: 239559 - DNA, 420 bp, Homo Sapiens
  misc_feature (10)..(10): n is a, c, g, or t
  misc_feature (44)..(44): n is a, c, g, or t
  misc_feature (52)..(52): n is a, c, g, or t
  misc_feature (104)..(104): n is a, c, g, or t
  misc_feature (145)..(145): n is a, c, g, or t
  misc_feature (157)..(157): n is a, c, g, or t
  misc_feature (408)..(408): n is a, c, g, or t
ggtttcctgnaagctttccctgtctttcccttttttcctggaanaagattcnaaaaagcttccaacgaactctgtttccccccgtccccttctgaaatttaaanttgcacctaaagtcatttgcactggttggaagttgtggaanacggccttgaantctcaagtacgaagtgtgcgtgaagtgtgagccaccttggcaagtgcctgtgcagggcccggccgccctccatctgggccgggtgactgggcgccggctgtgtgcccgaggcctcaccctgccctcgcctagtctggaagctccgaccgacatcacggagcagccttcaagcattccattacgccccatctcgctctgtgcccctccccaccagggcttcagcaggagccctggactcatcatcaataaanactgttacagca

SEQ ID NO: 239560 - DNA, 373 bp, Homo Sapiens
  misc_feature (65)..(65): n is a, c, g, or t
cctggaagatgggtaggacaggagaaattaagggttagggggatttggaatggagacaatttaangtccaacctccataggtcctacaactcacctagttaatagtttcctaaccctgtgtttccctcatcctatcccaatagggctgaatgataattatatctctttcccaaaggtggctgtgatgattgaatgagaaaatgtatacgaagcatttagcctaacatctggtaaggagtaaacactcaagaacttattatctttctgagatattaaatatgagcactataatgacctagattataccacaagggggagcagatttaaccaaaaagaaggaaaaatatttccacagcagcataaaccctctccc

SEQ ID NO: 239561 - DNA, 360 bp, Homo Sapiens
  misc_feature (42)..(42): n is a, c, g, or t
  misc_feature (50)..(50): n is a, c, g, or t
  misc_feature (78)..(78): n is a, c, g, or t
  misc_feature (88)..(88): n is a, c, g, or t
  misc_feature (137)..(137): n is a, c, g, or t
gaccagagcagggggacaacctgtaagaagacctgacccatnaagagacnccaactccgcaacaaatataagacaagnatacaagganccccatgtgaatgccagctaggtttttatatccctcctaacaaatgtancctgtgacaggctgaagaacgatgactaaacgaagggaatttacacaagcctagtctggtggtgtttgcaaaccatcgccatgagcttcatcttctttggtaaacaatccgctggtgggctgtctatggttggtttcttttctttgttgttgatccaatttgttaactttgaaaatgcaaactacttattcacagtgtggaaacacctgcttttgaccacaat

SEQ ID NO: 239562 - DNA, 660 bp, Homo Sapiens
catgggcacagtgaacataatgaactattcattcaagaactgtgactgtgaaaggaaggagggagagaaggtacagtagttagagaggagcaggggatcatggcaaagttttttgattctgtttaagagttgtttactgagtccctgcttatgtctctgtagtatctttctggctacccacgtttgctcccagttagaatcctggactctaaccatgggatggaaggtggtgttggcacaggccactgctctttagcagcctaaaggattatattctcatcaggtagaaactttgtggtcactgaagtccttacatgccccatgaagacttgtgtgtggatttgctgcctgcactgagctaacacgttcctgtcctgaaggcttcttccacagtgagctcatcacagcaccctgtggaatggtgcttctcagatgaggctgcacataagaatcacttagtgagctttcaagaaaaatgttccttcatgatggttctttctaggagtggggtgcaggagtctgggcttttgtcaagctcctcaggagatttgtttttttggacagcaggtttgaaaacgctagtcaattgcatgtctttattgtctgtgcttttctgtcagtgaaggttggttgtctttttgaatcatactgactggacag

SEQ ID NO: 239563 - DNA, 585 bp, Homo Sapiens
tactgattctacacccaagcactacaccgcattgcttgggccactgacctgaaactgggaaggagttctcttctgaaaaattgatatttaaaatcattatgaggaaataggattccataaacattttcctgatgaacaaaaacggtcgtctctatgtttaaaacaccacacacacatatacccaaactgcatactcacttattcatgtgaaaatcactgcttctttgtaaaatattacgtaacatctaccatgatattctacagaaatgctgtacttgaggttatctggtttgctggagagatattaacttagcaaaaattacttttataaaattgaaaggaaaaagaccaatacatcaacttaaattgcaggagtttatgtagctgctttctctgtagtttaaaaagccatgcataaatgcatactcactatccttggaacttaataccagctcatctatagagcaccttcttaaagacgatgtactgatgtaaggttttgtaaatttctaaactgttttaaacgggatattatcttttgccataaacttacatattttttctaggttttaagactccactacc

SEQ ID NO: 239564 - DNA, 488 bp, Homo Sapiens
  misc_feature (6)..(6): n is a, c, g, or t
  misc_feature (22)..(22): n is a, c, g, or t
  misc_feature (29)..(29): n is a, c, g, or t
  misc_feature (68)..(68): n is a, c, g, or t
  misc_feature (477)..(477): n is a, c, g, or t
atgatnggccccaggctggccncaaaacnccctggggccctcaaagtgatcccacccaaccgtggccntccccaaaagtgctggggattacagggcaagatgctcaaaaccttttatcaattggttgaccctttaaaatcccccacaatatatcttgacgggtaaactaaaatggtatttagtttataatggaaagcattaataggatatgtagaatattagatttagaacccgggcgtatgaatcttagcataatgcttcctgggaaattctgaaattgattccatttctgccgttacaaacacacacgaagttcctagttcactgggacttcctgatttgttcttttagcttgctccttctcacctagaagctctgtttatttctgagcaaccctggggcttgtctcataggacaggatttatttatctcatcaaggctgagtgtgccttaggaagtcataaacataaaaagagnagaaaaaaaaa

SEQ ID NO: 239565 - DNA, 418 bp, Homo Sapiens
gaaattgctgggccatatgaaaaatcaatagttagctttgtaagaaacagtcaaactgttttccaacgtgacattttatattcccaccaggaatgtttaaaactagtgtcttcaaatcctcaccaacatccaggattgtgtctttatgattatagccatttttgtaggtacaaagtggcatctcatggtggttttaatttgcatttccataatatctaattaggttgagctttttttatgtgcttattggccatttgtttgactttgtttggtgaaatgtatacaaatcatttgctcatttttaatttgggttgtctgtcttgtcttctcattttattgagttaaatgagttcttaataatctctggcttacaagtccttaatttatcaaatatatgatacgtggacatttaaaaaaa

SEQ ID NO: 239566 - DNA, 415 bp, Homo Sapiens
gaaactgtatgggtagcttttttgtttgttttttgtttggtttttgtttttgtttttgtttttagttgtaggtcgcagcggggaaattttttgcgactgtacacatagctgcagcattaaaaacttaaaaaaattgttaaaaaaaaaaaaaaagggaaaacatttcaaaaaaaaaaaaaaagataaacagttacaccttgttttcaatgtgtggctgagtgcctcgattttttcatgtttttggtgtatttctgatttgtagaagtgtccaaacaggttgtgtgctggagttccttcaagacaaaaacaaacccagcttggtcaaggccattacctgtttcccatctgtagttattcgatgaagtcatgtacatgaccgttctgtagcaataaatgtgccatttttataaaaaaa

SEQ ID NO: 239567 - DNA, 429 bp, Homo Sapiens
accccctcaccgctagatgacaccattgagcacttcaaatttaggcactgcaaatattattactatgatttccatgtaattacgtaacataaccagagacactgctggtgttaagtctgaataaatttcctgtatcaggacatacttttcctgaacttgtttagaaaaagaaacatataacatcttctgatgtaaggtttctaccttagaaatggtcttggtggacaatcataacatgattacattttggcaggaaaccattggagtattttgagttcagcaaatggtaatacaggcatcatgagctcaaaaaaaaataaggcatggattttaaggtgaaccatatacccacacagtttctattatctcagtacaatataaacagacccactgtgctaggctctgtgctagcagtgagggtaccgagct

SEQ ID NO: 239568 - DNA, 391 bp, Homo Sapiens
actgcgcctggccaaaaatgtgatttcttatttcccacattgccaattccatttcaattaactataatagctatgtctattgagcactcaagcgtattctagaaactgttcctgattctggggatatatccatgaatgaactatagtccctgttattaagtaatccgtagtctgactaaaccattagaaattaaaaaaaaatggctactttcaaagacatcttggagttcaggagtcccacactgcgaaccatattacctaataatccaacctgctgtaattcacttatttaaccaatatttattgagtgccaactttgagcctaagatacagcagtaaacaaatgcataaagtcctgtccccatgcacttgtatttaatggaaaacagaa

SEQ ID NO: 239569 - DNA, 260 bp, Homo Sapiens
ccaaaactgcaccttgaatacaggtacagaattgctaaaaccgtgtaccattttgtagttttagcatgcttttgtgtaactgcatctggtgtttgatcctcatgagagccctgttaaggaagggtacatattattgtcctcattttccttcgaaaacacatcagagtttgtattttgactgtcagcattcaaatacaagtcttttatttataaaattttggtctttatactgtggctaaaaatcttaaatcacttgtcat

SEQ ID NO: 239570 - DNA, 507 bp, Homo Sapiens
aaaattgggtaaattgatgaacatcttaaaaaaaacacagtggaagaggcaggcactgtagagtgacaaaatacatctttatagaaattccatgttaaaattattttgtgttataataatcaaatttaaatacctaatacatatattaccattaaacaggatagtcagcactacctagttttttagctgaatttgtaatgtccatatgtttatgtttctttagtaatacttgaactaaaggaatttgcaaagaaaacccaataatattagtattacatcaaaaagttactgtgtatttttcttccatcaagaaataatgctgacttttaaaggtggaggagtttttagacttcagtaaacataggtaccctgaaagtgtgcactgttgtatcttttcacttttgtatgtcagtgctttgaaagaatggacaatgttatcattttgttttgtctgcttattaaaattttctccctagtgtgatgtgactatcattttgccatttcagt

SEQ ID NO: 239571 - DNA, 454 bp, Homo Sapiens
tactacacatagcaccactgcatgcatagtatttaaaagctgccaagaatttggacagatcttatatgcgaatttttgtggactcactttctttgtagctgcctctgttccaggatttaccctctaagtttcttgctgttctgttagcccagaactctgtatccttacatttcatgcatataaggttgtggtattcttcaccaagtagcaggaggattacagagcaccctcagactaatacccaccaactcatgaatttcacaagatagttatgttttaagaataggctctcctccagtttgtctgcttttgatcactctccagtacctttaaagaaaaattaatgtattttgtccagatattatcattgttatctataggaaggtaactctacagtattgcaccattactagaagccagaatgccacgttacttttactacataaactccatt

SEQ ID NO: 239572 - DNA, 352 bp, Homo Sapiens
  misc_feature (39)..(39): n is a, c, g, or t
  misc_feature (104)..(104): n is a, c, g, or t
  misc_feature (320)..(320): n is a, c, g, or t
ttggcatctgtggaattaaggcatccttccattgtattnggatctctgaatcataagtgatatttgccctataaattaagcaatgatatttaaataagagattnccacaatcatattttataaatatacaaccatttttaaaaacctgacaaaatctacaaaaaaaagaaaatgaaatatatgtggagttttagaaaagactgactaggtccaaggttgaggcacatagtggttaagcacattgtcagctccggactctgcctcttacaaggaaggagggggctttagatgttatttagctgttatttagcctttcctanacctaaagttcccctcacctgtaaaaaaaaaa

SEQ ID NO: 239573 - DNA, 639 bp, Homo Sapiens
atactgtttgtaatatacagtttttgtaaccatatgattgaaaaaaagaaagtctatgcttaggccagtcagtacacccaattttaaaaaataacatattcttgctttcacaaatatagttgaacaagatttccctaaaaattccaccaggattaatctctaaaattctagtctctgatttgcaaatgcacatttgtcactgaataatggaattatgtataacaagccaaacattcttattttagacaaccatagaactgtcccacaaaatatttctaagcttatttctaactattaggaggaatgtgcttttccatctaaaatactcaccaaaatatagttaattgtggctttatgaagttaacagtctcattacagatttagtttaccaatcaacagcatgtctactgcttggatccatacaaaactatcggttcaagttgatgtgacaagggaagggagcaccagatgacacataaatctgtctgattctatgcctgtatttccaacaaacttactgtcagagaatatgacctaaatccattttctaaactgttttcatgtgttgcaaattattctagtcaactgctgttttatgtcatactctgtgtaatctctgattaaatttaatatactgca

SEQ ID NO: 239574 - DNA, 602 bp, Homo Sapiens
  misc_feature (45)..(45): n is a, c, g, or t
  misc_feature (61)..(61): n is a, c, g, or t
ctcaagcaccccaagttgaggtgcagtagtgcaatttgggctcantgcacctccaccctcnggggttcaagggtttctcctgctcaagcctcctgagtagctaggactacaggtgtgagcaactatgcctggctatttttttttttttccgtatttttagtagagacagggtttcccatgttagccaggctggtctcgatctcctggcctcgtgatctgccctcctcggcctctcaaagtgctgggattacaggtgtgagccgctgcgcccagcctggaaacttcttaaggctttaccacgtttacattcacaggatttatttctttcaagtatctgaatgtgataaaaccaatgaatgctttcccacattccatacacttatagaatatccttccagtgtgtccttttatgtctattaaaggaactgagagaactgaaggctttcccacattccttacattcatagggcttctctccagtgtgagttctttcatgttctcgacagaaactggaacgactaaggctttaccacagtgtttacattcatagggtctttctccagtgtgagtcctttcatgtcttagaaggaaagagggccaaa

SEQ ID NO: 239575 - DNA, 542 bp, Homo Sapiens
ccgggttctgctaaatgtcaaaagttgttctttgtatttccagaagaaagtgactggagtcggaaagaaagtcctgtgtgaggcaagccaaacggccacgtggcttgtatccgacggggaattcctcacagaagacgagggggaaaagggttggggcggatgcactccctgcggagacggtgaccgtggtcccttggccccagacgtccataccgtagtagtagaaaagataaccactactatccccacctttggcacaataatacacggccgtgtccgcggcggtcacagagctcagcttcagggagaactggttcttggacctgtctactgatatggtgactcgactcttgagggacgggttgtagtaggtgctcccactatgatagatgtacccaatccactccaggcccttccctggtggctgccggatccagctccaggagtaaccaccactgctgatggagccaccagagacagcgcaggtgagggacagggtctgtgaaggcttcaccagtcctgagccggactcctgcagctgc

SEQ ID NO: 239576 - DNA, 762 bp, Homo Sapiens
  misc_feature (304)..(305): n is a, c, g, or t
aggcacatgtaaatatagttgaccaaataagtgttgtataaataaccttaaatgtaaaattttccaattaaaactgtgatctcgtctagagaaaatgtattcatattacaaactgctcttccatatttatgtaccatattaaacctttttattattgttataattattatgggtatttctaattaatatgatgttgaaacctgtttggcaccttctggaagctaccaaaaaaatgacactccattgaagtgcttaaaagctgttctcataagaattctactggcctattgtaaaaaagaaaaannaaagaaaaagaagaaagacacaaagaaaataatctaaacaccaaaaactaaacacaattccaatcctttttctgtacctcacgcgcataaatttgctgctcctatttttttttctgtttatgtgtttttatggatctaagttaaatcttttggcaatatataaaaatgtaaatagtaaactttatttattaagaatgtcatcttttttaatttatatttacacaattgttcatctaatttattttttctatacagttttaaatactcagacatattttgctgttcatgatatttttatcctgttctcatggatttgttttcccatactgttttctctgatctcaattacaggttggatctcacaaataataatgtcagagacagaaatattttgccactgttgattactatactttaaagttctatattatgaaaatatataatagcttgtacgctt

SEQ ID NO: 239577 - DNA, 541 bp, Homo Sapiens
attggggccgggccccccccctcaagttttttttttttttttttaaaaaaaattcttgttctgtcgcccaggttgaagtcaagtggtgtgatctgggttcactgcaactgccccttccaaggttcaagcgattctcctgcttcagcctccccagttgttgggtttactggtgtgcaccaccaaactgggatgatttttgtatttttagtagagatgaggtttcaccatgtaggccaggctggtctcgaactcctgacctcaagtgatttgcctggctcagcctcccaaagtgctgggattacaggcatgagccactgcgcctggccttttttttttttacacaatgaaggtttatttttttgtcactcttatgtctgttatggcgaactggtgagtctttactcagtaacccatggaaatggaacaactattatctgttgtacaactttcttcttgaagtaaaggcagaaaccaaaaactttccttggatgtatttaataaaatattaaaactaaacaccaggcaccaaagataataaaga

SEQ ID NO: 239578 - DNA, 629 bp, Homo Sapiens
  misc_feature (130)..(130): n is a, c, g, or t
gcgaattgggaaaccgggcaccccctcggtgccgcaaaaatcggaggaaaaaagcccaacctcaggtacatcatcggaaaggacacttggttggagcaatggcccgaggaggacgaatgccattgcactntagcttgggcaacaagagcaaaactccgtctcaaaaaaaaaaaaaaaaaaaagctgataaactagcctgcaccctcctcccactgcaatgtctagttaactttgtaatcccacaggttttcttttcgctccattgagaaagccacttttaatattttaaagttgctctctgtaccacccccaccttccccccatgcctcctaaggaatcaaagttcaaaccagactctgagtgggggatgggtgagattatcagaccaagttagttctttagattgcttagaggcccagaagggtttcaagccctttgaaggggtatttgggtggcacctggcatcctttgtttctggcaacagagtgcactcggcactcctggggggcaagggcttcctcccatccttggcttatggaaagccatcccagatcaggccccccaactctccagaacaggctacaaacatgcaaattagaattcttttaatataaaaaaaagtactaaaa

SEQ ID NO: 239579 - DNA, 714 bp, Homo Sapiens
ttttaggaaggatggtcgaaagggttaagttaaagtatgaaaaccgtgtgtaggcctttctgtgtagtgcagaaaaggtagaggaatgtgatttgaaagagtagggatgacatggaggatgcgattcatggtgggatctataaactaatgtctttggaacgaaagcacatgcaaccttttgaaaatggatgggtgataatgaaagaccattccagagaagtaacaccatggtgcaaaggctcaagaggcatactggaagtacaatgaagagagcaatctaactgaaatgggaaaaaaagaaacaaagagtaaaaagtaagatttgatgagaaagatggaatcgatttttaaatttttttatctacacaacaaaatttattatcttaaccatttttgagtgaataattcgttagtattaagtatatttacctcgtacggccagtctccagaattcttttcatcttgcaaaacaaaccccgaacccattaaacaatttctcattcgccattttccagctagccttggtaacctccattctagttctgtctctgtgaatttgactgtgtaccccgtgtaagtggtatcatacagtatttgtatttttgtgactggcatatttcacatagcataatctccttgtggtttatccatcttgtagcatgtgtcagaatttccttcccttttaagactaaataatattccattgtgtgtata

SEQ ID NO: 239580 - DNA, 607 bp, Homo Sapiens
caagttatcatgggcctacatacaagcattgttttaaatacaggtctttgcccacagtcaggtgtacaagttcaaatgatgatgtgccccaccctttgctgtagatttcttatcaaaacactcttcctttgtgtcctctgagagtctacttcactgcagggctgctgctaccagctgctgtggtcatagccttggtgttcttgtctaattaatgagggttcccattaaactagactccagctgttttgacttccagaattgctttaggagagtctctgtggtcattaataaggtgagaccttttggttcccaatacaaagagagaagataatttattttctacagcattttttcccataaagctctatattccgttacattttaaagggcatttcaacaaatgatgtatgaaatggagaacaaaatctgtatggttctgcagtaaagggcatgcaaaactagagaacggctctgaaatgatgtggaaaaacagcaatctacttttctttaaaaaaattaaaggcttatgcttcacataaattcatgtcgattttccaggcattatttggttataacgtctgaggcattgcatggatttactgcccgg

SEQ ID NO: 239581 - DNA, 617 bp, Homo Sapiens
tggtaccaaggtaaaaaaaatggttccctgtagaaaatttccaaactaacaaaagtttccagaagaaataattatcactacaaatctcatcttccagaagaaaaaacctttggggtgcctttcccttgaatctgtttttatacacatacatcttttttaaaaagttcatagaccaggcgtggtggctcatgcctgtcatcccagcactttgggaggccgaggcaggtggatcacgaggtcaggagatcgagaccatcctggctaacatggtgaaaccctgtctctattaaatatacaaaaaaattagccaagcgtggtggagggcacctgtagtcccagctactcgggaggctgaggcaggagaagggcgtgaacccgggaggcagagcttgcagtgagccgagatcgcaccactgcactccagcctgggggacagagggagattctgtctcaaaaaaaaaaaaaaaaaatttgtttagccaatcttttatcagcaaacatgtaggttgtttgctatttcagaaaaatgttttgcacgtgaaagaaagaatagcccttatgaggcacacagggtccaggacagcagagcaaaagtccctgcaggcaacccttcctga

SEQ ID NO: 239582 - DNA, 606 bp, Homo Sapiens
ttttgtattgaaccaaacaaatggccacagcttagtgaaatgaggacagctttcggagttagtttgagaggtttcagtccaagccttgttgttgactagctctgggacctggcccttaacatataagccttagttccttcatctctaaaatggagataataatacctacatgcagatacattgtgaggtctcagtgaaatagaatcatccagtgtggtgcctaaagagggttttgtttggtttgttcactgctgtatccccagcacctaggatggtacctggcacagagcaggtgcccactaagtgctaaaatgaatactgaatgaatgaatgactgtggtcagtaaatgatagctattgctaaaggcatggcagagctgtcagacacaagaagtgtttgtaaagcaagaggctgattattcagaggcttgaaggataatgctttgtcataagctaaattaatttttccccaccatacagcatggctttaggattcttcaaaaactaactacgttggtctgatggtagtgggttaccagaacttattaacattagtgtcactaaagttggcatataatccccctgtgctaaatttgactgccttaa

SEQ ID NO: 239583 - DNA, 662 bp, Homo Sapiens
gacatttgggttggttccaagtctttgctattgtgaatagtgctgcaataaacataggtgggcatgtgtctttatagcagcatgatttataatcctttgggtataaacccagtaatgggatttatatacattttttgcttagatgagtaatttaaacacaaactcttaatttaagacaaatgagaaaataaaggatagttaacaagcccttaaagacaaatcaacattagcatttcactacctacagataattttttttttttggtgacagactataaggtacaataaatttttttaattatttatacttaaatatcataaagatatagtgaataatacaaaaataaaataagtcatatctaccaattgtatgacttattggaaaaagaggaataatgaaatagaatgtataaaaatcatttttgttgtttttagatttttgccataatttataatctaagtccactaaccttttggaatattaatttaagaaattatatatacaaaaatcctttaaatatcctaaccaataaagtaaaataaaatgaacagggcatgaattttcaattcatttaacacaattgatgacaaaggattggcaaatagcaaagaataagataatactaaataaaaatatatataaattaaaatttttactatga

SEQ ID NO: 239584 - DNA, 564 bp, Homo Sapiens
tgcagagccgcaatcagaccatctaccccaccattaagacaattcatggcagggtaaagtaaatgtccctacagacaggctgcgtttttatttttaaattacaaacttactgagggcaggattgatttctttcttttcactgcatctctgaaaaatggagtgaaagaagagaaccggcatttattaagtcccaaccgtgtgtcaagtcctatgctttggcacacgttagatctgtcatttcctaattttctcaacttctctgtgagataggcattattatcctccacttacaaattcaaaactgaagctggaaaagaaggaatcggtaagcctgtttcaaaccttttcttattctctgtcacactaaaaagtatcttccacttatattgtgctttgcatgtacaaatgctcaattaatgttttcaatatttaatttatgaatttgaatcttaataaaaacactccagagctatatgttactttttcgtaaagataattctaaaacattaacaggtattctaagaacttgaaagaatatttattaatatgaaaaggaggaatttg

SEQ ID NO: 239585 - DNA, 625 bp, Homo Sapiens
tttgggaccgggcccccctccagttttttttttttttttttaagacatataaaaacaaaaaagtttaatgtgcatgtatatttgcaaacagacacagtacactcaaaacaatatatttttactatcattattatataatgcagcatacaaggttactgaggtgtggtattttttgttgttgttgttgtttgcttttagtcttcttttctggaagaatgctcaccaaattcacaggaaagaagtgcctaggtgatcatttactgctatttactgcttcctggtatggagcaaaattgccctctggtaggtaactacatttctaattagtatgaaaggttctactattttcctttcttttgcttatttccccttaagcacaatttgcagaccctacttctatttaactgatcatacccttttaaatgccttgtcatcatttttcatagttcctgcatcctagaaaaaataaaaaatcatttaaaatattccttggtgtctagaaaagaaaatttctctaacaatagagattatcattttgctttctcacttaagctgatctgaatgatgatttggtactgcctttatgagcagtcctccttaataatgactaattagggccgggtgt

SEQ ID NO: 239586 - DNA, 621 bp, Homo Sapiens
ttcattctgaagcaagaagctagatatacagaagaggtttaactatggttacacttataccctcactatcaattctatttttatactaaattactttagttatgagagctgattttccatctctccgggttgaacttcttcaataggccaatcctgcaaacagaaaagattaagttagaagaatgctagcttcgtatactcaataaaacagaagccttccaaattatgaaagcagcgacaaaaggccaaggctatgggttttttgttttttgtttttttttgataaaaaatagagatgaggtcttgctatgttgcccaggctggtctcgaactcctggactcaagcaatcctcccaccttggccttccagagtgctgggttccaggaaggttatggttttgtttgtaagctactgaaggcatcctacaactaacaagacaccctgaatctccggagttcccctgaggaacttaattaactcctttcactcaatgaggtacagataccaggtatcagtctttttgtctattcctggattttggtgaaaacagaatctaatcttatattcgcagccttaaggttagaaggtcacttacatccagtaatcacagtaagatctgg

SEQ ID NO: 239587 - DNA, 723 bp, Homo Sapiens
aaaaaccttgcattcccaaaaaagtttaaaattttggtagggcttcttaaagaatgttgtagaggttggcccacttaaagaaattatttgatgtaagtgtgatcttctgggcagagttatctattggtgtagattgaatgccttggccactgttaagaactaagggggctccatattttggattagtagatataaggagaacatggctgccagctccaagaccttgtggtggaacaataaaccgggttccgttaatcataatctgagtaccaggtgccaaaggtgtactggtattgatgactattttttgctgaatacaaggttcactgaactgactcccgactagactagttacattggatggtgccgaagccgtgtgaatggtagtgccacctggagcagaactgtaactgggggtttttactaaagcttgctgatttggcagagaagcaaaattggacgtattagttattttacctggacttgttgaaagggacgacaattcagtttgaggtttatttgtgtttacatttgttggcactgtagttgaaatccctggtgaatggaactggagtgaagtccgagattgtcttttagaaatagatacagaacgtgtggctcctggtactgctgccgaatgtggaactgtgtttattattttaggggatgtagtcgcaggtgtaggtaaggcaaccgtaacaggaatttgcaaagctgatgtta

SEQ ID NO: 239588 - DNA, 520 bp, Homo Sapiens
taagacaggtctcaatatgttgcccacattgaagtcaaatggcaaaatcccagttcacgccagccttcaactcctgggctcaagcaatccttctgcataagcctgccaagcagctgggaccacgggcgcaactaagatttggtttttgtagggacagggtatcactatgttgtacaggatggtcttgaactcctggccccaagtggtcctctcaccctggcctcccaaagtgctgggattacaggtgtgagccactgcgcccaacttggatattctttttaaataaagaaaataaagtcgcatgtgctcctcccctcatctgtccccacaggcaccaactatcataaatttcactttttcctttttttttttttttaaagtttttttttttaaagtcacagtcaactcgactgtggactgatatatttgtgaaatataataaaactcttttccaaggctcccatgcttggatgtcacagttatgtcaagttaatataaacatttctaagtgctcactctc

SEQ ID NO: 239589 - DNA, 674 bp, Homo Sapiens
ccaatcctggcttcccaaagtgctgggattacaagcatgaagcaccacacccaacctgaccacatttattttaaagattgagtccttccatgcattcattcattcgttttgttttttgttttttgaaaatggggtcctgctaagttgtctaagctggtctagaacccctgggttcaggccatcctcccaagtagctagaactatagacatgcatcaccacatcatttcattgaagtatttattacataccatcattggccaggaacagttctaggtacttgagttctagcagtaaataaacatgatcatcacagaggatgcacaggaagcatttaataaattcaagaggaattcagcctcatgaattatgaaatactgggaaatcattcatcatgtaaaaactggatataaaaagaaacctttcctgtaagagattagcctcttcaaaaaataaaataaaaacctacagccaagccaataaaatagagcacgtatctcagcagaactgcagacaattatgctggtattactgctattcattggtggtgtgctggaggttgaaattagtccagtaaagcaagaaaatatatatataggtataacctaacgactaaagtggaaaagtaagagtcattatttacagattatgtgattgtctatgtggaaacggaaaa

SEQ ID NO: 239590 - DNA, 634 bp, Homo Sapiens
aaaagcctgggtgatcagttggataatagcaacctcggaacatgagcaatccacttgaaaacatggtaaaaacctagaagggcccttgaaatacaaaattaaaacacatgtattaaattactaccctgttatcactgagaatcacggaagaattttacctggcatgtttttattgatccatgtatacattttcatagagtaaactgcagatatattttaacttcaaaaagcaccaactgttttacaaatgttggatatgaataatgtggtaatatagattcgtaagttaaatagatgccttgctataatttccaaatacctatgcatacacatcagctaaggtaggggaagtcattaaaccattgaatataaactaacgatgactcgacaatcaaataactattttttttgaagcacattcggactatcaaagactggaaagtaatattctaatattactacacaagaggtttcaacaaaagacgtggtgcaatcgttgcatagttcatattctcagttcaattttctgatacaaaatggtttcttgattgcaatttggcattaatgactaaaattgcaataaacacttaaaataaaaaacaataacaggcaaagaacagtttccctaaccttc

SEQ ID NO: 239591 - DNA, 627 bp, Homo Sapiens
aaaggccggccagtttaatttgtaaacgactcacctataggggggaattggggtaccgggcccccctccgagtttttttttttttttttttacaggccaaagacaaattttaggattcataaaacaaaaataaaccaaccaaccaaccaaccagtctcagagggcacaaacaaatctgtcctctgcagtgctgagactacacatgtgagttagagaaatggaaaatggtacaaaggaggccttcacaccattctcacatgggccagtgctgttcatgtggttaacccatttgctgtttagactgaacactgacacttggcaagtggctacttctagaacatgtgtgggctgaggtgaaccgggcattatgtgtatgtgtgaagctatccagacatgcctggtcactgacaatcccagcaaccgttccttgctgaagagacaaaaagtagcatgaaactgtgtgagactctcattttatgattctacaggtggaatcttttagcttgtttaggacacactaagccccaattctatgccctctggttaaagaaggggaagaacttgtaatgacatacgatgtggacaagtgcattaggaacaagactaacaactagaaataatgggagg

SEQ ID NO: 239592 - DNA, 661 bp, Homo Sapiens
cctctggaaagcgccacccggggccgtgggccatcggccttttgtgtcttgggctttgcccccgcccgcacggctggtcacgtttgtcattgggcattcagctcagcgtcagaggctgactcagtccccagttcagagtagtcacctggttacactgaactcctcaccttcttttctctctttttttaaaaaaatacttctttttctgaaagattcttatttttttttttttgtttacctttttcctgtggatttgctgccgttagaatagcaactccaggagaagagcaagtgagtcagccccccttctccactccctgccccaccggcagtgggcacagccctgcagacaggagcaaggacttcggggaatagacccactggggccgggagagggagaagctggattctgaccccaccactggcactcctgtgtccagccatgcctgacgcccaccccaccctcagacggcgggattaaaccaggcagtacagggttactcggggaagccagactgctgggatttcctgtcgctttagccagaataatccaggtatatggatatacagataatctgaaagagtttctcatttttatatttgtggaacatcgtgtaagaaaaactgaagagcaagtgcctgaaataaaatcccccacatg

SEQ ID NO: 239593 - DNA, 763 bp, Homo Sapiens
tttcttttaagccacttaaacggtgttcaaaagcccttccacctaaggtaagatcaagttcatcaagtaaaaaaatattctcccacatatagcaacgggactccaagtactaaattggttcacctgcactcatggtgctggcaggccaaaacccatctttttttttttttaatcatatatgtatacctccaacttgagaaattaaacctgaactcaatcaaatgcctttaaaagcattagcctactctcaatgaagagttatttggaaaaagcttaaaacaaccaaattcatacaacagagataaatttaaaaatcaaagtaaaattttgcccaaagcttatgattagcaataggatttcagctgtgaactgataagcaaccaaaaacaaatttgttacaagtttccctttaagtggcctgtatatatacatatatgtatatatttaagttgtaccaaaaactgcttacaaatggcaattcctgtgaagtagatgatgatgaagttccaggtaattctagcatgtttcctaatgtactggtactggaatctggatcatcctgaaaagataaatttattgagtttaattgctcttctattgtaatgtttgtgtctcctagtgaaaagggggctgggagaagggctgctttttcattgctgccgtccacttcatttctttgcttatttttctgtgtttcagtctgaggagctaatggcaagaatggcgatttgactgcaccgtgtctactctctggtgtgctgtc

SEQ ID NO: 239594 - DNA, 750 bp, Homo Sapiens
  misc_feature (38)..(38): n is a, c, g, or t
tccgtggcttggaatgcagtggtatgattagggctcantgcatcctccaccctccggggctcaagaatccttcttgcttcagcctcccaagtagctgggaacacaggcatgggcgaccatggctggctgatttttcagtttttttttttttatagaaacagtctcacaatgttgcctaggctggtctcaaactcctggcctcaagcaatccttccgccttggcctcccaaagtgctgggattacaggcgtgagctactgtgcatggccaggaaaaccttcttctttttaaaatgctctctatataaacaaaaactgtggtggataagtgtggccatacacagaagtctctctagaaaggtaatcctatcaagcgtttttataaaaaagcaaagtgatttttatcagcttccttttttcaataaaagctgttttaaggaagtattcagtatttctgtatattcaatggaaacaaacacatggaatctgtactactcatatacaatgacattaggaaagggtttagctaaattcttgtgtggcaaaatcacaaggtttatcgtttatcaaggaagacctttcatgtacattatcagagtgtgcacctgaattaccaagggctttacctttcatggggagaaaaggacagattccctgccttattcatttgcctctagattttgagatctaaatgccaggttcactttaagtgctaacatgatgaggcaactgttacttatttgcagtcctaa

SEQ ID NO: 239595 - DNA, 759 bp, Homo Sapiens
  misc_feature (29)..(29): n is a, c, g, or t
  misc_feature (82)..(82): n is a, c, g, or t
ttattatttttttttttgagagaaagagnaaggatcttgctctgttgctggactggagtccaagggcatgatcatggctcantgcacctggacttctggggctcaaggatcctcccatctcagcctccaaagtagccgagggactacaggcacgtaccaccacgcccagctcctaaggacatcagctttaaggacaatgctccaatttcttcttttcacaagagtgtatccatgtattacttatgaaattgaaagtttaaaaaagctttgagaaatacaaatctagggggaatgtcttgagtgagtgggattctgacgactcaacggattaaatgtcatgagggctgatcccagctgcctggaatgggtctgggctgtggaattgcaccgacaggtgtgccagcacagcgctggccctggccaaggtgtggaacacactgactcccagcactgctccgaggtgctgggagccccaggtgcaagacatcacaagacgccacgctgcctgccaacactgtataccgagaacagaacagcgaggtgtgtgattagcacctggcctcccgcagggctctgcggctagaaccggttatgcaacaggaataggaatgtgcctatcaaccagctaaatacacaaaacccagctgagcctctgctgggggctggccccctggctcagaggtgttccaagtctgtggggacccctaggtgaggcagaggctgctgggatacacatcccactctaatgcagctgccaga

SEQ ID NO: 239596 - DNA, 732 bp, Homo Sapiens
  misc_feature (11)..(11): n is a, c, g, or t
  misc_feature (19)..(19): n is a, c, g, or t
  misc_feature (22)..(24): n is a, c, g, or t
  misc_feature (31)..(31): n is a, c, g, or t
  misc_feature (36)..(37): n is a, c, g, or t
  misc_feature (105)..(105): n is a, c, g, or t
attgtaagatnaattaagnttnnnttgtttntgtannatttttttttctttaaaaaaaaacttaatttgagaaaggaagagacttataacagaaggcaagaaggnaaacatccaaacaatatatttacaacacaaaacaagagatcaccttcaagggtgtaaattataatacatacagtagattttaaaagagacatttatcaattaattctaagattatttaagtccagctttccttttcactggttccaggtagtttcttgattaaattcaaagactatcaaattcaaacaattaacgtccaccaactgtactgatgaaactctctcaaatgacattataaaaaatagttttttttgtttgtgattacatatctttgaagtaatattatacaaaagtctgctcagccacatgttcctccccaaataaaatgtattttaaaagatgcactatcccttttttatgagattgaaaaaagactttgaagaaaatgaatatttatgagatggaaaaaatatacaattttatcttaggcatgccatatttttaatgcaaaacaactgacaaaaagtcattttaatatgaaggaatatactaaccaaaatatgttggtgatagggagtgttcctattatagctatttgtcaaattatcagaaggactttcattatgtggaaaacttttaaactttctaacttctagttatgttaatttaatttgaatggagactttt

SEQ ID NO: 239597 - DNA, 541 bp, Homo Sapiens
tatgaacagttaaagtatatacatgtacgtacatttaaataaattaaaaacagtaaacactaaaaacacatcgcttcataattatgttactacattttacaattatctatgcttttgaggttatttacattgattgtatcaaatggtggagatagggtcagcttctgcacatcttttcccgaactccacatttaatgatgtcaccttgatagctcaccaatggtgaaagtatttactccatggaaagctgcaaaatgctatgaatcagggctttttccccctttttctggagagtctcttgttaaacatttcctagcacatcaatggattcaaaaaagagaagctagtatgcaacagatccatgacttgacaatgtagatacaccaccactctgaagacatatgaggagggcactgggagagcgtatgaaaaatgtctttttagcctttcagtaatcattttgggtgatagtgatgtcatcgttattctgagaatggagtgtgtgcaatgtcaattaaagcaaataaataatcatatgata

SEQ ID NO: 239598 - DNA, 690 bp, Homo Sapiens
  misc_feature (18)..(18): n is a, c, g, or t
  misc_feature (139)..(140): n is a, c, g, or t
  misc_feature (267)..(267): n is a, c, g, or t
cacttcaagttagtaggnttcggtctctcaaaatccaggaaaccagctgttctttcataataggctgctcgagaactcggaatggattcccatccagtagtaatgtctaaacaaaagagagaattgagaatgtaacatnntccattaacaaggtttttcatctaatttcatttgcaattttataaataaaatttctgtatttttttttctatttgcccctttttatttttatttcttttttttgagacagagtctcactctgttgcncagcctgaagtgcagaggtgcaatctcagcttattgcaacctccacctcccaggttcaagtaattctcatgcctcagcctcccgggtagctgggattacaggtgtgttccaccacacccgggctaatttttgtattttcagtagtgagggggttttgccattttggccaggctggtctcaaactcctggcctcaagtaatctgcccgcctcagcctcccaaagtactgggattacaggagtgaaccaccatgcttgagctatttgccccttttcatatctgaacatttaaacattagaattataactaattaataacccaaaacatattaattgaatacttactttgtgaaaggtactgagccaagtaatttatattcagtcactcttaacaatcctattttctcaacaatcctatgatgtaa

SEQ ID NO: 239599 - DNA, 603 bp, Homo Sapiens
taaataaatttttttgccatagtaagtaaaaaattgtctttaattcatgcttgtttgattggtactaggaaaaaaaagggtaagatattatttcttgcacagtataagcaacagtgcaacaaactatgccatttaccttttacctcttacttgaaggcagaatcgcaaaacgtttgaaatggcttttctaaactactctactctggtgagagctcatttaccacaagaagccttataaaaaagtatattttgtaataaccccgtagatactgtacctaacaaaacatgactcgtattagctctataaaatatttgtggcttaggattttttttttacatatatctttttataactttccaggaactaagcacattatctgataattgttgtaaatttttttgtcagtgctttagttcaggatgggcaataaattatttctaaaggaggtctaaaagtggaaagaatggtttgattttataaaatgagttgctagttcattacagctttttacttttgtacatattttgcaaaacatttgcctcttgctattaatatttgctttgtaaaaattactgacatttaataaacatttgtaaacaatt

SEQ ID NO: 239600 - DNA, 675 bp, Homo Sapiens
agatttttcagatgtgaacattaaaaatagggattaaatgtctaggcttccatttaaaattatatgaatggtttgggatctttttgcactgagcaattttatttcaggcttccagctgtccctgtgagttatcctggacatttcgatggtttttggtaaggccaaactctgataagcaaaacagagaatactgacgtatacttaaccatatgtgtaactgatacttggcaccatggaatttttcattgagttatttcctcattcttttaaaaaataagggactataaatcagttatttagtatcttttgtttttgtagctgattccttaactttcttgtatgcctctagtaatttcagagattaaatattgctttaaactgtgatactttgatttgctagattgacaaaactgatactaatataattaagttcatctttgaaatacatctttgtgcgtagagccaaaaaaagagataaaattaataatagttcacttgttatttgagattaatttggcatttgaaatgatcattttattttacaatcatttataatgaatcaatgttccagttagctttaaaaggtatacggtgctaattagtaaaatattgaaggcaatattttactgctagcttgcaaagttatgagagtttaaaaaataaaatatatgaaaa

SEQ ID NO: 239601 - DNA, 658 bp, Homo Sapiens
  misc_feature (25)..(25): n is a, c, g, or t
cttttacagccttcccacttatgtntgtggggaaacccgggaataaagaaggttcccaagaagttagaggagattcccccagcctttcggaagatggcacagatgagaaagcagtgcctggactatcattaccagaagatgcaggctctgaaggaggtcttcaaggagtatttgattgaactgtttttcttgcaacactttcaagggaacatgatggatttcttagctttcaaggagagactgtatggaccattacaagcatatcttaggcagaatgatttggacattgaagaagaggaagaggagcactttgaagtcattaatgatgaggtaaaggttgtggccagaaagcacgggcagcctgggactcctgttgccatagcaacccagctaccgccgaggacttctgcggcttttccagcccagcagcagccgctccaggtactttctgatggctccacagtgcagctccccagactttcctcactcggatttgaggactcgatgtgctgaggcaggacccagaggggtcccaagagcctgtcctcttttgttcaaaatacatcttgaaacgtctttgtgaaggctcttagttttaatgcatggatgctgttatttttccctactgttactgaaattaaaaagtgtttgtctctga

SEQ ID NO: 239602 - DNA, 562 bp, Homo Sapiens
tattttgcagtctggtatttccccatgaaataaaaagacctgtgcagttctgccctatttcaccattttgtggaaatgattttgcggccttgtaaggaggctgagtaaaggaagaggaagaaagcaggcatgagtgctgaagttcggtttgactcatgtcatgtgttctttacgttccttttgaatatattaaatccagtgtggaatagctgccttaggaccttgacccacacttactttaagaaatcgttctagttcttaaatttcaatggtaaagccagaggctggtgcttgaaaagtatttacagtgctcaggcagcactttctgcagttacagattctttactgcccctttttatgtctgaactttacatactggattactcgtgtcaataggagaaggaacagtgccttgatttaacacgtccttgtaatagtcgtggtccttctcttctgggaaaggagaagaaatagtgcccctggagtcccattgccttgggaggcatatggctcgtttcagtgattccttgagaattctggtaagaagtcaaaaataagcaat

SEQ ID NO: 239603 - DNA, 642 bp, Homo Sapiens
attcagttttaatccccagaaagcaagggcttaattccttttctaattttgggtccatgttttaattttaccatggctttaaacaggattaccaaaggcacactcagtagtcagtaaacacatttctaggaaaggtgttgtgtcatcatgccacatattcatactttccttgggttggaaaatagatcattcagtaaaaacatacaggtaaaatgaatcttgccaatgcaattgttaacctacaaccataatataccttaagtatatttttgcacataagtataacattgcgatttaaaacaataaaccagattgagattctaaggagcattttgtaagtaattactaatgtttattttagagagatcacacaacttcaaataaaaactgacatagattgaacaccttgagaataaactttagtgccaaatggaaaataattttttacaagtaaatttgaagaacaatgtgaactttctataattatatacagaaaatatactgatttgccaaaatgagtaattttgatatattaatatttcacttataagaatgcataccacctgatccaggatgggatccaggaacagaaaaagaacattaggtaaaaatgacagaaatctgaatatagtatagagtagc

SEQ ID NO: 239604 - DNA, 620 bp, Homo Sapiens
atttgaaaaatgcacataagcaaagaactttacaaataggttataaagagaagctcaatctcagcaaaataagggaagtgcacattaaaacacaagaaaccatctcagatccaactaatatttagcgtgcatacaaatcaaaagctggaaagggtgtggaaaaacaggaatacattgctagtgagcatacaaattggcacagcctcttttaaagacaattgtgtatcacccattaaattttaaaagtcacataccctgtgacctaacaattccaacttttaatgtcctaaagaaacatacatgtgttcacaagatagcctgtacaatgatgtcaattgcacctttgcttgtacagtagacccccttatctgcattttcactttttgaggtttcagtcatccaaggtcaaccacaatacaaaaatattaaatggaaaattccagaaacgaacataagttttaaacttcaaacctttctgcatagtataataaaaatctctcactatccctctccatcctgcctgggaaaggaatcatccctttgtccagtgtatccacaatgtatacactcattatatacccattttataatgcccattagtcatttctattatcagatca

SEQ ID NO: 239605 - DNA, 739 bp, Homo Sapiens
  misc_feature (17)..(17): n is a, c, g, or t
  misc_feature (58)..(58): n is a, c, g, or t
  misc_feature (82)..(82): n is a, c, g, or t
gactttcccccggtttnattgttaattctgaaaattaagatttttcatccgtcttttnactctacccactttctcacggaanatttgcagctctcccctaaagacattactgggagtggtaagcattgtgttgaaatagcagttcagcctgttggcctttgacgtctgatttatgaccagcgtttgtgtgaatgtctgtgtgtgtctttgctcagaactgcatagccacccatgaatccaatggcattgacatcatcacagccctgatcctcaatgatatcaatcctttgggaaagaagaggatggaccttgtgttagaactgaaggcaagtaggaattaaaagcagaagacagtcatttggaaacagtcacttttgtgttttgccttggcacatgcacatgggcaattagtcatgagagtaaatattaaagatagttctttaaatgaatgacccaggttgctagtgctgactacgatgcagaactccaacctttcttttccacgtaaggtatctcatgaggggataggagcttttgaactgttaggtcacacagaatgaagattccttgctccaagctaagaagtgaatcccaacagcatcgagtactaaataccttggttttgaaagtcacaaagagagaaacagtggaaacgccattccctctctggtttctgatttttccccatttgagggaaaagggccggttgaagaatagtacaactaagcctatctagggc

SEQ ID NO: 239606 - DNA, 628 bp, Homo Sapiens
taagcttggatcctctagaacggccgcctactactactaaattcgcggccgcgtcgacagaaaagaaaaagatagtgcaggataatgggaattgagaatgctcggttagggggccaggttttagtctatgctgtttagaagagttcattgagaagatagcatctgaaaaggtgacaaattatcacttgtcctataattatgactaccaattagttgctaagaaaatgtcaggctctgaaaattaagaaaatatggatcagcctgagtgtgatggctcacccctgtaattccaacactttgagaggtaggaggataggttgagcccaggatgtcaagaccagcctgggtaacataccgagaccctgtttctacaaaaaataaaaaaaattagcctggcatggcacttagctgtggtctcagccacttaggaggctgaagcaggagggtcgcttgagcccaggaggtcaaggctgctgcgagccatgttagtatcactgcattccagcctgggcaacagaatcttttttaagactgtctttaaaaaaaaaaaaaaaagtcgacgcggccgcgaatttagtagtagtagtcgacccgggaattccggaccggtacctgcaggcgtaccagc

SEQ ID NO: 239607 - DNA, 564 bp, Homo Sapiens
gtttcttgttttatgatatcccattattgaagcattctcctgttgatgagtgtgctataaacaaggttgcaacatcttggttcttgggtctttgtgcgtgtttttatctgtaaaattgctaagagtggaatttttaggttaaagctttttgcgtttaaaaaggtgtagatactgcaaatcaattgccctccaaaaaggaccaccccaatttatacgcttataaacaaagcctgtgagtgtttcttacctgacaccctcagtcccactggatactttaaaactctttcatccttaccaatctaatcagtgaaaaatggaactgcaggttattggttttcccttgctcatttaaaaaatgttggtgtgaatgatttggggacccttggtctatcaaagaaattacctttttgtcgtatgtattctatgtgtattcccaagtttgtcttttaactttaatttctgcttgtaaaaatatttctgtacagtgttttacatttcaatgtaattaagtggatcagtttttttatttatgatttctggagctcaataaatattaagtgaatc

SEQ ID NO: 239608 - DNA, 650 bp, Homo Sapiens
  misc_feature (77)..(77): n is a, c, g, or t
  misc_feature (253)..(253): n is a, c, g, or t
ggttttttcccaggtccaaaaaaaagtggtaaaatgcttaggtggggtcaccatacccaatgattcctcccggcttnttccttacccccaagaaggcatacagcccagggccccaaaggccaacctcagaaggaagcccctaggtccccagcgccacccacagcagggaccagcttcccccacacccagctggggccgggcacctcccacaggctgtgcagctggccagagggagaaggggctacaagaagcncaggtctcaacagaggctttggcaaggagctgggagggagacactgttaccaggtctcatgcaacatcagggtagagaaaccagggtctggctaacccagccagaagtcgaaggccaggagttgtggctgggggaggtaatggggtagagccacccccaagagcacttattttgagtcgcccgaggcccagtttgtaggctgcaggggcccttggaaggaagccctgccagggactggaaccaacctctcgtgccaaggctgggcagaccctcagggaccacccttcaggagagcagaggggcctcctggagagggacctggcagggatctagagaggggaaatccctgttttcttccctgcccctcgtgccgaattcttggcctcgagggccaaat

SEQ ID NO: 239609 - DNA, 666 bp, Homo Sapiens
atttacctggaagaaggccttgacacctgcatggaaatgagctaagaaaccccctggagccttgggagctctttggcctcctggctggcccagtaatatttgagctcctttggttaatttataactgatataaaactacatcttctttataatataaattggacctgtgagtctaaaagctttaaatgtgtttaaattaaaatattcaagctaaatgttactgctctctcccaaattctgtaagtttgactcccgttaccccaattagaagtaacttctttgtttcatgccacttttatagcatttggtaattctgctataacacatcttgcccctattattaactgtgcacagctacacaaaggtgtgccttctacgtgggaacatggattgtgaatgactctgtaatgaggcctgagttttagttatctttccactcactccccgtctcccctttccaaccccaaaggctcacgataggggctcactaaatgtcagtgtttcaccaaagtattttttccattgtattaagagtccagtccctgtatatggaagtattttattttttatttttttatatcacttgagtccactagtagtacttccttgctctgtttgacttgtcagatacaaagacacgggattactactagtggactcaagtga

SEQ ID NO: 239610 - DNA, 692 bp, Homo Sapiens
tttaacaaaaaatttggtaaatttaaaactttccctttaaaaacagtaaagggtgaccagaagtggtggcactactcagggctagctgtatttaactgttgttacctgcaaatgcaaaaactaaataacattttaggaaaaattggaaatgaaccaatgtgatttctgaatgtactgacataattcccttatttactgattgcatatgagctaatgtatgtgttgtagtagaatagttccagtagttctttaccttttctgtgcttatcatgcctccttcctttctactgttaatgttcaagttttaatcttccagacttctcattttttctgtaacagtatcttctagccacgtgtgcccttctaatctctcgtgtggaatttgttcttcacaatactacaagaattctattgcattgaaaaccccaaatcttattaagccagcctccatcattagagcatgtttctcaaactcttggtgtgtgcaaatcattcttattctgtgatttctattttcatgctttttcagtttgcttcatttgccatatgatagaggttttcttcagaccatattttggaaagtatgctcttagttttaaattctactatgggttatttccaagacccatagtagaatttaacaaattctttcaaataaaaaattttaaagccttcgcttattatcaactagc

SEQ ID NO: 239611 - DNA, 699 bp, Homo Sapiens
tattatgagtgttataaatatttgtgcacaagtatttgtgtagacatgtttgcatttctcttgggtatatacctaggagtgaaattgctggataatatgtttaactatttgaggactgatagactactttgtaaagtggccaacatgagtaagttttcatcacatttataaaatgttagtgtacttacattagcttgcaaagcatttaataagcagcaagagttaaaccacgttggtccaagtgaactgaaagcagacttctgtgttacatgtgtatgagttactgaacatgttccataatacaggagtgtgagcacactaacaggtaagtgcaggaaaacaagaagaaatattttcagagtatagtcaaaagtacactgagcatgggagaattgttttgacattttgctcaaaactatttctgaagaaaattcaacatttctttcacggaaagttttaggaacaggtaaatacaattatataaagtactggtagaatatgttcgttcagatgaccttgaagtgttttttcagacttatctgaacttgagatctgaactgaatttttattagaaactgttaaagcctctggcattgaaggttagttcataattggtgagttctgaatcacttcatttcctgcagtggttcctgagagaatcttagttcaaaggactgcccccgccaacccagcgcacgc

SEQ ID NO: 239612 - DNA, 468 bp, Homo Sapiens
atgattattttgaatacatggaaattttggaacaaaactaccgaacagtgctgctgagagacatgcggaacattagactgcagagcacatagatcatgagacacacggtttaaatttaggttttatttatttttaaacacagcaggggggcttgatgtttttctgtgtctgtaacaacatttactttgtgaatatacatattgtaaatactgagaagtataacgatatatttaagtaggtatgagctcaatttgtgaattcatttttgtaaatttgttgttttgtaaggttattatagaatcagatctagcttacttttagttcttattcatgtttaagagttagtcctggccaggcgcggtggctcactgcctgtaattccagcactttggtaggctaaggcaggaggattgcttgaggccaggagttaaagaccagcctgggcaataaagcgagaccctgcctctg

SEQ ID NO: 239613 - DNA, 603 bp, Homo Sapiens
tctgtttgcattaagttccattggcagggttcagacctgccattgtggacccagtcatgttttgttttcaacaaacatttattgggtagttaaccatgtgccatgttaacctgtgttaaatgctaggaatggaaaaatgagtatgttccttctcaggagagctcttaggcaacaagcaaagaatgtcaatgaaatttttaagtgctcagtgttccaggccagagtacagagggagggacactttgctgtctttcagtcctttctttttaagtgtattgattcttttcctcggtaataaataagtccatcctagttttattaagaaaaagacaggtacaagccaaattgcattcatttaatcatattcgatttcaaacaaataggttctgtgtatgtgtttgcaaatcaggtgcagcctttcgggttgcttgacaagttgcttgggcagcccttagactataaagtttctacgtcattgatttaagggtgttttaaaatgcgataggctagcttccagaccatgattagtgtcactcctgagaagtagaggtttaatatttcataactgatttcattgcagatttatgtcttccatattctctt

SEQ ID NO: 239614 - DNA, 658 bp, Homo Sapiens
gcctttgagtagtaaattttagctcactcagaaaaacctcatagtttatttggagtaagatcccttagccccttgtagatattataaggctacattacaataaagttctggtgagtctaattgttgaccagagagattgtttacttcagagcacctggatttgaattgcagtgtgccacctgctgctgtgttacctggtacaagttaatgcattctcttcacacctcagttttatcatcttctgaatgaggctaatagtagtacctgtcatagatgcttgtaacagtgcctgcatagagtaagaatgaaataatgttagctattttttattgttacatttaaaatagattttgctggtagtgaaatatgaatgataaaatcatctcctcagctgttttccttgcataagtaccttaaaataatgtatttgcaatttccttctgaatccttgaataaaagacaccagataatcagaagatgttactgacattagtaggcatttgaagttcactctgatgggatcagtctatttacaacaaattgctatagagagtaaaaagcgccaaccttttcctgtagtttttgaatgacagcatctttgttcatgcagttggctttgctgcatttccacttcatcaattttttggctctgtctttg

SEQ ID NO: 239615 - DNA, 734 bp, Homo Sapiens
gcaaaataaactaaggtcataagttccgaatttgaagctaagggccaaagtggttgtaccatttaaaaaatttaagggtaatttttgcatgcatccaacgtaattaagctctagaaaaaacctttttttctaaatgcttctggggtccatagtgtggttgaattatgagtggagcaaattatattcatataattaactctgactcaaccttccttaagtagtagatgaagttgagtcaaagtggatgccaactgccctcacagaagacaacttttgggacttgataattcaggcaggcattgtgattgtcataattaaggaagctgtaaggttagtagggctggcaactttggctctaccttacatccaccccttttagaaaaacaagaaaacattttgtctggcactagtttctgttgtataagttttcatactgtttaacaagaccacagcaggtaaggattaatttttgagtggctgctggaattacttgatttgaatacttagtattttagtagtgtctcacacatttgccattaggtatgaataaaatattcctactgtactcctattccactaagttacattttgaacttagactcaccttaattaaacttaattaattggggagggggattccccaacaaaaagaagtacgggctcagagtggaattgtagtggacaatagttaaaaacaaagctgctccttttgcttgcttgatcattgggatttt

SEQ ID NO: 239616 - DNA, 634 bp, Homo Sapiens
actctcccagaccaaaagaagaaaagctctaatgaagaaaaactgttgaattcttaatgccatatttacacttaaaacttgatgtcactatgcctgagtctaggcctaaagttcttgtgtgtgtttttcagtgctgatctgattgttttaatttagcattgcatggaaacagtgaaatgttaagagacaaaacatacataatgggtggaggcatatgggattttttttgaagcatattgtagtggccttttaaaaaaacaatttaaactagaagaaattttctgtaaaattaattttgctatttctttgcattttgtcttaatcatttatattttactttgtaccacaatggacttgagccacctaataaaaatacagtgcaaacatatgcaacttatagttgatagcgtggaatcaagatgaagaaaaaaataaggaaaatcttactttgtaagtaaaatgtgcaaagtgatttataagttaagatggaattttagagtttccttttatttgatgtatttcttgatttctagtattggtaagattatctttaagtcatgatttttatatatatggaactcaaaattgatagttgacaaactagcttttacaatttagtttatgtctgtcattt

SEQ ID NO: 239617 - DNA, 592 bp, Homo Sapiens
  misc_feature (589)..(592): n is a, c, g, or t
ctcaaaaaacaaggggtttttctttttaggattttaacccccagacacaggaagcttaccttttcaccttaaaacccttgggggcacccattcaggtatttgtaccaaggaggcaacaaagacgggcggaacagactggagcagaaggaccccccagcagagccaagccaaatccctgaccctcaaaggccttatgtgaatgcttatggcttcagtccattggattctgcagtaatctgccgatctacagtattaccccagtaaataaccgatagacctgaaaacgaatgcatgcctcgtgccaaaattgcaggaaacctcaccaggagaaacaattttatatgagggaatgtactctctcctttgcatttttcctcaaatctatatttttagcccctcacttgtctctacagagcctcagttgcttaatctaattgctgactgaacatctccaggaaactgtgtgtacgtgtttgtattcatagtatatttatttattatctgtttacttccatgggatatagtctccataaaagagtagtcatcattgtatttgttgatgcttaataaataatcattgaatgggccnnnn

SEQ ID NO: 239618 - DNA, 651 bp, Homo Sapiens
ccatgattacgccaagttctaatacgactcactatagggaaagctggtacgcctgcaggtaccggtccggaattcccgggtcgactactactactaaattcgcggccgcgtcgactttttttgatatagggtctcactctctcacccaggctgcagtgcagtgacatgatcatggtcacggctcgctgcatcctcgacttcctgggttcaagtgatcctcccacctcagcttcccagagagctaggactacagtaggcacacgccaccacgccccgctaattttaagtagagacagagtttctgcatgttccccaggctggcctcatgcgatgcaatctgctccctgccaccctacctccaaaagtgctaggattacaagtgtgagccaccatgtccagcctgaagtttctattaaatggtgaaataacataagtaatctcataaaatgcttcctcttgttttataaatataagtgtatatttataaatacaaaatttgtatttactgtttaaattgacaaaaactgtatatatatatggtgtcgacgcggccgcgaatttagtagtagtaggcggccgctctagaggatccaagcttacgtacgcgtgcatgcgacgtcatagctcttctatagtgtcacctaaattcaa

SEQ ID NO: 239619 - DNA, 645 bp, Homo Sapiens
tgaattgaattttaggtgacacataagaaagagctatgacgtcgcatgcacgcgtacgtaaagtcttggatccttaagagcgggccgcctactactactaaattcgcggccgcgtcgacttttgttttgttttacttcagagacagacattttcactgtatacttgcgacttgcaccacaattcaagtctgagattacctaactgatgatgtttattaacacttcagtagaattcttcgcagcagtgaacagtagtgacaggtcattatgtttttcttgctgttttaaatcttcatcttacaatgagttattttgaaattccaaaacatttccctgtattccagaaattgaaaatggttgttcactaaaaagcctcttcttttcctgcttataaatttgccaattttgccattttaaatcacctttcttacgtttctctgaattgtatattatttgtcaatttcacagtttctataatctattgtttgctgaattgttacagtcttttgtttttaatagactagcactattcctaattattaaatctgatttacaaagcaaaaaaaaaaaaaaaagtcgacgcggccgcgaatttagtagtagtagacccgggaattccggaccggtacctgcaggcgtaccagc

SEQ ID NO: 239620 - DNA, 553 bp, Homo Sapiens
  misc_feature (538)..(538): n is a, c, g, or t
gtcagattactttgtgggtcagaagagaactggtttttccagcagccaggcatggagcagacctgggccagcacagagtgacccagggcagtgccctgaccagagccacggacctagccctgaacatacgtcacccactcctgcccccgacaacccaccacaagcccccacagttactttcaaaactctggatgacatgatttcctattacaaacaagtgacatgatctttcaaagcacgctgacttgggtttgtactttgacagtgcctttctctcccagagggagaaataactttaggaactgaattgtacctttgtcctgtcctttccctaggaggcacagacttcgggttggatttgtcagcaaggaggaaagttatggaaactttggccacttggctgttcattttattctaagtgggatagggacatacctacctggatttacatgtgagctgcgatagaatagaagtatttattctgtaaaattagacactgagatgtgcttataaccctgtttcatatctactcccacgnacttactcatatttc

SEQ ID NO: 239621 - DNA, 732 bp, Homo Sapiens
aacatcagaacgttttcccttagaccgatccccagcaggtggcagctcagattgtgcaagtgttgtaattataactattggtacttaagttatggatgtagagaatatgtttcattcatttattcagcatgtaaataaaattgatcctgttgagttatcataattgcagttcaactatctgccatgattattcttttcacgtatcattcattctgtacatttgtgtacattgagaagtatagcaatctatgtaaatgtaatcctcagtgaggttcctcagtgctaggtcccataggattgtcgttgcccttgttaatgaggtttctctgttcagcggcttcaatttttttctctttgtacatctagttttgaagatttacttcaagtttgaatcttctagaatgcttgtaagtccagttttaatttttagagtcaatttgtagttacatgtagtttaacttttgggaaacgtcttaacattgttctgaataaacttgctaatgaggtcaggtcatggtacagactgatgcagtcaacatgatttcattgcagagtttattagtatcagcaagtttttgctttgctaaataaaagtactcaatgaacacaattctacataaattttgacataccatctaatttataaaaatcaataaaaaaggttttggtaaaactttttcatgccagatgctgtttacaacaatgaacatgccaataaaacatttgttcatt

SEQ ID NO: 239622 - DNA, 549 bp, Homo Sapiens
attgatatggtgaaaagtttgtttttattttccatatttatattaaaatagttttttgcatgtgtatgtttctctgagtggggagagatagtagtcttgtgtatgtgtcaggaaaatattataagatgtttccagaattcccagaaattaggactgttactagaattccccaagatgaattagcatgaaggctaatttgtcattaaaacattgatatccttcaaaattgaaaaaaaaatttagaagaaacatttaacaacataatcatttctgccatcaagtaaaaattaaaaagtacaacagtgttggccaggtgcagtggctcatacctgtaatcgcagcactttgggtggctgaggcaggtagattgcttgagctcactagtcagagacctgcctgggcaacatggcaaaaccccatctctgcaaaaaaaaaaaaagtcgacgcggccgcgaatttagtagtagtaggcggccgctctagaggatccaagcttacgtacgcgtgcatgcgacgtcatagctcttctatagtgtcacctaaattcaa

SEQ ID NO: 239623 - DNA, 672 bp, Homo Sapiens
aagttgtgtggcatttgggcacatcatgttctctcttctacatgcgcttaaaatgacggggaggggtcagagacattgaaggatctctctttcttcttccacctctaacacggtaagatcttagcaaagtaaaaaggacagtgataacagaaaaattgttcctctaagagtcccaagtcatcttttttctcgccgtgtgtgttagcatttgtgtgtgtctgtgggtgtgtatgcatgtgtgtggaagctatacaaggaaagctgaatccatatgtagacttcatggagactagtactgctccaaatgtgcacaagccatgtgatatggtttgcctctgtgtccccacccaaatctcatgttgaaatgtaatccccaatgctggaggtgggacctggtggaaagattggttcatgggggagttttctcatgatttaacaacatccgccctttgttgtcatgatagtgagttcttgtgagatctggttgtttaaaaatatgtgacacctccccccaccttccttctgctctggccgtgtaaagtgctcactccccctttgccttccaccatgattgtaagtttcctgaagcctccctagaagctgagcagatgccagcatcatgcttgctgtgcagcctgcagaactgtgagccaattaaacctctttatgaat

SEQ ID NO: 239624 - DNA, 574 bp, Homo Sapiens
tttttaaaaattggaaccaattaatttacgggattttaattcgacctcacttatagggaaatttgggccctcgaggccaaagaattcggcacaaggcaagcctgtattgtcccactgaatgctcaagatattggttagaagtagaaaaggggagggggtagtatttagcctctgtccccactaaaaattattcccaattgtcatttgtgtcatctgtttagcttacagttttaatccttgtcaaaatgatcatttgccagggtgcataaaacaccctatttgatgagaactggttttaaaggaaaatggggccatcagaaggaagccggttggtgtgaagagacgtctgggaagagcccctggcgagggccctcattccactgggtgacccagaaggagaaaaccgcgatggcgcttctcatttgaaatgttttctttatggacagtgtttagcaattgttataatgtgtacttttgttgattgatctgtatacatatgtaaaataatttgttctctgagttaattttgttggaacaaagactttcgtgcttcctacattaaaacattttactg

SEQ ID NO: 239625 - DNA, 604 bp, Homo Sapiens
gttgagtcatttcaacctgaaccttcgggaacaggagttacccaagctccaggaattatgattgtggggaaaccccattctcttgtattcttgcggttctattttaaaacgcactagaggagacagagacgtcattgcttcacccagggcaagaggacaaaggaggatgcatggaaatacaaacagcccttctcctccaggccataccgactgtccaactagcaacagacttcacctggttttggagcaatctgaatttggaatatgccagagaaaacttctatcaggcaagatggaagactcctaggataggtctctctcatggagggattggtaataaaaaaatcatgggaaaagaaataagggagggtggaaaaaacacaccttagaaaacaacttctgatgtcccggggctacacaatgggggagctgagcacttaggaaggagagggaaaatattctgtttccggagacagctccaagaatcatgagtaggtgtgagaaacaaggaagcttacagatttaaaaaaaaaaaaaaaaagtcgacgcggccgcgaatttagtagtagtaggcggccgctctagaggatccaagcttacggac

SEQ ID NO: 239626 - DNA, 772 bp, Homo Sapiens
  misc_feature (11)..(11): n is a, c, g, or t
gttaaaggaancccacatttagttcttatacccacatatgctgtgtgttgtgtgattaggtttatttaatgaacttaatgcaagctgagaggcttgacaaaacgtccccttttgtggactgaagtagctatctttcagagaaagcatgcagatttagttggtgttaggttgtttatgttgaataaaaatctatttaaagacctggctgaagtgcattcagcctttcactgtctgcacttacaataaaaaagaaagattttattatgcatgacagagatccagattcttagagattgcctctttccctctggtctgtggaatctgccagaagccatctgttaatggatcttggaactggctgtagaaggcagagtaggttcctttgagaactgataggtccaaattattctctatccttgggtgccagatacgttgttccaaataagcattagtttgaatttgtaaagaaaacagctttgtacagtagtcattctacaaatagttttaagcagcattttgtatttatataagacaccatcctgctcgaccttcccctgggcacaaagctcacacctggtttacccttttcagagaggaggtgagtcacggaggtagccataataagtgttagaaaagagtgcctcctgcttcagctgaggaagacatttatcatcctccttttgtcctttaattcacgtctttgacatttggaaagtatttggaaagccaaaactacagaccaaaaattgtgcccttaattgagtgtgattgt

SEQ ID NO: 239627 - DNA, 585 bp, Homo Sapiens
tgcccaggctggagtgcagtgatgtcttctctgctcactgcaacttgaattcctgggctcaagggctccacccatctcccaaaagtgctgggattacaggcatgagccactgagcccagccgacatttagttattttgtctctttattacaaatgatagcattacatttatacatatttgtaatccgaaaaggtcaattccttgagtgtttctgtcttgaacttttttctgtaataggcctcccatactcattgcccacagtttgcattcagttttattgtagtgcgtcaggatcattaagagctggagttgctgggataggcctttctcaagaggttctacttgagttggaccttgaggaatctggatgaagagggggataacgaaaaggaggtgggaagggaaaaaggactgtgtggctgaaggcttgtggttagcaaaagcctgtcatgctttcgagctgcactgcccagcactgtaaccatgagccatgagtatgtgtggctgtgagcacttgatatgtggctaatccagagttgaggtgtgcggtgagtaaatacctaccagggtctgaagatttaatat

SEQ ID NO: 239628 - DNA, 532 bp, Homo Sapiens
cctatgtgtcctctttgaaaagcatggcatggggccaggccctcagccttgagcactgctttctttttgcctttcctgcccagtgagagtccaaccagtgtcttcctgtctgtcaaagatcccactttggataaaagtagtgtgtgtgtgtgtgtgtgtgtgtgtgtgtgtgtctcaagtaaataggatatgatagaccaaaagtaacattttttgaccgaatcatggtgattgtgacccccgaaagacatacaaagccttgatatatggattaaaatggctatcaccccccatccatgatgatcttcttccttaatcatactctgaggatctttctgtgtttttctgtgaacgaatgtcacgtctctcgtgctaaggaattagtgtagttagaatagatctctctctctctctctttctctctctctctttcctctctctctgtgggatgcttctgtatctttttccccagcataatgtctggtgtgatggggagctatttattgaaattaaagattatttatttgtgccc

SEQ ID NO: 239629 - DNA, 541 bp, Homo Sapiens
atttgagtcatttgaataattgtggaataaagtctccttattgagttaagccactaagatccattttttactgtgggttaagatctactttttactgtgggttaagatcttattgcaacataaccttgcccttcctgattatcatgaaatgtttaacttaagaaagaaaagagtccttaagttaatagggtgaatccactgagttaatggaagttaagagatgagtttttaaaacaattaaaaaaataaaaagaaaactttatttgaacaagaaaaagttaaggatgttacacttcaaaagaattttgaactcattaattatttttaattgacaaatcactgtggatttacagggtactgtatgatttttttgatacatgtgattaaaccaggctaattaacatatccatcacttcactttttggtggtatgaatatttaaaatctctctctgcaattttcaaatatacaatacagttggccctctatatctgtgggtttcacatcctctcattcattcaactgtgggttgaaaatattta

SEQ ID NO: 239630 - DNA, 540 bp, Homo Sapiens
aatttagcgccgaataatgaacatacgaaattttgatgaagcaatatcgacgaagtgataacacacaacagattttaacgtggggggttttccacacacacacatgcacatacacacatacgtccagacatctccctcataaaataaccatcagtttctatgaaaaccttaagtggaagccaatttcccatagtaaataatttaggagaaaattataatgcttaaaatgttgctcaaacccctgacctattactaaactataattggaacagtaaaatgcatatatgtaactatcatatcatgatttaaaattgcttaaaccattgctgcttaatactaatcaaacttaacggctgctaacaaaagttgtgaattattacacggcctctttgtaacgtgctgcatgttttttaaaacatctctgtgtttctgtttgttccactgctggtatttggaatgtaatttaacagttctcacacatggtttggttataaattctgtattgccttttagggatataaatatacatttttttctatg

SEQ ID NO: 239631 - DNA, 619 bp, Homo Sapiens
  misc_feature (58)..(59): n is a, c, g, or t
tgctttagcaaatatgcctcataataaatgctaaggagtgtgttacaaagttatctcnngcctttctttttctttctttgtttcaagtcattgtagtcacatacactgctgtggtgatggttccatttacaaataaagtctgtttttttggtttttttttcttaaagagatgtggcctgtctatgtggaattgaccaatgaaaagatatatggctgcgatttcattgtcagtgctacaggagttacaccaaatgtagaaccttttctccatggtaacagtgtaaggtgaaatttttttgtccagctgtgaatatatttgaagtatttttgtgaagatctctaattctcaaacatgaataattattattttagtgtacaactgtaacttaacatggttggaaacagtttggttaaaacattgtcttgatttacggtattttttactgcttaaaatccttacatagttatatccttgcataagcgtcatcagtaatggtttataatgtacaatttatttatctaaatgttggtaagagactgacacctcccgtgacttctcaaaaatgattcttttagagaaaccatcttgtattttttgcttttcagcacttgaagctta

SEQ ID NO: 239632 - DNA, 524 bp, Homo Sapiens
ttcttccctgttataaattctgagagggcagaggccaatgtctgcttcttcacctcttcctcggcccctaacacagtgccttcatgtgctttacatgtaccaagtcctcgataatccttggtaatggattattatttcaatgtgtgcttatctgtgctctatctcataaactaagaaagtacagactgagggcagcaggtccagcctgtacttacagagtatgccctataaatccattaggaattataggccaggcaccgtggctcattcctgtaatcccagcactttgggagaccaaggcaggtggatggattgagtccaggagttcaaggccagcctgggcaacatggcaaaatctcatctggacaaaaaattagccaggtgtggtggtgcatgcctgtagtcccagctactcaggagctacttagtggggaggatcacttgagtccaggagtttgaagcctccagtaagctgtgatctccccactgcactccagcctgggtgacagaacaagaccctgtct

SEQ ID NO: 239633 - DNA, 610 bp, Homo Sapiens
gccacaatctttccatttttgcaacacgcacgtttaccatttacgatttactccattttcagcccttccgaaaggacttgagattggtgggactttgttagtgccaatcaagatgccactcgcagtgaatgatccctgttcctttaagaaccaggctgaagctgggctgttttgggacctttacaaaatggaacttttctgcctgacctaattgccaggatagccgactgagccaagatagttttgtgttcaccaagcaactgtggaccaaccttagcttcaggaaaacagtggtaaaaaaagatcgatgaggaacactgccaaagaaataccctttcttccccgactgaaagatggctttgtccgttgagttgaaaactattaagtcctgccttcctcacttttcatcacgtggcttctgtttttgaattcctttttgttttcagtgatcccaccaccagatatccacattgacagctatggtgaaaattatctaagcttcaccctgaccatggagagtgatatcaaggtaatgtgggaatttcaagccagcagctggatggggctttattttgtatgggaactgaaaggacatagcacagtaagactg

SEQ ID NO: 239634 - DNA, 613 bp, Homo Sapiens
taatggtagaaaataagtggtggatgcagaagtgattgctgtaaaatcttttcaattttgctgtgtgtttgaaatttttcctaataaataatagtttaaactggttattgtgaatagactttaggggagcaaaggtgagagcaggaagaccagttaggctataacaataattcaggtagcagtggaagtggtaggaagtggttgggagcagatgtggtgtttgaattacaagtcagtaattcagaggaaataccaggtaggaaatacaaatgtatgaatccacctaaagattaggaaaacaaggacaaatgtcttgagaattaaaagaaaatgctcagaagtgtaccctaaagcctcttactcatgcttttgttctaggctggttttggttgtagatagttatcagttattatatactgccattcagattatttatatgtattactgtccacaactcacttgtgttctaaagggttttttttaataatgttcttgtcttcccaagcagattacatgctttttgagaaaagatctatttttttgtatacaccccgcaatgccatattcctagaaggcattttcaatgttcacagaataaaaatatttgaataca

SEQ ID NO: 239635 - DNA, 638 bp, Homo Sapiens
cctatctggtctgtaccctaatccgttaatccatttttttttgaatgaatttcaaattaagttgtggacatctgtgtatttcacccctaaatacttgagcatatccctcatttaacttgatttctctcttactttctacaattttatgcaaatgagctgtttcccataggttctgtcttgatcttaatcctttaagggtaagggctaacttgtggttgtgttaatggtcttcatcgctgctgcctatttttttttttaatttccttaaaacaaaaggtactctcaaaaggcatattgcacatgattagcaagattcagaaggaagtggttaaagtttcttacatgccttatacctatgcttttagttcttgttttgtataaggaatgttgcatgaggatattggaaaaaaatttaaaattaagagttgaaggcggaacctgatctataaggatccattatgttgaagccaaagaagcaggtctagctattctaagtaagtaggctggagaggtgtttcttaactctatctgggttttgttttccatttgaagaaaaattattttaagcaattaccatttttgattactgtaatgactcctgtgtccaaaaattaattacgtttctaattattaaaata

SEQ ID NO: 239636 - DNA, 634 bp, Homo Sapiens
ccaggaacagcacttctggactttatgttctgacgtttatgttgggaccttgaaattaatagtagcacctgatgctgatgctaggtggattttaagccaaacacataatatttttactcaggctggagtgagacagctctacgtacagattgactttgcagccatgtagtgaatggaaagaaattatgcaccttttatggaccaaatttttctggtactgtacgatccaaaacattgtacccagctttttaaaagagagaaattatcactacaactcccgagcactaagtagacggggtagagtcagccgttcatgctttgtggggagttcacagctaagggatcagatttaagaggatatctcctggacttttggtctttttttttgtgctctttcctccaaatctttttgacttctgaggtttttagcttaggatgttaatttgtccttttgtctttctttttttgtttttgttttctgtttgtttgttttcatgttgaatgcccacaccaccatcctctcatcccagccagtaagaatttcagttgtgggcctccagtcttctggaatgtcttcactgcagctgctggaaatcactgctttcattcccacaaaaccagtattacttttttt

SEQ ID NO: 239637 - DNA, 644 bp, Homo Sapiens
caggccggttttggaaaaggaaaatgacagtttggtttaaaaaagagtttaaggaaaaattttcatgtaatagacattagaaaatccttcagctacaatcagtggaaatgcttagtaactatattacatatcctttaaaatacctctaaagtcatttgaggtaggggttaacaaaattggggaaattattttaagaaataaagagcaaataaaaatacttatctctggcttttgatggactgtccttgcagttaggatgtgtaggaaatcctcagttctgtttctttagtcccaagcatgctcatgttttcttagcttttggcatgattgattcagcatgagagaggcaataggggataagtaggagtacctgtgccttaataaagatttgtaaattaagtggaagatggttatagaagagtagactgggtccagattgtgtaagaccaagaatgtcaggttcataacttttagagcaggagaattgtcaagtaaaagtgatggtgttaggaatattaccctggtaattaagtatatcagggtgtccaatcttttggcttccctggaccacattaggaaaataattgtcttgggccacacataaaatatgctaacactagtgatagctgatgagcttaaaattg

SEQ ID NO: 239638 - DNA, 640 bp, Homo Sapiens
tccaccctgttttcttcaagcatgagtactttgatttatctggttaaaaaattttcagtccttcatactgaggtctcagtcatcttacaataaagacagccagtttactccccactttctagcctccgactcttgaaagcttccaagaaacacatccagaggtcacatattgggcaaccgaaggctcatgtgaaaaagccttagagccacaaaaaccttgcgcctcagtcattaatgtaatttggggcagattttatgaagcaaactaacgcctttgaatttttttttttcagttttaacgtgagtataattacttccactcctttttccactttccagtctctccgagttgcgtccctaaaggatcctgctgcaagaaatgagtgaatgaatgaagatattaagaattaaagtactgatgttaatgagagcatgggtgatgtggtttggattgcttgaggccaggagattgaaactagcctgggcaacatagtgagacaaaccttgtttcaaaaaaaataatatatatatatacacatacacacactaagtgaggtggtgtgtgcttgtagtcctagctgcttggaaggctgagatgggaggattgtgcccaggtgacagagcgagacccagtctgtat

SEQ ID NO: 239639 - DNA, 616 bp, Homo Sapiens
ccaaatagcttttaaagacctggcccccactcccttgcctttaagatttttcttcaagtgtctgtctcaaatgatggggtcagactgttcattatgtttgatttcttctcccccagctccattgcctgtatccattccttccttcttcttagagttggtggtggccagactagaccagggagggtgctgctgacaatgacattgtaattgtagaaatcgtgtgcctgacacaggtctaaggactttccaaagtattagtcagtcagtcagtcctcacacaggattgtaggtactgtcataactccatttcatagttgaggaaaccaaggaccaaagagaaataactcacatgaagtcacacacttgataagtgatgggatgtctcatcccaagccctgccctcttaaccaagatggccttgtgtctgatccatgtcagaaaacagaatagccgacataaactcatttgttagccaggtgtggtagcccacgcctgttgtcccagctactccagaggctgaagcaggaggatttttgagcccaggagtctgaggctgcagtgagctatcattgtgccactgtactccagcctggacaacagattgaggccttgactc

SEQ ID NO: 239640 - DNA, 508 bp, Homo Sapiens
gcatttgtattttttgggatatatgtagtacctggaaccaaatatttttaaacatttttaaccttttcaagtacttctaaaacttaaaaattatagaagtccagatacaaaaggatgaatacatgtctccacttaattgaggtacctagagtagtcaaattcttagagacaaaatagaatggttgttgccaaaggctggaaaaaggagagaatggggagttactgtgtagtgggtacagagttttagtttggaaagatgaaaacgtactggtgatggatggtggtgattccacaacagtgtgaatgtagttcatgccactgaattgtacagctacaaatgtttaaaatggtaaattttatgttatgtatatttttaaaaaatcaacatatacgcccctccttatgcctgcagaatcatcccttatttttttccctcagctcagagatggcagctgacctcactcttttagagtgagaccccaaaataatagtttatgtgatataaatt

SEQ ID NO: 239641 - DNA, 549 bp, Homo Sapiens
ccctcggaaaaagtccaggaactaggtccaaggcaaagggttgggggccacaaacaaggccaaggcggggcatggaacagcaggggtcagatgttaggggaagtacgtcggcacccgggtggggatcttgaatactatgtcaggcacccacaacaagagctttgggtgctttgtgtctagggccgggtacccttgtttctgctgctgatgccgtgtttccagtctggattttagcaaaattaactgacccatccttctatctgatgcctgttttcttctctctcattagggagttctgggtccagcttttagcccacttatctgcctccagctttcagcctacttatctgccttccttaatcttttcccccttctaacctcttttgctggcctgtgctcccagagttcccagagtctgtctacacaactccctgtatgtccttggcctaggaattttttcctgtgtttctctaaccagctccttagaacctggaacttgtttccatggtctatacttcttttctctatttatccatctgtcttctgatt

SEQ ID NO: 239642 - DNA, 617 bp, Homo Sapiens
  misc_feature (247)..(247): n is a, c, g, or t
tcgtatgttggtgtgaaatttgtaaccggataacaatttcacacagggaacaagctatgacatgattacgaatttaatacgactcactatagggaatttggccctcgaggccaagaattcggcacgagggctttgagtttcataaataatgcttctggaaatctagtaaaacctttaaattttggccaggcatggtggctcacgcctcagcttcccagagtgttgggattataggcgtgagccactncacctggcacatgtatatgtatgtattttttacaaaattggatgaagtataatttatttgctaaatattttcacttatgccatgatatcttatttaatctttaatttgtctatgaaaatacctgctctgctaggggacttctagttgaaaactcattaatttaaaaaattaattttgaattcagccacctattcttttttctaattgtttcttgtagcttttgctttgattggaataactttattctaggaataaagttgtgtcatctgcaaacatgaatcatgtacacatctgattttcttatatttatgtctcctttttctcttcaaattacattgcctttaccattgatgggaacctgggtaataaa

SEQ ID NO: 239643 - DNA, 566 bp, Homo Sapiens
ttttcccgggtcgactacaataactaaattcgcgaccgcgtcgactctacctcttccttgctgtgtctggatattgtcacatgaggacttgacatgcggattgtggcagcctctgtgaccaagagcggaagacaacagcagcatagaaacctcaaatgaaaaatctaacatctcaagctactaatttagccaaccttggcatcagctatctctggtcttagtatatgaggcgataagcccccactgttcaagttgggtgtctatcaattgctgcagaatagaagttaatgaggcttcctcctcctggatcccctactagaccctgacatgcccattcagtcacaggcagaaagggaagcacagggtaaggagacctggctgactgtgccagacgcagatcttacctgtcctgcttagaacactcaaagctcaattggttaaccaaaaaaaaaaaaagtcgacgcggccgcgaatttagtagtagtaggcggccgctctagaggatccaagcttacgtacgcgtgcatgcgacgtcatagctcttctatagtgtcacctaaattcaa

SEQ ID NO: 239644 - DNA, 607 bp, Homo Sapiens
gataaattaagtccagtgtttgagccaaggttgccacctgtctcttaacatctcactgaacataagtcttgaggtattaggacgaccatactgcctctgagctgaaaacattcaaaagttcacatccctgtttgggggataccattcaccgccttcagcccagatgatactttcctttaaatctgtgtctctgtgtgtataacaaagaggaagatggaaacaatgttcatggaaactgctgttgagccccttgtcccaccactcccgccatctgctgcaggcaggaaggcatgtgagtgtacgttttcttccaggagacatcaggtccccctggattcaaattaagtgcaatattttgcaaacagctcttcttagggaaatctcctgaaggaaaaaaatgtgacagaatgttccatagtctgagagaatggaatcgttgagcatttagtacaagtccagtgtgtgtgagcgggacttaggcagctcaagcttgcttttttttttaagcgtacaattgagtggttttagtaaattcacaaacttgttcaaccatcaccactatctaattccagactcacgcttttttaaacaataaatgtcatttcat

SEQ ID NO: 239645 - DNA, 596 bp, Homo Sapiens
atggcccccaggagtggagtgaaaaccttgttcaatccagcccctgccattgctgacctggatccccagttctacaccctctcagatgtgttttgctgcaatgaaagttaggctgagattttaactggcctcacggtgggcagcgctgcagatgctggggaggctgcattagtgctcttgaaaaggggctgccaggtggtaatcattaccttaggggctgaaggatgtgtggtgctgtcacagacagaacctgagccaaagcacattcccacagagaaagtcaaggctgtggataccacgggtgctggtgacagctttgtgggagctctggccttctacctggcttactatccaaatctgtccttggaagacatgctcaacagatccaatttcattgcagcagtcagtgtccaggctgcaggaacacagtcatcttacccttacaaaaaagaccttccgcttactctgttttgattgctattagtcccaaaataaatatacctgggaataaaatgtacttgggggtggctgctcctggctaatgcttattagaaaatgtcctcgtcccctttctttgcaaatattagttcttttac

SEQ ID NO: 239646 - DNA, 576 bp, Homo Sapiens
acctttctagctaaacatccccaccaaagacttgcctttcccttgccagatctaaggacacaggcctggggtctgccacaaactgcaaagtaccatgtctcccagagcatgttccagaacccctgtccacagatgctctgcaaagaaggtttccagggcactgggtttagctgcatgctacgcttctatacaagagcacaccagagtctccacaccactgctaaagtaaaacatccaaactttttgtatttggttggctatttctgaaactttttttttttttaaggaatatctgtccaaggggtatggtttgttatggtcgtgtcatagatactggagaaggagcgatttgtgggtagtgtctcatggtacagtggaaacagctcagtcacagggtgtgaatttgagtcctggctctgctttgtgactgggcttgagaactctgggctgacctataaaaacctgacattgggggttgaattaaaccagtgggtttgtccccatgagaagtcatggctaaactatgcatagaaaacgactggaaagaaacattaacagtgactatctttgcccagt

SEQ ID NO: 239647 - DNA, 588 bp, Homo Sapiens
tttgccctgatgaaaagcctttcatgattcagcagccctctacccaagcagtagtttctgccgtatcagcaagtattcctcagagctcctctcccacaagcccagaacctcggccatcccatagtcaaaggaactatagtccagtggcaggtccaagcagtgagccaagtgcccacacgagcactcccagcataggaaacagccagccaagcaccccagccccagccctgccggtccaggaccctcagcttctgcaccactgccagcactgtgatatgtactttgcagacaacatcctttacactattcatatgggatgtcatgggtatgaaaatccttttcagtgtaatatatgtggatgcaaatgtaaaaacaagtatgattttgcctgtcattttgcaagagggcaacataaccaacattgattgaaaatagtcatattttacttagttttgctgtttttgtggtttggttttttttgttttttgttttggtcatccctaataaagtgtctgctaattcaaggcttatacattatatttatagaatataaatttgtcagtggaataaaatttcccctttttttca

SEQ ID NO: 239648 - DNA, 603 bp, Homo Sapiens
ggcgtcgacttttttttttttttttttgctctccattctgcaaaatttattgtgatttctggtctataaaattggtgactatagaaccataatcctgcattatattctttctttttttcaggtagtaactagtacttcaatctgttcttagctttatatttgatgctcagatatattaatgggaaagtggctgtttctaccaagaaaatgggttttgaagtcttgaatccattcagtaggtgtacgtttatatgaaggcaaacgtttccaggagccatcttcacatttcttcataaactggtcaaagagcagtcttaggtccttgttccagctggggttggggacagaacagtccttaagaatgacttcctcagaagaaaatgacctcatgagggtccgtggcttctttcttgaagtcagtgagaccaagaacccatcaattccgacacagtatgtaatcctgaattatgcacctgtcacaatttgatgaattgtcgacgcggccgcgaatttagtagtagtaggcggccgctctagaggatccaagcttacgtacgcgtgcatgcgacgtcatagctcttctatagtgtcacctaaattcaa

SEQ ID NO: 239649 - DNA, 432 bp, Homo Sapiens
aaatgaggcattgtatgatttggaatggaagcccagttgtagtcgtaagaattttacttaattcaagaattattctcactgaatatgtgccagttctgaaaggaatgcaaagtcaaattttgcattttctttgctcaagggcctttagatgtaacaacacagacatgatacaagggtgacaatgacattatgatttaaatatgttaaacaacttattaaattgtgaatcaacaaaaaattatgttctttattttatggttttgcatagtcatgactcactgcctacatacccctattgttcctcagttcttatccctgatttcttacaggatggcctaagacagcagtagatgtttttatttagccaaaaaaataaaaaaaaagtcgacgcggccgcgaatttagtagtagtaggcggccgctctagaggat

SEQ ID NO: 239650 - DNA, 701 bp, Homo Sapiens
aagaatttattagacaaacacaccaatagattgagtctaaggatttggttggaaagccactgggctttttaaagcagcagaagtccaaagtcacacgcttcaagcattactctgcaatgatctgtggaaaccagaagggtcaggaattacagcaccgtgctgggccacgaacagatcagcctcccacctctctccctattccctctcttctactgaagtccatgattctggtacctgagaagactggaatgaaatgtttcccatttattacagaattcagcttctttgttacagaggaattgtcacatttgaattgtctgtttaatatgggatattgcttttgagaaaccaacaaatagttattaaaggagtgtttaccgaagtgtaaggtgaatattatctagtagagtaactgcatttttaatctcatctggcaccaactgtcttttagaaagttacaatgtgttgtttgggggacattcttctttagaaggaaaagagtctaattagtggatattaagtaattaaataatacatactatcaaatattatgagagtcacatgaaccatgaagtcttcacttaatttagggtcgacgcggccgcgaatttagtagtagtaggcggccgctctagaggatccaagcttacgtacgcgtgcatgcgacgtcatagctcttctatagtgtcacctaaattcaa

SEQ ID NO: 239651 - DNA, 638 bp, Homo Sapiens
  misc_feature (129)..(129): n is a, c, g, or t
tttttttttgcttttaaagggaccccacaggtctttgtgaatgtgccccctgaaaggcttgtgcacacaccccactcagagggtagcctgtcgctggtcttcagtgttatatcctccgcctccaagacnccatgggtctcaggcataggctgggtcttcagaaagtcctagtgtcctttgtaaaaatttaaatgacttgggatgcaggcctgggataaataatctccccaaaatgatatttaaaggtaaagctgaaaatttaacaatgtgtaaggtaaatgctgtgtctaatcgattctaagacacctttaacgtcttggaaattaggaggcaatttcagtgatgtctcagtcaccactggccaggtggccacggtgacaaaactgacatggtcataaccaactcatcttggtcctattttccttttacgtgtgtgtacaaaaatcgaattcttatttagaaaagctctttcaacaagagcgtaagaaaaattcgaagtggtggccctgtaccgtttgattgcctcgtgtcgacgcggccgcgaatttagtagtagtaggcggccgctctagaggatccaagcttacgtacgcgtgcatgcgacgtcatagctcttctatagtgtcacctaaattcaa

SEQ ID NO: 239652 - DNA, 466 bp, Homo Sapiens
ctatgaccatgataccgccaagctctaatccgcctcactataggaaaagctggtacgcctgcaggtcccggtccgaaattcccgggtcgactactactactaaattcgcggccgcgtcgactttttttttttctatttctttccttttctatctgctcatgctgtttctcatcgtctttctgtgtatcttcatcactgtagttaatcatctactttttaaaagatttgtcattactatcaactagaatacctacaagcactgactgctatcagacatctatctgcctgatgtttgtcatatgctgaaacacaaatctatgcttctaataattttattagatggaaaagttaatggtcttaagtaacgagaatgtcgacgcggccgcgaatttagtagtagtaggcggccgctctagaggatccaagcttacgtacgcgtgcatgcgacgtcatagctcttatagag

SEQ ID NO: 239653 - DNA, 579 bp, Homo Sapiens
gtacgcctgcaggtaccggtccggaattcccgggtcgactactactactaaattcgcggccgcgtcgactccagcctgatagacagagcgagacctggtctccactccccccaaaaaagactttataaggaattatacttcaatgtttatcttatactttctggtttctttttttttcatttaattctttgttctgtttttctcagcgaactgtatgagatacagatccactgatctttttctagatagctctccagttgtcccaaaatcttttaagtctatttgtaactcactgatagttgtatgctactttttcatatattaaattctcatttgtatatgggcccatttttctggatttttgtattctgtctcttgattcctgcttgttcgtgatccattattctctttctttttttttacagtgtccctagttaatctcacttttttcatatgatcttcagaatcatgttgttttgttccagaagcaaaaaaaaaaaaaaaaaagtcgacgcggccgcgaatttagtagtagtaggcggccgctctagaggatccaagcttacgtacgcgtgcatg

SEQ ID NO: 239654 - DNA, 602 bp, Homo Sapiens
tctcggcacattttcttaaattggattctctgttctttcatttcccaaattttgtgagctggttttaagccagcaactctgattttcacttgtgctactcctccatgaattgattattgatgaattaattatccacctatgacctcattcacagtaagtcatgagtaaaaggcacctactcctgttccctgatgtagcccagtagagcctgcaccaatacggctgtggcctgaccagtcactatatgattatgaaaggagatccaacttaaactaaagggaattattttgaacaagattcatcaaaatcagagcacatatctcaccatattcagacagctgaggatagttgtccatccctctactaaccaatcactacctataacacagtctggattctttcgtaattcttggtacatagaagcttctcagaaattatttgatgaaaggatggataaatgaataaataaattattataaacacttgctataagatctaagaataattacactggttgttaagggtgtgcatgaaataacaaaatataatgaatccttaattagtagaatatatttaatgatttccatttacatttatatcaa

SEQ ID NO: 239655 - DNA, 711 bp, Homo Sapiens
aaattcttcccattggtttcggttaaaagctttttccattgaaaatataggccttaattgtctttaacattgaagtaacttgggagttttattcaattatgagccagcagatccttagtttaggcccttatattgcatacctaattagaactttccccaaagttcaactgcatgaccttaatgtattggagcacgtcttacaggtggacttaaaactctagaatttcctgagtcgttgttattttccactgaaggtctttccactgtacagcatttcaggcatcatcactatgactcttttttcttgactgttgcttgttttcccactgctcttttccccaatggcgagctgggtgtgccgtctctggggctctcttataggaactcacagtctagcctactgtattttgttttcggagaagtgaaagtgaacactgttatttgccatcatacctccatcaagaatttcacttcactaggaaatatatgggcctttcatggaactgatgattactgtggctgatgtgagtgttgggcttaggatgctcagcatgtggtagttggaagttttgtaatctaagatggaaatgagtgggccatttaaatggccctctaaaggtcacagtgactgtcagaagaagtaagaagagagtataattcttcagctcctggacttccataggaaagcttgaaatcttatacccagattac

SEQ ID NO: 239656 - DNA, 688 bp, Homo Sapiens
ccaagcccaaggttcagaaagtttattttctaactttaaatagctagtaaatggctaacacaggattaaatcaagctctgttcaattcaaccactggtttttcaatttctcccaagttgattctcaaactgcaggaaatctttgtgttttccccttttaagtaagaagcagaccactattagggtaagtgggtagagggagcagaaggtgaagtaaaccattcctaaaataattgggatataattggaagcatttgctgaccctttccacctcatggttgtaggatattacaagtatgttttctttaagaatgctcaataagccaacatagataaatttgaattttaaacatagataattaatagagtgattatattaattaatcagaaccagtattataggtctcatctactgaacatttcttttaactttcagctcttttggtgcacttctgttctggataaaatataattgtatgctcagaggacagaaaaattttacaaatgagcttaggcttccctgccagaaaagaaaggatgaaatagaaatgaaaattaaaattaagtaatcccttaaatgataatatagttaaatgtgaaaatatgcctttgataataccaaattgggatttgcacccaaaacacattaattggattaacctgttttagtttgtcttgtatctgttgcc

SEQ ID NO: 239657 - DNA, 621 bp, Homo Sapiens
aagtctattttgcaccaatacagcgtttcataatttagcatttaaaatacagacagtcccccgacttttggtggtttgatgtgggatttttggtggaaaagcagtatacattcagaatgcacctctacttatgatggggctacttcctggtaaacccattgtaatgtgcaaattacgggtttatcaggaggtgaccccatcggtaatggagaagtgctgggaggtaaatattagaaatggaagtatctaaatgagtaagaaacagcatgggagcataatttggccaaaatcaaacagaactaaagtagtcatgtcggtaagaatttgggactgcaggccagttacgatggctctcacctgtagtcccagcattttgggaggccgaggcgggcggatcacttgaggtcaggagttcaagaccagcctaaacaatatggcgaaacctcgtctctaccaaaaaaatacaaagattggctgggcgtggtgtctcatgcctgtagtcccagctgcctatggggctgaggcaggaggatctcttgagcccgggaggtcgatgctgcattgagccgagattgtgccactgcactccagcgtgggcaacagagtgagactgtctcaggg

SEQ ID NO: 239658 - DNA, 721 bp, Homo Sapiens
tgaaaccaaccttgggtttagtgtttcatttgggagttatttggccagggccttttgaacaatagtgtccccataaagtggtagataaaatatgtgtaagaatcagcttttttttttttaactataatatccttcagaaatttctaactactttgtaactgcatggcttaacctggtgataaaagcagttattaaaagtctacattttttttttaaaaaagaatagaacaaataatgggagcattgggttgacctttgcaaattatctagttttatttacctattttacacaggagaagactgagagaagggaggagtagcttgctgtagttcagacagcaacttatttcaaagctggtgctaaaacctagagtgaactggtacttctccatttctgaaggaaatgcagaagaaacagaagcagaaagacaacattttggcctggacatatttaacttaaagatgactccatttttgaactttatttcttggaatagagtatcttctaaatttaaactgatccaactttcacaaaattgggcagttagaagtcacagagggaattagcagctgttgttataagaaaaagcaaagggattgttgccagacttcataaatcttggcatatttgagaaaaatgtcccaatttgttacatatgctcattcatgtgtgtaaacctttggttatagtgctttgtcaatataaatatgttttacatta

SEQ ID NO: 239659 - DNA, 585 bp, Homo Sapiens
ttgccaaactaattaaaaatgtgggtttggacctcaagagaaaaagttccaaaaaattggacttgggttaagggatggctatttttgaagttaaatctatggcttcagtataaatgaagacaatttttttttttctataaccactatgaagttcccctccccctccaaattatagtattgtctttggagtgtttgatccacattggcagggactgggatatggagaaaggagtgaaaaaaggagtttgagactacaggaaaagtcattagcaattgcacttagaattgaaaatcatgacagaaagaccggtgcagtggctcatgcctataatcccagaactttgggagcctaaggcaggtgatcgcttgagcccaggagttcaagaccagcctaggcaacatggcaaaatcttgtctttactaaaaatacaaaaaattagccaggcatggttgtgcatgcctgtagtcccagctacttaggaggctgaggtaggagaatcacctgggcctgggaagtcaagcctgcagtgagctttgaatgtgccactggactccagcctgggtgatgggagtcggaccctgtcc

SEQ ID NO: 239660 - DNA, 617 bp, Homo Sapiens
taagcgaaagggggctagccactggggggtggggacaaaatgcgtgtttgttagggcattgttggggccgaaatcccgagtaaagcttgggtttaaaacctgattttcccgtctcggggtattgatcccaaacgcgcagaggcgttgcttgaacgttgtttgaactcctaggcattccagggggcaaaagcacctcggcaaaaacgtgcaggactgcatgttactttggttcgcggctgacacgccgactgtgcgccggcctgtcaatcaccgggagcagcaacagggagcacatggcaacgggctgcgggcgagctggccagcggcccgcccggggtcccagcccttcgaagaaagggacattcacgagcttctatctctaattctctgtcgcaggcatttcggccgtggaaccccaggctcggaggactgggtgtgagcgctgcccgggagaggctgacctgccgggaccggagtgcccggggacgctgtgcccccacttgcccaacgtgcggaatcggctaagcgcgtcggcctgcgcggggcacaagggacgacgcccgcctttctctctccgagaaggatccccaaacctcactctcttcactcctccccgc

SEQ ID NO: 239661 - DNA, 679 bp, Homo Sapiens
gttcccaaaggaggctgaagtgcaaatggtgtgtttggtgcagacactgtggagcaacatcgcagggtctaagatgtgaatggcagaacaattacacacagtgcgctccttgtgccagcttatcttcctgtccagtctgctatcgaaactatagagaagaagatcttattctgcaatgtagacaatgtgatagatggatgcatgcagtttgtcagaacttaaatactgaggaagaagtggaaaatgtagcagacattggttttgattgtagcatgtgcagaccctatatgcctgcgtctaatgtgccttcctcagactgctgtgaatcttcacttgtagcacaaattgtcacaaaagtaaaagagctagacccacccaagacttatacccaggatggtgtgtgtttgactgaatcagggatgactcagttacagagcctcacagttacagttccaagaagaaaacggtcaaaaccaaaattgaaattgaagattataaatcagaatagcgtggccgtccttcagacccctccagacatccaatcagagcattcaagggatggtgaaatggatgatagtcgagaaggagaacttatggattgtgatggaaaatcagaatctagtcctgagcgggaagctgtggatgatgaaactaagggagtggaaggaacagatggtgt

SEQ ID NO: 239662 - DNA, 573 bp, Homo Sapiens
tacgactcactttagggaaagctggaacgcctgcaggtaccggtccggaattcccgggtcgactactactactaaattcgcgaccgcgtcgacgatttttgtctgaaaagctttgcttgtataggggaggaaaatcgtggtgattctttaaggcctgtaggcgaccttttccagaagtttattgtggatcaaggagagaggggatctccgtaatttgaagtgaataggttctctggaagtttcttgttttgtttttgagacttgagcatttctataatgtgaaggggagagtccggaagaggcagatattttccaagtatttacatgagcaaccacaagagtactttaggttgctggatgcgatacagttgtggtgtggtcacagctggatgtacccagaggtgcggtacagtacagagtagcagaagttctgccattagcattttggagaaaaaaaaaaaaaagtcgacgcggccgcgaatttagtagtagtaggggccgctctagaggatccaagcttacgtacgcgtgcatgcgacgtcatagctcttctatagtgtcacctaaattcaa

SEQ ID NO: 239663 - DNA, 552 bp, Homo Sapiens
aatgggaatttggccctcaagcccaagatttcggcacgaggcaaggtgtggtggtgcgtgcctgtaatcccagctactcggggggttaaggcaaaagtattgcttgaacccaggaggcagaggttgcaataagctgagatcgcatcactgcactcaagcctgggcaacagagcaagactgcatctcaaaaaaacaaaacaaaacaaaacaaaaatccatgaacaagtggacctgcccagttcaaatcattgttgttcaagggtcaactgtatattattttcactggaagttttgaaattccagaaatatgcttggaaatccccgcttgaaatctccttggttggaaaccagtccagtgggtgactggcccagaatgatgcttctcctcggtggaccccctgggctgagcagcctgtgttcctgcctcaactcccctgaaccctcctgaactttctacacacatgtgggcactggctttgatactggcatttggaagggcacttgggaaattcagagaagtacccattattaagataaatgatgttttatcaa

SEQ ID NO: 239664 - DNA, 583 bp, Homo Sapiens
ttgatttttttcataaaacttggttcttcttttggtctaggtttaaaatataccttaattaattctttctgggctgttttatatctatgttcctgtcagcatgggaatctctattattagaaagctattaacttttaaaatatgtatcttttggtgattttctttgttctaacagttttagatggcctgtttgctctttctaaatataaaatcataggtatttctattttgtttttgtgtttcataaaattgtaataagtttttttgatattttttcattacatatgaagttaattgttggttttaaacaaatgttctttgttaggataacagaaataacatcttctattcttgtttgttggaagctaaaagcttgataaaaggaattggtgtcttttgatacaatcaaatttttatcacttaaattgcctaatatgattataataagggtttttgtaatattaaaacatccttaaattcctgagataaaactctacctggttatagtatatgttcttttaatgtattatctttcctatttgctgtacatctatacattcataaataaaattcatttatattt

SEQ ID NO: 239665 - DNA, 457 bp, Homo Sapiens
  misc_feature (71)..(71): n is a, c, g, or t
  misc_feature (74)..(75): n is a, c, g, or t
  misc_feature (78)..(79): n is a, c, g, or t
  misc_feature (81)..(81): n is a, c, g, or t
  misc_feature (83)..(84): n is a, c, g, or t
  misc_feature (86)..(87): n is a, c, g, or t
  misc_feature (89)..(91): n is a, c, g, or t
  misc_feature (93)..(93): n is a, c, g, or t
  misc_feature (96)..(97): n is a, c, g, or t
acattgaataagcttgtttgtgcccccaagtttctccattttgtgggaatatagagaggaagggtaataanatnnagnntngnnanntnnngnagnntctttcccctcccccacctttaattataatatagggataatggcctccaattctttatttagtatggtaggagatctttcaaatgatattgcatataaagtagctggcacttaagagctaatatttacaagggcctgttttctcttccctccttaaaacagatttattgtccatcagctaacttgtttaactttttaattacaataagtccttagtggagaccagattattaggtgcgagtatatcatatcaaatgctattacatttaaaatatctgaatgagagagatatttccaaatcttgtataaaaagtaataatagctagatggcagagtcacagtacattaaaattatatgtcc

SEQ ID NO: 239666 - DNA, 548 bp, Homo Sapiens
attgttaggccctcgaggtatcagcagctctgtcctcagaatgggtcccccacttcacacagttgtaggatggctacagcagctccaagcagcacattcagaggaagaagaaaaaatgtttcatttgtgtggttttaagcataaagaagttgtttcccagagctctttgccagctgtcatccctcaaaactcactggccacaattgcttcacatgcccctgcctgaaccagccaccagagggggttaggaccaccacagattgactagatcctaaggattctctacctggggctggagttcgggtcaggtgcccgggaagcactgtgcggtgtgggaggatgaatatgtgccaatttggaaagatgagtatttgtgggaaaatgaataaagcaaagtgtaaatcagaggtttaagttaaaaaaaaaaaaaaaaaaaaagtcgacgcggccgcgaatttagtagtagtaggcggccgctctagaggatccaagcttacgtacgcgtgcatgcgacgtcatagctcttctatagtgtcacctaaattcaa

SEQ ID NO: 239667 - DNA, 592 bp, Homo Sapiens
gggcgcaatgggttcacgccttataatcccaagccctttgggaggcccaaagtaaacaggtcccctgaggtcgggagttcaagacaaacctggcccaacatggtgaaacccctgtttctactaaaactacaaaaaaattagcctgatgtggtgttgtgtgcctgtagtcccagctacttaggaggctgaggtgggagaattgcttgaacctgggaggcggaggttgcagtgagccaaaattacgccactgcactccagcctgggcaacagagcgagacagtctcaaaaacaacaacaacaacaaaaaccctattccttgcctttgtaggagtcaaaataaatgaacttcttttttcttttttttattattatactttaagttctggggtacacgtgcagaatgtgcaggtttgttacataggtatgcacgtgccatggtggtttgctgcacccatcaacctgtcacctacattaggtatttcccctaatgttatccctcccctagccctccatcccctgacaggccctggtgtgtgatgttcccctccctatgtccatgtgttctcattgctccaaaataaatgaatttaca

SEQ ID NO: 239668 - DNA, 670 bp, Homo Sapiens
  misc_feature (666)..(668): n is a, c, g, or t
cccccccccccaaatcctgcccaaaaaattccaaaactagtccctgtccagggcaaactctattcccatttcttgaagtatagttttcacaggaaggcggcacagcctgttaaaaaagtttgcctctactcctcaaaccgtgctctatgtgaatgaattatcacatacatatgaatctaattttcatttcagatactgtccaacttccccccttaccaacttaggaaaacttcatctttcttttcagttttatagatgatgtcattgttgattttaaattataaaatggaatgcttccaaaggaggttacagttcctgctgcaatatatcagtcttagaacatgaacaacttgtaattgttaagtgcatgttcaaagctaattgtgtggcaattggttgctgctttccaggaaaacttttaaaagcagagtatattctgagcagtctaataagcaccaatggagcaacgggtgagtactttcatatcttcacaatgacttttacctcagccccgaacagagcactcatttaataacaacttagtgacttaatagttactataccttagatgtttccagagctatctggggctggctctgccactgatgaatgaagaagctttgatcaagcagctaacatctctgtgtctctgttttctctaagttnnntt

SEQ ID NO: 239669 - DNA, 726 bp, Homo Sapiens
aggtcttttaaaaaaaatacaggtcttggaattcacttttaaaaatgttacgttccaactttatatgttccaaggtgcagtgcactgtgaatctttattttttaaaaaaatttgtaggtgcttttatgtataactttaatgatttataagatgctaaatgaattgtttttgtacctaaccattgtaatccaaaagataagggtgtggtttacatgcttttcaaaaatttttgttaagaagtagcaaatgaatggtttaggatttcaaatagtgataccctcctgagacatgagcatttggagaggcctgagaacctaatagaactcatatagtgtgagtgaaatttgattaaagatgttggaaaatgaagttggatttttgtattcatgtataaaggaaagtctcccagtgctgtcaaaggaattgtggttactacttgctgttctgagctttgaatatcgttatttttctattaaatatcaattagtaagtatagctaatgaagacatataatgaaagtaattttatgctgtaagattgaattggtacttttccttattaaggctttagtaatttgtatgtaatgtcaaataaaaggaattcaaatctgagtaaataacagcctcctactataggaattagattcttctataaaagtccccatattgtatcctatagaaaagttaaggtctgagtgcatgtgtgcattaaaaacatttccctccc

SEQ ID NO: 239670 - DNA, 744 bp, Homo Sapiens
attgtgaatataaattccattagctttttatgtgagtgaagaaaaagacttcccttgagtagtttcagccagcttgtaataacatttcaaggtcgattcctcaggatttacctatatattcttgaaaacatctcaattttaaatgtttctttcaagatggtgaattaaacagagatagcccttcaacaggttgaactcagcatatgctgagtctgaaatggaaatgatgaagttagagaaccatacaccgatggtaatgatttcagacacatggtgttgagcagaacaaagcagacacaaaagagtacctatggcatggcatgcatctgtatacgcgaaattccagaataagcaagctaacctatgataagaaagaaactggctgggaagtctgagagttcactttatggggtgacataatagtgtagatcttggctgggcatggtggttcacgcctgcaatcccaacgctttgggattacacgcatgagccactgtacctggccaaaatctcctaatgttttaagaaagtttacaaatttgtgttgaactgcattcaaaactgtcctgggccacatgcagcccgtcactcatgggtaagacaagctaagtataaagtaattatcttttattttctttttgttttgagacaaagttttgctctgtcacccaggctagattgcagtggcatgatctcaactcactgcaacctccgcctcccgggtgacagagcaagactctgttt

SEQ ID NO: 239671 - DNA, 719 bp, Homo Sapiens
gcaccttagggaagtaccaggtataatgtgccatttctttcagcaacacatttttgtgtgcagctgaccctctaacatggtatcaattctagctgaccaaagcacattctatcaggcagccaggcttggaaattaggtccatttaaagtatgtggcttacagccaggtatggtggtgtgcgcctattgtcccatctacttgagaggctgaggcaggagggattgcttgggctcaggattttgaatccagcctgggcaacatagcaagaccccatctctaataaataaattatgttttgggcattaatgatgtttgtctattctgatttctcaaattttatttaggtctttcatagcttttttatttaaaggtatatgattaagataaaggaaaagtaaaatgaaatgtttatgtaattttatattctcaaaattttctttaaatttgctctgttttctgacagtgctcaaagtgggaatttttttagaagtacggttatcaaaaaaacacatttcctatgggacacacatttcaaagatgtttagtacgataaaatttttagtaaaagggtagcacttttaagtcatttgaatagaatatttgtgtaatatttagtctagtgttagtccttaaatctgccaacaaaaccagatagatgtcttaaagtaggcacatttattccattgtgactgttaagaaataataaaagattaaattaa

SEQ ID NO: 239672 - DNA, 533 bp, Homo Sapiens
tttgtaaaacgacggccagtgccaagctaaaattaaccctcaataaagggaataagcttgcggccgcaagtgttttttttttttttttttcagagtcttgctctattgcccaagctggagtgcagtggctcaatatgggctcactacaaccttcgcctcctggattcaagcgattctcctgtctcagcctcccaacaagctaggattacaagcacacaccaccacgcccagctaatctttttacttttagtagagcatggtggcacatgcctgtaaatcccagccacttgggaggccgaggcacaagaatcgcttgaatccaggaggaggtggttgcaatgagctgagatcgctccactgcaatgcaggctgggcaacggagcaagactgtctcaaaatctgctgaaagtaaatattttcatctaaaaatatttgcaattttcttgtctaacttcaacttgcctcacagccatttggctaaaaacctaattcctatgaaaactgattattttgacagaggggaaagtgctcat

SEQ ID NO: 239673 - DNA, 572 bp, Homo Sapiens
ccatgattacgccaagctctaatacgactcactatagggaaagctggtacgcctgcaggtaccggtccggaattcccgggtcgactactactactaaattcgcggccgcgtcgacctccctatggattgttaagggccctgtgcatatttgcatgtagccaaagattcagtctcttgcaggaactctggttgtcaactggtgatcttgcctttgtcttttctcatagttctgcctgtggcgcctgtcactagcagtcaaataaggacaattttaccattctctcctgctgctctaatttttttttagtgccggtacatgaatttgttattctttataattccctttgaagttggaaatccaaggggaatctaaaaccgaccagatgtttctgctgctggaaaggaaagagagtaaggattaagtttaacaaaaacttggtctccagaaaaaaaaaaaaaaaaagtcgacgcggccgcgaatttagtagtagtaggcggccgctctagaggatccaagcttacgtacgcgtgcatgcgacgtcatagctcttctatagtgtcacctaaattca

SEQ ID NO: 239674 - DNA, 662 bp, Homo Sapiens
aacagctatgaccatgattacgccaagctctaatacgactcactatagggaaagctggtacgcctgcaggtaccggtccggaattcccgggtcgactactactactaaattcgcggccgcgtcgacgtccttctcttgcccttatatagtgtaggtgatatttttctatttggctcttttagaagctggactatcacgaaagaaggtggggtgtgggtgtgtgtgagtggttgtgggtgtgtgtgtgtagtgcattatgagtcagcctctgtggctgtttgctgtgtattttgtccttgttttgtattatttcacatatgtgttgaggagcaatgcatcagtaatgaatgtaacagaagagctgcatgtaacagaatagccagttatcaactggcttttagaccttgaccctgttggtaattttttttttctgtcacataataagtcaatagtaggtggttgctggctagttgtcagtggtgaggattctaaaatttcttgcctttttcctcatggttgcaagatggcctagtcattacacccacccacttactaggaggcaaaaaaaaaaaaaaaaaaagtcgaccgaccgcgaatttagtagtagtagacggccgctctagaggatccaagcttacgtacgcgtgcatgcgacgtcatag

SEQ ID NO: 239675 - DNA, 617 bp, Homo Sapiens
cgcgtcgacttttttttttttttttaatcaagccagttctgctgcatgattaactgtttactgcagggtattattctaccacaataccttggcaaccagctcatattcagttacactatcacagcacaaaaaaaagagagggagagagagaactaattgtatgatcatgtggatattgtagaagccctttagttcaatcctagatgggcctcaagaggataatgcttattctgttgaactcactgccaaatcccaatatgaaactgccaggatcaaaacaagacccaattatactaagagtgcattttatcaacgtcgggtttataacaaataggtatgtggccctgtacttgtgcaaaattgttcaaaaatatttacatagatggagcttaaagaaaattatggaacacttacgggccataatgatattcaatgagaatctcttcaggtagcatccagacagcagctcagtcatgaaatgcttaaagcaacagaatccaatttcatgtcgacgcggccgcgaatttagtagtagtaggcggccgctctagaggatccaagcttacgtacgcgtgcatgcgacgtcatagctcttctatagtgtcacctaaattgaa

SEQ ID NO: 239676 - DNA, 551 bp, Homo Sapiens
ttccgccaagctttaatcgacctccctatagggaaaagtggtacgcctgcaggtaccgggccggaattcccgggtcgactactactactaaattggcggccgcgtccacttttttttttttttttttgtactagttagtttaatcacttaactgcttaaccactatatcaccttggtcaaatcattccatgtcaataaaccttagattcatatgtacaaaccaaaacaaagtacagttaatattttgtatctcagaaaaattgcaggttcatttccagaccatcacaataaagcaactattgcaataaagcaagtcacacaaattttttggtttcccagtgcatataaaaattatctttatgccataccatagcctgttagttgtcaatagcattacatctaaaaatgtacatagcttaattaagaaatcctttattgctgaaaatgctaatggtcagtcgacgcggccgcgaatttagtagtagtaggcggccgctatagaggatccaagcttacgtacgcgtgcatgcgacgtcatagctcttctatag

SEQ ID NO: 239677 - DNA, 649 bp, Homo Sapiens
ccctagaggccaagaattcggcacgagcgctgtgggcgtggtggcatgcatctgtaagtccaagctactcaagcggtcctcccacgtgagcctcccaagactacaggtgcacaccatcatacacgggacagggtctcgctatgttgctcagactggaaagttcagatttttaaatcaggtcttgggactccagattctgtttttccacagagtcaccatctatcctgacaatgctccatttcatgctgtttttcctcaccttcaatactgctcccccatccccccacctctaggtgtgaaggttaccaggagagacctgagctcgctggctctgactccaaggtggcctcagtggaaagtttcaaaaggcaaccggtttggtttcactggcagggcagcggcaggcgtttgggttctggaggcccaggaatgtagaagcctccagctaacagactccacgcgcctatcctcccaaacgctctcggagataagctcccagctccctccccttttccaccttcatgcacttcctgctgtattctgtccattccagcactggccctttctgtgggtgggtgggcagaggatacaatttcctgcatgactacttgctcatgattcatacttctaaatgaaagtacaactgata

SEQ ID NO: 239678 - DNA, 519 bp, Homo Sapiens
gggagcttggcccatgttgtgaatggcctagcactcgccagtctggtggaaattggtggtcttagttgctggagcaggctgagtgtccccgcggggtttgcatctgtccccagaaccttttccccaggcccgtgggggaatagggaagtcactctgagctagaaattgtcgaagaagaaaagaaacaaccttcctagccttggaaagcctgtccctgcttttgatagaattattgcctttttgtaggaattacagtagcaaaccccaggctgccgctgaatttcctacttttgctcattctctaggatagttcttatccagaatgtggtttcaggaattcttttttttagtttgaaaatgaatgtgaaacattttctttggtgtctttttttaaaaaaaaaaaaaaaaagtcgacgcggccgcgaatttagtagtagtaggcggccgctctagaggatccaagcttacgtacgcgtgcatgcgacgtcatagctcttctatagtgtcacctaaattcaa

SEQ ID NO: 239679 - DNA, 720 bp, Homo Sapiens
  misc_feature (96)..(96): n is a, c, g, or t
ttaaatctactttccttcccttatttgtgctacagaggttgatggcgtaaattttcctacttgaaagaaattacttatcaagttattttcaggganctgtattgatcttgtttgtcctatttgtagattaaacttgaactagtcttaataaaggggatattgttttgcaaatttagcccagtcatatcaagagttaatatttatcttatttttctgtattttactcaaaattttatttccacttctgtagaaataggtccatgccagtgttctctacaaagtgtctttcaaactaaactctagaagaatatcgattacctgaacagaaacaaaggcctaagaaatcatacatttttgtagcttatgtgtattgcaccaatcaagcaatcccatgtgctcttgatattggcactgtagttttatcttagaggacttgccactggagaactcagtggtgagagaccttggaaatgttttatgtggctgcacataagtgtttctgactagctaaggctacttcagacttttcactttccatttgtccccttttccttccctgaattagatgctatgtcataaacttggtggtttttgaaatactcttatttcaaaccttaaactaaaccgaaataagttatgcctgagaatgcgtttgtctgaaacgattttggcacttccctttaatatgcttccccttccctttgccttttaaattgtggt

SEQ ID NO: 239680 - DNA, 758 bp, Homo Sapiens
tctcaattgtgattaaatcctcacacagcaagtattttccttgttttgagttcattccttgagatagtttatcgggaacggggtgattgggtccaggatatgaggatgtttagttcagtcatacccgcattttaacacgcaaacgtacggtgccgctcatttaaaaaccaaagtgttgtatacatgtagaagctatatattattccggggcagcccaaagaggggatgttgctttcaagcgaaagcaccaaatcacattcttttctggtaaaatagaatactaatgaattgcttttggaagaaatttccagagcattactgaatgttcaagtgcttcttagagcacaagttgaacctttcttatctctgcactcagtttctcgtaaaactgaagtcacagtgacctcttccccatttcgtagaaaagaaacccaaggaagagagtggttaagaaacagaagatacggttctcatcacatttgcctgagaactacgtatagtcatccattcagtgcctcgttaagtaaataaatgattgaatcatttgtatacatgacctcatggaaaaaagcccggtaaaatgaatgtttgagggtgggtagacagaattattcaacccggacaggtgttagatgttcactctatccccccctttttttttgcattaggttttattcattatttgcatcatctatggacctaaaagcatgctcattgtcacacagatgggaacagggtgaattttcaatgatttcaat

SEQ ID NO: 239681 - DNA, 686 bp, Homo Sapiens
  misc_feature (78)..(78): n is a, c, g, or t
tgtcacggcacaatttcgctcttagaagaaaatggtacaaagaaaaaggtaggaaaaaggttatttcatccctcaganttaatgccaatggcagaaagatgcttattctgtgtaacgtctccaaaagatgaacacaaatgccgggaacagcaccatcaaaaagaaggaagatgagaagtattgttgaagagtatggacctacagggtttttaacaagtccagcaaaacaaactatggccaaaagaagaaatttttctgtcactgcgagtagacatcataaatgcttggtaaaattgccagatttagggaataaaaaatttttaaagtacagtgttgaagaatggggcatgtcatgaagacattcagcaaagaagcaatcttggcaaggtggagaagtgggaagcaatggggagagaaagggagatgcccagagcaggaattctcaatgtgtggtccctaggccaacagcatcagcacatcttgccctcaccagacctactgaatccgaaactcccagcgcaaggcccagcagtcttcaacaagccctccaggggtctttggtgcatgctcaagtttgagaaccataggctttgccacggttaaaaagatgttttaatggactggtctcctcctaagctctgaggtgctctcatattccctccataagtaaagagattttttttgta

SEQ ID NO: 239682 - DNA, 620 bp, Homo Sapiens
acaccaccttgaaaatagttaaaaatggcactttgttctttttaatgtaaaccctctccttgatcttttttatttttaccaatattctgacgattctgacatgtttattttaccagatgaattttacagttaatagattcttcccccaaaaatatattgagaatttggttgggattctcttaaattgatatgactgtgaggactacagaattgcattgctttccagaaacatgttgccttgtttctgaaaaactttatatatccttcaagagagttttacttaaatcctatataatttgtaataaatatgttcctaggtaatacagacatacagggaacacgttgatactgcttattggagcttttaatatgttacctatgtggtcatttttgctatataggagaagaatttatttgcatcgattattttaaattggcaatttattgaaatctattaattttagagatattcatttgatccttttgagtttttccaggtgagaaatcctatcaattatgttataattatatgttttccttttcaaaatttataacataatttctgactgcatgggttaaacattttcataacagtgctaaataataaaggtggcagtggc

SEQ ID NO: 239683 - DNA, 669 bp, Homo Sapiens
  misc_feature (21)..(21): n is a, c, g, or t
tgccctaagaaaagcactgtnccaaggaaagtccattcttaagaggtgtaccatttgaactgcaagcctcagttgtcacgtgacctcttgaagcccaattattgcctcaatccagaaaagtttacttctctttatctgtgctttactgacagaagggcaagtcttctctcgttttttgcagataaaattttagatgtgttgcattcattgggtttctatgagatgtggttttatcagacaattttttcttttatttcacaattactttaatatctgtaaaataaagaattattttaattcattttcccagtcccaaaagttaaatacaggccacttacttctttaaccaaatgatatagtttggctctgtgtccccacccaaatctcatgtcaaattgtaatccccgcatgtcaggggagggacctggtgggaggtgattggatcatggggagggatttcccccttgctgttctgttgatagtgaacgagttctcacgaaatctgatggtttaaaagtgcagcacttctccctttgctctctctctcctgctgtgccatggtaagacgtgccttgcttcccctgtggcttccgccatgattgtacctttcctgaggcctctccagccatgtggaactgtgagccaattaaacttcttttctttagaaat

SEQ ID NO: 239684 - DNA, 748 bp, Homo Sapiens
gaaatgtgaagcggataacattttcacccagaaacaagctatgacatgattacgaatttaaaacgacctcactatagggaatttggccctcgaggccaagaattcggcacgaggctcatttttttttttttttttttgaaacatgaatggatgttctttcctaagaccaacgaatgaacttttttccctttgcctacaactggcacagacagtgctactacctagttcaagcttcagtaatcagggtagaggtttagccgttggaataaatattttaaaggttagtaaacctgcatttccctagtctcctcggtagctcctatctgtcatctactcccaattctaagtcatttccgcaaatgagtgataaaaggggaaaagatatgctagtccttccaagtatgtaaaaaacaagattaggagtggggatttttcttttactcaattagtagctgaaggcttgtgagaaccaaacaagaaatgaagtgtggcgcttggtgttgtgttaactttctatttacaatgttgacgtttgcattttggggaaaacataactttttggtttaactttttggtttactattccctttgtagattaatgctttgcatataattttataattactgtcatcattctctttatcactaaacttaatttgtacatgagaatttcacataacaacaagtctatctgattatgttgccctaaaatctaaaattagaagttactaaaaagggcaatcactaa

SEQ ID NO: 239685 - DNA, 678 bp, Homo Sapiens
ggctttacactttatgcttccggctcgtatgttgtgtggaattgtgaccggataacaatttcacacaggaaacagctatgacatgattacgaatttaatacgactcactatagggaatttggccctcgaggccaagaattcggcacgaggcccccacaggcgtggggattgttgccctgtgtcggtaaggcaatgtttgaggcaggcacccaaacccaggaaaaaataactgggttttaaaaatggacaatgaacgatttgggtgataaaagaaaatcctcaaacattacgggagggagtgcggtcgaggctagagtcctgcccccgatcgagtcccgctgccctccgttctcaggcccctgctttagttgtttccgggccaccggggacagccatccttgcaaggcgatgtgttcaccggtgtccttccccgccacacccacctctctgcgccgtgaattttgtcacttaagagtatagtttgcactccatccagcctgggcgactgagcgaggccctgtctctaaaagagtagagcttggggaaggttctgtgctggctcaatccatatcagaaagtttacccctcggccaggcacagtggatcacacctgtgaccctagcactgtgggaggccaagacagaccagcctgggcaacatagcaagactcgctctctc

SEQ ID NO: 239686 - DNA, 644 bp, Homo Sapiens
tcagggtattggcatttagaaaaaataaatttagctatgtgtgctgcaagactgtatgtgtttctgaatcctctgcttcgagggaaaaatcatattagtagaggataagtttactcagtactggaaaaattgtgtagattttaggaacttgttggagcagaaaggcgattaattgtgagaaatgaaagtcaattttagtggcagcaggtatatcaagtacatcaagtcttagttcaatgtttatagattttgaaaatttataggttcattattcctttcatttgtttcttcttttgtcccatttttgtcaagcatgtatttattttgtttgaatccttttttgtctcatggactgagaagaaaatataactaaggttggattatcccacaatttgctctgtgtctaattattctgaggtggattgtaatgaagccagcaagacttatacattggaattttaaatgtatgggattgtaaggagggtagaagctacaaaccaaagataagatatgcctgcagatctgcttcagatttcctgagggcagtagatgaaattatttctaagggcctttttcaccactgctctttaagtatatgagtaataaacaaaaagaacaaagtatgtggttcagaaggaataaaa

SEQ ID NO: 239687 - DNA, 711 bp, Homo Sapiens
taaacttttcaatttttttaaactgtgctgccctcatccattaggtaaatatttacacacctaccatgtgttaataactgctatgcatgtaaaagaatcaaaaagtagagcccaaagtttctgcctttgaattgtttatagtcggtctggaaacaagaggtatctgtatattaacactgttatttccagtgtgttcttattctgtccagaacagatccatattttcaagggaatagcagctacttcagctgcaacctaatttctgggtgagggacagggttgcccctgaacacagtataatactccttttttttaatgttcttatatatgtaggaatcctcactgtagttctgtagcattattttatgttgtccacttattttcggtctggaacttagccaggataggaaaatttatctcagaatttagtagattggttttcattgggatttaatggatgatcactctctgccctccttatcttttgtgtgcctatatatgtctgtgtgtagtatccctcactgtctgctggggaccagttccaggaccacctgtggattccaaaatccactcaagccccacagttgcctgttgagaacttgtggatacaaaaagctggcctatttttgcagctttcgtgtcccacaataccatatttttgatccaagttggttgcagatgcaaaattgcccatactgagggctgacatat

SEQ ID NO: 239688 - DNA, 750 bp, Homo Sapiens
gtaagtgctaggcaaagtgacctttcatctgatgctaagcccttacaagtttgagaaggtaagaaaagatgaaggagacatatattaggtcagctttttatttttgaaaatgttttatttgaagaaacacttgtagcattgaggtgactgaatgcctccacttatttcaggaaaacgtatccaaaaaaagttgaaatatttggacaacttttttttttaagtgccatcgatttccctagcagcattctaaaagatagcaagtaaaatgatgtttgttatcctaaatgctttagttttaggtcatttattaattttcttacaggtgcactttctagtacatgaagtatcctttgtaattaatgtgtgccatatgtttattcccatttagtataactataaattatattttaaattatatatttttaggatagttatattttttttgggttctacgacattgaagttggactagtgatttatttgaatgctgaatcctagtataggggaatataatcttatattttaacaggggtcctctatgggaaaataggatgaactttgtttcccagaaattgttaagtgatgaaaaacttcaaaataattttcctgcattttctgctttatttacatgtaaagtgaattccctgaaaattggatttaaaaagcattctccttcaatgtgcctttaccttggagctttaacaacttttctgttaaatatgtagttttttattaaacaatgttattaaa

SEQ ID NO: 239689 - DNA, 754 bp, Homo Sapiens
cttctaataaggcacaccaagggatttctggtgaacagactaatttggggaactgcttaggtcccacattattttgtaaaagaattgattaaagaccttttttctgaatttttaaaaataagacaccaatttttttattgtagtaaaatatatgtaatatagaacttaccattttcaccatttttaaatatacaattcaatggtattaagtacaaccatcaccacgcatttccagaactttttcatcatcctaaactgaaaccgtacccattaaacaataactcctcattccctgctcctttccctcccaggccctggtaacctctataacactttctgtccctctgaatttgcctgttctaggtccctcatataagtgaagagataattgatttttaacaaaagcttaattgctttcttgcctggaggcatgggtcggagtgaaggggagcaaacattaattggtgtcttgacctgacaagtcaaggtcacattcggatttactggatttatctcaagcaatagaaaactgtgtttttaaactttggttccatggaatcatacagactccttttattctaattgtttttatcatgacctgtgtgttcacctatgaaattattcatttgaaattgttactgactagttggtgatattcaatctgattttctcatgaaaattaataagtatgtttctgaaaatctcctctcaattatgtcattctaaacaatttctgcaatgttaaggcccagca

SEQ ID NO: 239690 - DNA, 614 bp, Homo Sapiens
aaacaccttctcctccctccctcaaggacttcttagcttgcactccaattcttttccaacattcactttttcctttctgttctcttgggatccaggtttatttgaggagataggaaaagctcctgatccagcaggttttattcttaaatttgtaacaaagtaaatcacagaacctccacccagcatccaggcctctggttctctccctccttcccaggtataggccggctttcagaaaccctgcaccacatagaccctgggcctgaattgctgtgagtaataatgactctgctggtaatttgtgtccttctgcttggaactgtttcctttttagtttggtcaccctcccagagctggtttcaatgggggcatacccattatgggatgcagggcatcctgcatcctgaggaattttttttcctccaaaaatgaaaccttgaaatgaggacattgtcctgtccacggactgcacaacaacactgagcctcaaggactcatactggcatttttcttcttttgcagagtgtgggcaccctggcttcaagctcacgagaaaccaggtcgggatttaaacaatgttgggttaaagcaaagtttcataaagacagaatcaa

SEQ ID NO: 239691 - DNA, 654 bp, Homo Sapiens
gttctaaaagactggagagggggccgaacttgataggggccccaatctacttgtcacctgaaatctgtgaaaacaaacttacaataataaaaggacatttgggctctggggtgtgtcctttatgagctgtgtacacttaaacatgcttttgaagctggcagtatgaaaaacctggtactgaagataatatctggatcttttccacctgtgtctttgcattattcctatgatctccgcagtttggtgtctcagttatttaaaagaaatcctagggatagaccatcagtcaactccatattggagaaaggttttatagccaaacgcattgaaaagtttctctctcctcagcttattgcagaagaattttgtctaaaaacattttcgaagtttggatcacagcctataccagctaaaagaccagcttcaggacaaaactcgatttctgttatgcctgctcagaaaattacaaagcctgccgctaaatatggaatacctttagcatataagaaatatggagataaaaaattacacgaaaagaaaccactgcaaaaacataaacaggcccatcaaactccagagaagagagtgaatactggagaagaaaggaggaaaatatctgaggaagcagcaagaaagagaaggctggaatttatt

SEQ ID NO: 239692 - DNA, 620 bp, Homo Sapiens
tttgtgtcaagggggaaatccaatcaaacctctcccaagggcctgtaaaaatagggtgtatgatagtatgctagaaaagcccttctgtccttgtaattagtaactattgctacacaagcttataaagacagaaaaatgcaaagatgcttgatctcaaagatgcagcttttaactgagagatgatagttgcctctgcgagagtgatacctctagcctggccatttcagaaggccttaaatatgtttatgagctctggggtttggaactagattgcaagggtggaacccaagctctgccatttcctagttatgtgaccttgggcaagttatttaaccactctgtgcatctattccctcatcatcaaaatgggcataatattgttacttacctgatagaattgttgtgagaatcaaagatttagtaatatatgaaagctaagacctggcaaataataagtgattaaactatattattgtttgactgctggttaattcttaacagatgagtttagtctgttatcagttagtgtggtatttctataatttataattgtcttgatatatcaggtcccattttaaaaatgtatttgttaaataacgtaatcagaactaatgtttgga

SEQ ID NO: 239693 - DNA, 699 bp, Homo Sapiens
  misc_feature (1)..(1): n is a, c, g, or t
  misc_feature (95)..(95): n is a, c, g, or t
naggcaggtcgggttgtcatagattctctcgcatcccagattggtctaattgaccacctttgagaaacgcgtttccaacttatttccaggactcnaattagttctattagatctttgcctgacttcacatttaatcacttactgatttttcttttagcctttttgtttcattttcttggctcttttcatttatatcttcaaaatcccttattttacatttggttgtatctcttcttccttagatactttataattgccttcacatctgatatgtgtttgtctttttctccgaatttttttcctgattttagccagtcattcacatctgcattttgtttgtccagttctgagtttttaagttgctatttcagattttttaaatatctaataatttaattcatattagcatattgtgttaaagtttactctcctttttctcattttcaatttctctttagagtgactttattttttttccctagggatgtaattttatgttgagttaccagcaatactaggtcatcaaatgggaagaaagggtctgggttagttcaagaatattttctgcttagttgtttgttttttgtgagatcaggtatcattcaataataaagctttttatggaggtcttacctcctgattccttattaggactttaaaaaatatttttactttcaaaaaatcatagattcacaaatt

SEQ ID NO: 239694 - DNA, 537 bp, Homo Sapiens
agtaaaccagtttaattacctttaaaagtaggttttccttaaaaaaaaaagtcttggggataatagctaccatgtatggagtccctttcagggcactattgtatgtactttatatactttatcacatttaatcctcctgtcaatgctttgaggtaggtatgattcccattttatatatgagtaataaaaaaagctcaaggagtttaatcatttatcaagggtttcttctgcgaatgatagagccaggctgcgccgtcggctcctctagcctaacgttggtttacagtattcaaaaagagttgattgaattcaaggttttttttccatgtaaagctatttatatcttccaagcctaatgaaatggatattataaaaatacagttgattcatcctatgtttgggaagagtatttttagtgtaattattttccagcaattgtaagggcatatactgcttgtctcagaagaaaattccacgtagaggggctttaaagtctttatggaaaaaagaaaaataaaaatcatttttcttgtttta

SEQ ID NO: 239695 - DNA, 540 bp, Homo Sapiens
aaccttcggattatttttatcaagctcattaaagcaaaattgtcttagagccattctttgaagttgtttaatatttaatattcagtgggctcttaagggtaagttcttgaaggcttgtgagtagttgaagagctgtgaatggtggttaacaagctattatcatctccttgaaaagcataacatgaagcagagattcaggaaaatcttagacagtgattagtctatctgacagtgcatcaaaactaaattagttggccaagcacggtggctcacgcctgtaatgccagtactttgagaggccaaggcaggtgggtcatttgaggtcaggagttcgagaacagcctggccagcatggtgaaggcctgtctactaaaaatacaaaaattagctgggtgtggttgtgcacgcctgtagtcccagctacttgggaggctgagccaggataattgctcaaacccgggaggtggaggttgcagtgagccaagattgcgccactacaatccagccttccagcctgggcaacagagtgagattccatct

SEQ ID NO: 239696 - DNA, 540 bp, Homo Sapiens
atttctgtaatgccccaaagtagtggaataggccctgcccgctccccccctttgacaaaaatcaaaaaggcaaaaaaaagccatccgttcagtgtaagagccaaacaaaaatgaacaatttgtgaacatttaggcatttgtaatacagcatatagaagcaaagaaaaggggccagtcagtgtgtactggagtcattggggaagttttcatcttgggaatggtccttgaagagtggactggggtttagatagacacagggaaaggagaaaggcatcacaacagaggaaatagcatgagcaaaggcagagaggtattaatgcccagacggcctggtgtgcaagctgagtttttctggaatgctgtattgaagaaggaagacagaaagttgcaggaaagatggaagtgccaggtgtacacagagtttggcattctcaaaatttttccattgtctttacatccttgctattcgcctgatcagttgtttgcataacttgaatttagatctttatatctgtgaaattcaacgttaggctaattata

SEQ ID NO: 239697 - DNA, 726 bp, Homo Sapiens
atgggctttatttccgtaccagctgccaataacttttgtaaaccaagaatactcacaagaagtgggctaagttgtgctctggaaatgtatgtgtttcaaaaccatgaggggttgtgtcaaagtagtcattgccaatcccacagatgaaacatttagtctaagaaaaataacaggcagaaaaggcatttgttggcataatataggcaggagaggaaactgtcatgattctatcgaattgaaggataatgaaaactttctttctaatgcttttggctattagtcattcactcagtagtgccatacattggctattagtcattcactcagtagtgccatacacttagctcctgattagctgaggatactgctccctcctattgtgggacagtggaggaggcagcagagtggccggcctggcaggggtatggcagggtgcagagaacagggcatggaaaacaaactgcgttcttgcttagtactggccctaagtaatagtaaaacctattgtttaaaaaatctatttgcttctggggatattaaaatagagctgggattagtagttagagtaacattacctccatatcttctcgtacttgttcctgctggtctcttagctctccgaaagcatcaataataagacctggaatgttaaatacaaagacaaagcaatctgtgtagtggttcaggggtagaggaatgataaaggaagaagctactttgttctgt

SEQ ID NO: 239698 - DNA, 726 bp, Homo Sapiens
  misc_feature (71)..(71): n is a, c, g, or t
taaaaatttaaccacctaaaaaagattaattgactttcttccatgtatagcacattaggcaagctaattgnaaatttggagaaagtaagctaaagatttttctaaaattttattagttttccctgaaagttaataatttaaatatcatttagccaaagtatgttactactaaaagtgactgttctaaggctgtttgtgtgaagtattaaatatatgttcttttcctcaaggctttaattagtatcttttggcctttttatgcttttgttatttgattagcttaaatttttcttttctgagtgttcagtcaagttatctgtactgaccagaagaggaatttcatcttttgctttctatttataacttgaacattactttaaagtgacttataattggagactgacaaatttgtgttttcttcaaacagatgaaaactttattctcaaacatgacagagcgttccttttatcaatggcaaatcgagggaaacataccaatggttcccagtttttcataaagagtgttacaccgtgcgctccaaagtaccacaaagcctgctccacacctggatggggtgcatgtagtctttggactggttatttctggttttgaagtaatcgaacaaattgaaaatctgaagaccgatgctgcaagcagaccatatgcagatgtgcgagttattgactgtggagtacttgccacaaaatcaataaaagatgtttttga

SEQ ID NO: 239699 - DNA, 719 bp, Homo Sapiens
ttaagatccaatggccaaaaatttgtttcatggatcaaggtatataattcccatgcaaacatatctcagcataactgattttgtttctaaataattaaacaggataaaatgttatttgttgtaagctgttgacatttgtaaggaaattttgtttcactgaatatgtttagagatgccgccagaacattaaccattgtttcatttttatgtaagttgaagaaaaatgaagctagatagcatgttctccatttgcagtctacaaaggggaattttattgcttaaattaaagtttcattttctggcctgtgcaagagacttttatatctaaaatatggatgtacgtttttcatattttagagttcattgtatggaaaaataccatcaaagttgaccaaaagattttgaaaatccttaccagttgtttgtcatatgttaaagtcttatggttaattttatttattttatcttgttctcttgctggttattggcagactcagtctttctgttttcacaaagaactcatgaagaggacgatagggaaacccacgtatgcctttgaggctagggactatgttgtaagttcacctgtgatggccaggtcatacagtcatggcacagccactaaccccattcacagcaccaagactggggacccagaggcacttgttatgcttccacactacgaaatgaaattcttaattgagagaactggacaccag

SEQ ID NO: 239700 - DNA, 674 bp, Homo Sapiens
acacagaccaagtgttctccagtttttccaagtctcaggggtaaccccaaagccgttgtggtgcagagggttatgcgtgtttcacaattaagccacgtttttcctccttccccttgtatcttctgataacattagctgtagtaaaaaggcgcagttcccatagaaaagccaaacagaggaaggatatgattccatttgaccgatgaactgaaactggaaggggtgactcctgattttgtatttgacagattgagtcacttctgttccatctagccaacatttgggctgtagaaagaagcccctgaattgattgtttatttcagagagatgggcatgattctcactactttgccctgtagtcgcttggaggacaaatggcttttggagccatttggttcccaaactttctttagttttaataaaacaattattaaacagtgagaccctaatctgttacctaataagagtaagtgaggaaaacgccactatcagctgaatgtgaattccttgtgggaaaggtttatgcaactttcggaggcccagtctgtacatctctgtgcccaaatgtggccatttccactttgtccagcagagccctttaatcttatgcttcaaggggaccccctctccgtgccttgcctccggtctctgtttctgatatttcagatcctctt

SEQ ID NO: 239701 - DNA, 635 bp, Homo Sapiens
ctgtcattaacaccaaaaaaaaaaaatgtgtcaaagaaaaaattcttaagggaaattacaaaccccttgagatgaagtgataatgaagacacaacaaaccaaaacttacaagatgcagctaaagcagtgtttacaggcgtgagccaccgtgcgctgagtgatacgtggttcactttaacttcgcacatggtaaaatcagtttctttccatgatctgtttcacagtctctgtgaagctacctaccacaaagaagtagtgagtgatgactttctagaatctaagtatatggcatgtatttattataagtaaaacattaagtttgctgattgtttacttgtgataaacaattattgtgaactttatttgtgctggacataagtgtctgttttacagtgaaattccattatagagggttacttggtagagaaatgcaaattgtagttggtcatatactaaaatttgaactttttacatatcaatacttacaaataggtgtttactttcccacaaaactccagaacatttaagagtctcgggtgtttaaatttgatgagatttacccaaacaaatagtgaacaaaaggtttatgaaaataagttatgaaactaaaatacttaataaacatccagtgacaa

SEQ ID NO: 239702 - DNA, 635 bp, Homo Sapiens
cctcaagcatttcaggcaatttgctttcctttaccagaagggtctctgtcctcttacaacctgggaaaaaataagttgtgtcccaggttgtaagtttgctttacttaggcccaaaggaactaaagaatggatatcagaaatctcaccccaattgttttgtcttacaggcacagaataggttctagcctcagcattttcattaatgtagtgtttttattaacatctccattaacttgcttgcagcaatgagatggaattatgcctcccacaaggcctggggcaagatacttgcataggtgcccccttttgtttggacagtagaaacactgcctcccctgccatggtgttcaatccagttggcaggtgggccagcttcaaagtgcagaaggaactgggtgtggtggctcacccctgtaatcccagcactttgggaggcaggcggatcgcttgaactcaggagtttgagaccactgtgggcaacacagtgaaaccctgtctctccaaaaatacaaaaaattagctgggcatggtggctgttgtctgtaatcccaacactttgggaggctgaggccagtggatctcttgagctaaggaggttaagaccagcctggtcaacatggcgaactccgtctcta

SEQ ID NO: 239703 - DNA, 536 bp, Homo Sapiens
cccttatgttgggtgattaatgatgaaaatacataaatcaaaattaaccaaattgttaataatgaaatattcccatgtttttggaagaaatgtttctttatggttgttggcataacaggctatggatgtctctagcatcaaagcaatgttaataagtctaataagactactggctatcatctatcaacattggtctgatttgtgataattgtgttcataaaacttcttaatatatttcctggcctctctgaactattggctttttcattcttctgcatgtgcgagagatggaaaccctttgaattagggctttgtgactgacccattgtcactacttccttctttttatgtattttctcctcaaagcacaaagaaattagaaatatccttgtctgggtaccgtggctcacacctgtaatctcaacattttgggaggctgaggcaaaaggatcacttgagcctaggaggtcaaggctgcagtgagccaagtttgcaccactgcactgcagcttgggtgacagagtgagaccctgtct

SEQ ID NO: 239704 - DNA, 592 bp, Homo Sapiens
  misc_feature (91)..(91): n is a, c, g, or t
  misc_feature (113)..(113): n is a, c, g, or t
  misc_feature (194)..(194): n is a, c, g, or t
tcttccagatctgtcaaagaatgggggcgggctctcctagagcaagaggcagcgcgggtagaggaactaggaagctggtgcaccactgacnaaagatagagtgtttctcaggncggcataagacactcactgtggccaactcaggtgaaggttttccttcagaggccacagagtctccacgggaacagcctgcnccgcttcagcattcctgtagagtgcttctgttgtatatcagaatctataaattgtggagcactcgggtggggatagatgtgattgccttatttgtcatgaatttgaaaaaagaaaacattttggaacacattttttacaagtagccatttgatatttgtttcttgaaaagtttatgagattttttttaaagagctcaaattttgttgaacatagagccataaataatggttgttttattgactttatatgttatgtgtttgtatccacagtgtccttctcatctcttgcctttgtaacctacctaattcctgtgttgccaacacaatcatagaaatacaaaggaattatggtaattggccataagtgacgaagtatgagttacatttaattatatatt

SEQ ID NO: 239705 - DNA, 530 bp, Homo Sapiens
  misc_feature (59)..(60): n is a, c, g, or t
  misc_feature (98)..(98): n is a, c, g, or t
atacagaggatatgaagaaggaagattggctaaccgctaaaacagtgagttcgatagannacgttttcattcatgcaatcaagcctgggcagaaaacngacattccgtctcaaaaagaaaaaaaagaaaaaaaatgtttcaaatctcccatatactacatcagtggtcttcaaactcttctgttcctagacccaaataattgttttttaaattatgtaactccctgcacatctttaaatagacatctataatttttcatcataaatttgttccttatttcttgttaacagcagatagaaacagtattttataagatgaaatattgtgaggattgactgcaattggagtatttcatggtatggcttgataaaataagttttaactaccttatccataatacactctgatcctcaaataagtaaaattttaatccatgtgttttgaaaacccatggattaaacacacagattaggaaggagtacctatggaatgtgaagacctggaaacggattgcctaagagttatccaag

SEQ ID NO: 239706 - DNA, 587 bp, Homo Sapiens
aaacatgtggaacttcaaaatggtagtaagtgactggaaaatttaggattctggttgtttcaaaacacttaaattttccagcatattttcaggaaaatggtcaagattcacagataattctttccttattccttacagattttacaattgaatggttatttctgaatttggttaatttgtttataagtgtagtggacatttaacagaacagatgcacccgattatctgattagaaatgtgtttcaacacacgggtccctttgcgtgtttccaatctctgttttcggatctgggattctccacctgttacatcgttcactggaactttcctacaaaatacagcctcgctgagaggcgcatcgtggaaaaatgaagcagcctgaagaaactttaatattgggaccgagtggagagatggaagagcatcatcagagtggtgccgccgcacatgcgggaggcgtcccaggcagcattgctctttgtacatgagacaggataccactgtcttttatgcattagactggtaaccagataaaataaccttgtaaaacagatcttttatgtaagaaaaatacaactctcacctcg

SEQ ID NO: 239707 - DNA, 601 bp, Homo Sapiens
aaaagcgagctttggacaaaaaaaaaaattttcccacttttttaaagagtccagccattgttcaagttccaatgaccaaagattccaaacggcacttttacagggatttcgcagggatagtgtgtcactcaaagtaaatggaagggagagagaacagggagggtaggtatgcttttgaaaaagctttttttcccacttttaacttgctttagcgttaagagtacttaccagctaataatgtggaggaaattattctttctcattggagattacagaatatatctattcatcttgaatacccacttgaagcctctgtagaaatgtctcgtcctccggttgtatttctaaaacctacatgattttgtcttgtttctgcagtgagaaattacatccatagcaaagacaaaagtctttttaaattatttttatttatctttcatatagttcttacaatttctaaaaaattaacactcatttagtatcacaatttatgggagagggttttttgtatttttaagcatatgtggcttatataaaaattgcagaagtcataggactgtcatgtattgcagctctgagaaccaatgcctgaaacttaagc

SEQ ID NO: 239708 - DNA, 586 bp, Homo Sapiens
agtcaatatttttccctcccagttaatcactattctgactacattcactgtgtctcacatttgcctattcttgaacttcatttaaatggaactataccttatgtctcatttgtgtctggcttctttaattcaacattatgttgacctgaaagttttaaagggtgaaattgttgaatatgtcacctgtctgcaaatagcaacttggtagaggactggcaaactgcctttcatccataaattcatccataaatccattatggaaaatctatccataaagataaatgaccatctttatgtggggttcttcaggaaaccttaagaaattcagcctagtaaaacctatttgtgtgcctggcaggctgctgagattcagtggtaaactgtcaggcaatatagttgtttttcaaaagaaatcaatctgactaaactaatgagagttctttcaaggaactaagtaaaagaaagcttctatttttttaacacatttttagaaaacttttctcaaaataaaaataactgttacagaatcaatacgtattactgtaagaaaaaattttcagaatatacttctgagtcctgagaggca

SEQ ID NO: 239709 - DNA, 506 bp, Homo Sapiens
ttaatagcccccttgttgaaaataatgtctgccatgttttgaacggtcacatggcacataacagtagtttataatttccctgaataaactgcctttggaccaatttttgatcccttgtctcttgattagtcacaggcatgatcacagtcctattactcttgcatatctaggcacatggctctcatgcatactctagatccagaacacattaattgggggtaatactataaacatgttggagaaattatgggtatgatgcgtttggttatacttatacccataatctcactcatgcatgctctacctctatccaaatacaatagaatatcccaaatgagatattatctctcttattttgataactgagtcatatatgaaggtttttaactcagttataaatctataaatcaaattactttgtctatttatagaaactagtatgtttgcacattgacaggtgggttgaacccaaggaatgatgaatcctgaatttgtattcagtatgc

SEQ ID NO: 239710 - DNA, 561 bp, Homo Sapiens
tttttgaatgatcttaactcacttttttctaatgaaatttttgctttcaactggtagtaactggtcctgggcattcagatttttatatttatgtatgtatgcaagatacactattctcttttgagaaaatgttgtcttagctaatttctgggatttgtgaaaggaaatgtaatatgttaatagctattattggcactctatgttacaattataaggatctaaatagattcccacttagccacgatgcttttcttaagcataattcatctctacgtaaatatcccatatgaaagaaaatttagagccctccatttaaaaaagctttcttgctctgcataaaacttgaaaataattaatttcaaagttatattgatattaaaacatagattcagtcttgtcttaaaagtgtattacaatttatttcttgccatttttgtgtaaaatttacagaaagagtgttacaccgtgcgctccaaaggtaatgtctcattactctaaggctctctctctctttgcctttatctctttaattctgttgttatgtgcattgaaacattttaa

SEQ ID NO: 239711 - DNA, 616 bp, Homo Sapiens
gcccggccgtctcttaggttagtgtaccaagattctattctccagataaaacttccgtgtcggctgaagatgaaagggactgtccaggtttgagggagaattttttctcactattctagctagaatatgtgaatgaagaaagatttctattatcctggactcctttgtattttttaaaattgttttctttttctcacttatgctctgatatgtattggtttcttgaataaattaaaacttaaagcactgctttagtagacatttctggaattcctgtctcccgctttcctgaccacatacagctcttctccactgcctacagctgtatgttttagcatgatgatggatggatggactggagctagagcaaggttaaccacatatgctctggtttcagaaacatcagagagggaggtggtgacatttataagtattcatcttttatttacaaatttcacgcacatttgtagtctactgtaagcaacatagtgtcttctaccatctttttcctcttaagggtcaacactactattctatttcatatttaccatttttttcttttaaaagaattcatgtggtgggtcattgtagaaaatttaaagaatatgcaaatatt

SEQ ID NO: 239712 - DNA, 685 bp, Homo Sapiens
ggggataaggatctaatcccctccaggtgagaatcaatatagaacaggccttgacattcctaagaaaaccgttccatttagctaaaaaaatattcatgttactgatttcattgatggaaacccatcctttatcttggccctatttgggacaattatcctgcactttcatattgagaagcttgcccagactctttcttgcaattacaatcagccttccctggatgatgtgagtgtggttgactcatctcctgcctcaagtcctccagctaagaaatgctctaaagtgcaagcaagatggcaaatgtctgcaagaaaggcccttcttttgtgggctcaggaacaatgcgccacctatgagtctgtcaatgtgaccgattttaagtcaagttggagaaatgggatggcttttttggccatcattcatgccttgcgaccagacctaattgacatgaagagtgtgaagcatagatccaacaaagacaatctgagagaggccttcagaattgcagaacaagaattaaaaatccccagattgctggaaccagaagatgtggatgttgttgatcctgatgaaaagtccatcatgacctatgtggcacagtttctgcagtattccaaagatgcccctgggactggagaggaggctcagggaaaggtgaaagatgctatgggctggttaactctg

SEQ ID NO: 239713 - DNA, 684 bp, Homo Sapiens
atgagggaatttattaagcagtttctttctgcagcccttaagccctccagatttatgtagaaaaagggagctgtcttcttcttttagcagaacatctgtcagagatggtttcccctgacttagacaattgtgtttttttcctttcagaatgattgagtctcagaattgttctttaatcctcagtatttccattaagaagagcttctatcaagtgcttcaaaagtacccaatgtgaaggagtaataatgactccctgctggtgagcgaagtgtggaggacacaggtccctcagccgtccactggatgctgcactgtttggcctgagccaacatgggcagaaatacaggcggcagcataagcagatgccaagaacctgtcttgcttctactgttttcattgggttactatatctcctttgtagtccaacctgcaaattactttgagaaggggagatacacccctggaccaatctaggactatatttgttcccttgctaaagtaggaaaaaaaatacagaacctttaaatattgaactcaagggcaactaatttaaattcctttcctttcatgttgaaagtcttttgactgggttattctgaagccatagcaattaggttacagtttacttctctgttactttaccatctttaaatttggcaccttcaaaaggttgttctgtgcgtt

SEQ ID NO: 239714 - DNA, 550 bp, Homo Sapiens
cttaaaactgctttaaaaaaagtctcttttaaaaaaagctctatgaactagttggtattatacaccttaggccttttcaagtaaaaattacatatcaatgtttattaaatactgagttaatagctgaatacctctttcatatacaaataagtacatttgcaattttttaaaaagtcttaattccattagtaactgtggtttcatagttgccaaataactgtaagctatggatgttgcacaagactgtgattttatttaatcatttcatatctatttaaacatttccaaagcgcacattcatcttaatgttttcacactatttttgctcaacaaaaagttattttatgttaatggatataagaagtattaataatatttcagtcaaggcaagagaacccgataaagatcattgctagagacgtttaatgttacctgtagcggtacacttgttaaagaagtgattaagcagttacataaaattctgatcatagctttgattgataccatgaaggtataattcagtgcctggatactaacaactttacttgtt

SEQ ID NO: 239715 - DNA, 709 bp, Homo Sapiens
  misc_feature (161)..(161): n is a, c, g, or t
aggcctttggaagaacttaattttctgtctgtcgacactatctctggttccattaaaacttaagagacttacatgggcaatgctttacttttggcattcagcacagaaagttaagtaatcccctgtggtaaaatattaactaaatttatatgacttcttgnctgctgtaagtagagaatatttatcatataagcaccattttcctgaattttttgttactacatattttatcttactgtcactattgtgtaaaatctttgaaaggaaaatgaatactgtgtaatagttaaacccattcataggttgcaatagagtgtcagccaaatgtgtcatacatcaaatcttcagcagcttttgcataatccaggagaattgaataatagttgaagttaattttgccagtgaaatgtagggaaagaaaaatgtttgaaatttaaattattcagatagctaaattcttaatcctaaaatttaaaccccttaattctgtctgtagtgttatatcaagactttttgatagtcatgaaactgagtaaaactttattcagattacttaaaaacagcttttcctgtggttaataacacctttattttgaacagagtactcttaagcaacttatattgtgctgattaaagatttaatctgtgcatattttttaccctgttgtttatttagttttgataactgtgaaataacccataatttaat

SEQ ID NO: 239716 - DNA, 661 bp, Homo Sapiens
  misc_feature (20)..(20): n is a, c, g, or t
  misc_feature (35)..(35): n is a, c, g, or t
  misc_feature (66)..(66): n is a, c, g, or t
  misc_feature (137)..(137): n is a, c, g, or t
ccccttatccccccctgctntttgtcggcactggnaaccgaataccaatttcacccaggaaacagntatgacatgattacgaatttaatacgactcactatagggaatttggccctcgaggccaagaattcggcacnaggattctggactgagcttatgcactaggtccaaacaaaccaaaccaaaatgagtcactcatgctggatgtgacataattaaactaaaaatttaaggcaacaggtagattctaaaactggccaggttttgtttttcttctctaaatagcagatttcaacacaaggaggtcccctgtactctaacactttaaaaaacaaataaaaataatttcaaaataataagctgaagtttttatttccactttacaaacccacagttctgctgtttcacagtgagattcgagtctaaataagtacatttttgatggtgacaaagtgatattaatgtctaaagttttggtctcaaacttgagaagatgacaaaagggagaaattgttaaattagttgtagcctaaagcttccctcttatgtttaattttggctaataggatttgttttttgttttttgtttttttacatagtaaacttaatgttcaaatgggacatatcttaagctgtaataaatctggctgtttctgtacct

SEQ ID NO: 239717 - DNA, 550 bp, Homo Sapiens
agtattgctctgtgccccaggctgaagtccagtggcgctatttcagctcactgcaacccaaatgcttttcttctcatatagcacttaagtccttggatgatggacctacagctcttaagaatttccgtgtgtgtgtctgtgtgtgtgtggtaagcagaaatggaggtttcaaatgaaaacactggaaaaaaatgatttctcatctatccaattataataccaaaacagcaacagcagcagcagccaatgctgacttaggtacccaggaaggtgaactagtgaaaatcatttgtactcaggagcacaagatggcagcctgttatattcatcttacatattgaatctgtgcaaagtcagctatcagtctgattgccctatcccacaaattgcatcccaggagatgattagatgcaataggtgaaagttttcatgttcctcagtggcattcagtgcatgaacaaccattgtccacctaattcctctgcatctacagcaagaaatagaatttttgtggagacttaacatgctgtgtcttacttacatatgtatg

SEQ ID NO: 239718 - DNA, 582 bp, Homo Sapiens
caaaggttgaactggctattcagtcggcttttgctgtgaaggggggatttgttagccaaaaagaggctgaaaacatgagtagtgtactttggaagactagaaggacgaacgttaaaagtatacgacctccaaggttgtgactctggtagaattctttggttagagatcctgaaggacagcatcctagggataatggtgaaacagaagtagaccattcacatagagtgtagtttagcattaaatcatcaaggtggattagtaaattgtgagattttggaagtggactaaggtgaccttaggtttctaatgcccctaggaacctgaaagatagaaacctggaggaagaatattttcctaggcctcaaattatttgggtactttttcaaatacagtatctccacataccctggatacaggaggagaaaggcggaatgaaaactggcagaaacagtagacccaaaggggcaccaaataattgcattgtgaggtagactttaagtatgtttactgtattcaaggagataaaagatggaaaatttccatatagaattggaaactataaaaaagtcactgcagatttgt

SEQ ID NO: 239719 - DNA, 599 bp, Homo Sapiens
  misc_feature (120)..(120): n is a, c, g, or t
tttggtttggttttggattttggggaaaagccaggatttcaggcataagccccccagcctggcctttaatttctttaatatgaatctttaacagagaagatttttttaaacaattacaanaccttatattatcttatgatctgatatccagtttgaacttattttctgtcttgtaaatgtcttttaaaaatagattttttttcacattagaatccagaaaggttcacaaattgcagttggctgaaatgccttatctcttacgctaatagttcctccactaattaaaaaaaaaattgagtagttttagatttttagaaaaattgcaaagatgctataaagaattcccagttttctcatattactaacaccttacattagtatgataccgtggtaagaaaatgaaaagacaagctacaattgagattagttgcaaaatcatctgtctgataaaggacttgtatccagaatatataaagaactcttacaactcactaagacaagcaatccaatgtaaaagcaggagtacaaaattagtgtaaaaaattctaggtttattctcagggctaaaccatgggcaagagatttaaagagtgatttta

SEQ ID NO: 239720 - DNA, 596 bp, Homo Sapiens
tggtcctccattagggcagtggggctaaaaggccttttgacttctaatgttaacaaccctcaaaagcctctggggtcaagaaggctctcccaaactccacccctgttcttcctggtcagagaaccagtcagtcattctagtcttctagtccttaaactgatctgatgacttggaacataggatttcactgcaagtctggctttttagtctggaaatacatttgaggtctgttttcgcacagctggatcacctgtttcctggttttattacacaattcagaaggctagaagaggagtttgggggcttggcacctgaaaatttagaccgcattcttattaagtaaaggaagaggtagggaggccgaggcgggcggatcatgaaatcaggagatccagaccgtcctggctaacacagaaaccccgtctctactaaaaatacaaaaaattagctgggcatggtgacatgtgcctgtagtccatcccagctactcgggaggccgaggcaagagaatcacctaaacctggaaggcggaggttgcagtgagccgagatcacaccactgcacttcaggctgggcagcagagcgagactccatct

SEQ ID NO: 239721 - DNA, 644 bp, Homo Sapiens
aaaaaaacacaaatttcaattcccttttcaaaaaatttttgcggttccaagctgtgctggggcttctattccttactgtaattgtgaggggtaaaaatagtcctttgaactttttataaggaaagtggtggtgttctgtaaaggacatttatttaaatatgattgttattggcttccataatcccccatgtcatctgacctcggattagacccagtctgccagtctgatgagagagccagttgtaagttacctgttgaatttcctgtggatcccctctgttgttctttattagctccataatccagctggatgttactggttacagtttggctaatgatcatgaccaatttttgaagaaaggattccttattggcgggcaaatttttgttgagtggtacagccagaaacattttcacattattctttcctactttaggagctaaacttgcgggctgtttatgtatttgtttttagggtaatcaaattttttctttataacatttgtcacagtgacatttcttatgcacacataaagagtaaccagatattacactgtatgttttggaggaaactgttctggaagacctaggcctaaaactcacttaataatgaagttggggaaatagattacagttcttattaa

SEQ ID NO: 239722 - DNA, 505 bp, Homo Sapiens
agaaattcaaggaatggaaatgaaatgaaaaaagtaaacttctttgtcttcaccagtcccactgcgtgaagctaactgcaataaacagtttgctttatatggtcccaggtttttccattcctggatgatgatgtagctatataaatagatttagaagaacaaagacaggatggtactgacataggattttgtaacgtgcttctccaaacgaacaaaatggatctctttgcatttcagcacttacagatttgcctcattctatttagaggcagaatattgcattggatgcatgtcatcatggactcggtacttctatttatggacaggaggtttttttttcccagtttgctgctattacaaacaatgccacaatgaatgatctgaaacataaaactttgcgttgtgtggtagcattttggggaatagattcctggaagtgcaatttcaagatccaatagtgggaatatttttaaaatttgaataaatatagccacatttccttttg

SEQ ID NO: 239723 - DNA, 584 bp, Homo Sapiens
  misc_feature (115)..(115): n is a, c, g, or t
atcacaggattccgattttaatacgcctcacaataggaattttggccttgaggccaagaattgggcacgagggttaattagtagctggagctgtcactgagccctgcatgtttgncactgtactcggcacatggtttattattgctatctcagacaaaacccaacctagatgtgtgagtttggtaatttattccaagttacgtcaaggaagataaggtcccggtgagatgagtaaattagcaagggggccagtctgaggtcttgtttggtagctgggactactgtgctcttgtatatgatcagatttggcacaggtttttagaatagcgtgtatacaagtagagggatctctttttttctttttattgtaaattgacaattacatatgacataaatgtatggggtacaaagtaatgttataatctataaatacagtgtggaataattaagtcaaactagttaacatactcatcaccccaaatgcttaacattttttgtggtgagaacatttgaaatgtactctctcagcaattttgaaacatacagtactctgttaactattcaccatgctgtgcaatagaact

SEQ ID NO: 239724 - DNA, 573 bp, Homo Sapiens
ttcccaaaaaaattttaaaaggcagtcagcttttctggtgccaaaatcaaagtcatagcagatttggggcaaatatgtcaaagtcaaacttcggcacatcacttctgagaagacaaagatgaatgtgtgacagtttcctgcccccaagaatctttaagcattgtgaaggaagattaatatagccaaataactagagtgatcagttctaccagagaggaccagttttggaagccagaggaaaaaaaaaaaaaaacagaaacaaaatgatgtttgaattaaatctttaaaagtttctcttataaatttaccaagccacatattgggaatggtaccccaggcagaaggagtagagtaagcaagccagaaaggaaatactatggtgcttttgagtaactgcagtgtggctgaagaatgtggaaaatgatgaggataaagaggtggacagggaactaggtaagggagggcttccttttaaataattagaccttgtcctgtgtacatttaatgggattttaatcaggccataatgccaaatttctttacttcggaaggatctttatggtaatggtttca

SEQ ID NO: 239725 - DNA, 699 bp, Homo Sapiens
tttacttcccgaacacttttacatgttttcactgttttcctcctcccatcaccaaccccaatgaatttatcctctcatttataaataaaaaaataggtgtaaagagataaagtaatatgcccaagtaagtgggaaactcaggatttgaacccaactcctcttgctccagagtttacacgctgaacaacaatgctattccgccctctacccttgatctagtcccctcttggccatctggtagttttgtaaattcaagcatagctccttctatggccttgagcccctcctttccctgcacagtagagaggggttggacttttattggattgtgtttgtattgtaattgtgtgtttttccagatgtgttttctagccacaggaagagatactcaaataagtctttcaacagtatctattatgctgacattcacacttgtttgtgttattttgtacgctttggaagccttctgtagttaagtattagttgagctaattccttactgtttttgtgtcatactttgttatggagcaacgtaatatgtgtatgttgttaactgaatcgatagaaatctaagaatcaacttggtctatatcatctgatgattcaggggctggtttggatcattgataaagtaaattattccctgttttacttaactccttagtggcagttttctagattcccattattggcttgcat

SEQ ID NO: 239726 - DNA, 626 bp, Homo Sapiens
ttttaagtggaatattgttagaccatatttatatattataaaatattatttgatttcagaagaaaactttcaccttattttttaatgttctaagtctttactttttaactactacctttaaattgagccttatttataattgtcctatgaagttatattgtatcattctgtgtttgttgcagtatcatttaattgttttgtaaaaagctacattgcaacacaataaaatacttcaatgcttacaataggaagtcttgaaatagtatcctgacatggtattagaaagtcttatctgcagaataacacaaatgcacaccaggaatggggagggatgagggcggaccagagaccagaagagctttgtttttatgaggagaaagaagggaatcacgctactcttgttgactctttactccaagttcattcttcattgctaatgtctccaaatagtgctaccttaggattgatttccagaatgtttcttgtttgtattattagaaagttaaataagtaccattgtaattttgaatatactttcaacagcatggtagaatatatgccatgtggtaatagtagtctttgtttccatttaagctttggcaaatctcttttagtactaattagtt

SEQ ID NO: 239727 - DNA, 656 bp, Homo Sapiens
gcggaaggttggaagtctggccttgaaacaatagaaccaagcttgattaagcaggaaaagttttttgaaagaattttgtttggctcacggaattattagaaggcaggtgaaccaggagggtaagcttccagcagcaatttgtaaacccatgccttagaattggactaaggaagaagctgctgacactccactgccacacagggcactggaagaaagtgctgctgcctccctgccccacctttgccacttctgcagcaggaataggtagaagaatgcccccacccgcaccggaacagcaacaaaaggattctgcatgagatgcctccctaaattgctgaattcaaaaaagaagttgcatacaaagacatctgattgaaaaagggtatgttatatgcccctttcataggctgctagggagttttcctggttctactttcaggtggtgggatcaataagaccagaatttctcatatgttgtgagaggattcaaatgttacagggttgccagccaaactatcaatcatgtataaatccaacaaacactttgtaacatacaagaactcaggaaatgtgaaccattgttggagaatctactaaaatacggcttcccgcaaacgaagatgaatggaaaatgtaaataaaaagaactggcagtg

SEQ ID NO: 239728 - DNA, 677 bp, Homo Sapiens
ttttggcctggtggactttctgaaagacgccaaagcaccaataatttcctgctgttttcaagagtgtttttaaaaaagtttgctaaggctttaccaaaaaaattcctggaaaaagcttcaccagtctttttctaccgcaacaatgctcccactcattcttctcatcaaacaagggcaattttacaagactttcaatgagaaatcattaggcatcgaccttacagtcctaatttggctctttctaacttctttttgtttcctaatcttaaaaaatctgcaaagggctcccatttttcgtcatttaatcatgtaaaaaagacatggttaaatttccatgaatctcaatttttttagggatggattaaatgactggtgtcatcacttacaaccatggttgacctcgatggagcttatgttgagaaataaagtttatattctttatcttttaattcaatttttccatgaacattttgaagtgccctcatattataaatgatatttcattgttagtggttcattaatagggtatttaaatacaattcttttttaatattagtcctgtacactgagatcatgtttaaaaacctattagttctagtagtattttatagatttcttttgattttctatgtatacaatcatgtttctccaaataaagagttttatttttttccttc

SEQ ID NO: 239729 - DNA, 553 bp, Homo Sapiens
taccacccttaaataaacaaaagtgatatctttttctgtatttcattgaacagaagctaaattggacccctatgctgtaaaaaaatgacttaaaatggattttcagaatgaaagataggaaatggcttgttaaaacattaaaatgttatctgcttataagatttttaaacattggctgaaattgttggaactgatatggccaaatgaagtccatgaagaatcagattgcatatgttagagcccaaatttccattgtgtgtttcatactaactctccctgaatttgcatgtgacttgagaggaagcaagaagagatgccagtatatgtctcatgactttccatattcctactttccttccagcaatcccttacagaacccacctcttaggccttttctaatcactgccttaaagccagtataagaaaacaaatttcagctggactgctatctcctttttggccaacctacaacatgatattttcctcaaaacccaagggccatattactgtcatcaggctgtaggccattttattcaataaaaaactgagtccc

SEQ ID NO: 239730 - DNA, 699 bp, Homo Sapiens
  misc_feature (41)..(41): n is a, c, g, or t
cgcttgcggcttgtgccagagtacgacggggcacgagccgnaagatggtggagcttgtgaacatcgagcctgtgtgcgtacgggacggcctctacgaggtggatgtgacccaaggagagtgctacccggtgtactggaaccaggctgataaaataccagtaatgcgtggacagtggtttattgacggcacttggcagcctctagaagaggaagaaagtaatttaattgagcaagaacatctcaattgttttaggggccagcagatgcaggaaaatttcgatattgaagtgtcaaaatccatagatggaaaagatggtaagatcaattgatacatttaatatattctacaaaccaagtaagttgttgataaagtttagagtggtttgtaaatttgacataataattcaggaggtttagaattagaaaatttgatttttttaaacatttgattattctagaatttaaaaattaactactataaatatctgaactatctcaatttttattttaatatgtatggtaagtgtcatgatattaacacagtttactataaatgtacagattgttacaatgcactccctatttaatcttttttagtaattttttagttatcaaaggaaattgaacttaacccaaaaattccttgttgttatatcaagacaagtttcattaatatttcaatgttcttttcctgaagtt

SEQ ID NO: 239731 - DNA, 778 bp, Homo Sapiens
ccttgccttcatcaccattcatttttattactacagtcggtttctggtggactacaagaataatagcgctttcccaaacacaggcactcattttaaagcagttatcttttaatgtgaattctctttgttaaaatgtcaatgttgtgagatttggtagcatattcctatttaaactagtgaatatgattttgatatgaaccttgaaagatggggaatttgagtgcttttaacgtgttgaaagtgtaacacttgaaactttggaggctgggaaatcgaggcgatgaagtgttctataagataggttttctgcccttttaaatatagtggtgctgtctttgtttccaattggaatttcagtgtaatgcactgttctcacttcagatgcagaggaaggataaaatagtgaagttgatatggccctgttcagccaaatttccgaatcataaagtgacatgctaataggatatactgtggcatttctgtgtattacagcttgtatggtttgagttacttttccacacataattttttctcctccacacaagtcattaaatatgttttcctgagagatagtcaagctttgttgtataggaaagtttcgtttgtggaaataaatgagtttcactgtaagctaatgtaattctattacgtgaggaaatgttccttaaaaaataaagaatattatatactgttgttttcctgaatattttttaaaagacacattaactatttcctatttcatccttcatggacatcccacaatagattaccagcacct

SEQ ID NO: 239732 - DNA, 527 bp, Homo Sapiens
agaaaattttctcaattcgaaactattttccttcagcactcagaaatttttatcaaagattatttccacgattatttcctgtccttggtttttcgtgttcttaacctagaattcaattgtttaatgttagaccttacacatcttcaatgtatcatatatatttcactcatattatttattgtcatatcttttggactattgtgtgaaagcaataaatgtatattactttatttattggtaatgctcttcattttcaaatttaatacacacaaattgtgcatacccacacacatataccacagatatattcattttcaggatttctttaagtgttattttaaaaataatcatattcttattttgtgaactgtgggatttcttgaaactttttgaaaactctcattagtctgtgtttgtgtggtttctttaaattatctcttccttcagaattacttttgtgttttgaatttgagtctttgccattcataaggcgggctttccttgaataccagataactctgagtttc

SEQ ID NO: 239733 - DNA, 541 bp, Homo Sapiens
  misc_feature (1)..(1): n is a, c, g, or t
ngctttctaggttttcacatacccaagatccactgcaggctgaaaatattaattaaatgggaaattccagaaataagtcataaattttaaattatgtgccattccaaatattataattgttccattttattattagttattgttgttaatctctgactatggctaatttatgagttaaattttatcataggtatgtatgtataggaaaaaacatagtctatatagggttctgtactacccacatttcaggtatccactgggggtcttggaaccaattctgcatggataagcggggactaccatactggcaacaaaaaaaaatcacgaagtcctcggcttctaaatccaatttccccattagcttactgtgtaactttggacaagtcactcattctccctggacctcatttcctgactgtaaaaagagcggattgagttagataatccctaaggtgctatttagccccttcagtggttgtctgctggccatattgtccatattctggattaggcgtcatctgcccctcaattctcatttccc

SEQ ID NO: 239734 - DNA, 649 bp, Homo Sapiens
aatactccattctagctttaatcccaaatgccacccagtttccattttttcctgggaaagactgctttctaaatgcaaagctctttcactatcagaatgtgtttttaagcagggaaaacttttttttggtaaagggccaggtaaaaaatattttaaactttgcaagccagaaggtttctgtagcagctcctcatacctcttcattgtaaagtggaaggagtaaagtgtaaacaaatgggcgtggctgtgttcctaaaaactttgacactcaagtgtgaatgtcatatatcttgtgtcagaaaatattctcccctccccccaaccatttaaaagtacaaaattcattctcagcttgtgggcagtacagaaacaggtggcgagctgaattgacccacagccttcccagcttttaaggaaaacagtcagcaatgagccagacaagtgaacaagataccgtatttcgcttgatagtgtatgtgtaaaataaaccaatagtctttttagaaaattgttttattgatgtggaagcaaactaggaaattatgtagtccatcatatccatcatgcattttaaaataatgcattcctggagactctttggctctgaagagaatcatctttttttttcccctcttacagattctgtaat

SEQ ID NO: 239735 - DNA, 736 bp, Homo Sapiens
aaagggaattttggcctgagggccaagaattcggcacgagattcagcaacatctgctatagataccatgaccagagaaaatccagtgctttggaatatgagtcctaaagtgaaagctacagggcatatgctctgacttcacactgactgacttcacatctgactccaggatgaatagcagcagaaatttattcatttgatattggttaagacttgtcctcaacaacatcttaaaggtcagctggtgtgatgtaaagtaaagctctgaaactcaaagttttacttcagatggcaaataacatttattcattaaattagctatattgataaagatgcttttagaatgttgtggaattatttttatttctagtcatctatccgaaggcattttgtaattgtgcttgtgtgtgtgtgtatatgtgtgtgtttgtgttacagtttaaaatcttactgtattacctacatcattgaaagaatcatcatgcagcctttctcaacaaaggcttatctagagaattataccctaatatcctaaagtatatttaatgaattaataaatatttaatgaattaacttactcattcctgggagaattgagaatagagtcattcaaatcattttctatggggttaaattctttggctgaacccgagttgagaaaggctgctagagaatgcattgaagaccaaagacttggttactgtttatgccaaacttcttaaagattaccaccacca

SEQ ID NO: 239736 - DNA, 705 bp, Homo Sapiens
gcgcatttaaagaagtgcttcacccagcaggccctcaagtaacagggcatatgaattcgactggggtttgggtttttccgtaagaaaggttatgccatgtctcaaaaaatgaatggctaatgtttctaggtagatacaattacaaagccgtaccaaataaaataatgagacaaaaagaaataggtagattgggattggctgtgtagaggttttaaggtaaaagtgggcaagttaaaaaagtttcgtatcagagaagttagttgcaatttattgaatgtaggagtactcacacagtttatttgaatatgaaatagatccagatttcttatgtatggtctccggttttccataccgattgatagttcagggctgctttgacataaatactgtgcttctactgccacctacagatgattagtgggtcttggagctcttcacctttaccccttataaagtctctttgaaattgaaataattttttttaaaagctattaattggtagaatattataaaatattttaatgttactttatgaatatttctatattatattacataatactatataatatgtagctttatataatagatatgaatgtattcctctaaaacaaggtggccaatcttctggcttcccttggccacattgggagaactgtcttgggccacacataaaatacactaacactaatgatagctgatgat

SEQ ID NO: 239737 - DNA, 711 bp, Homo Sapiens
ttttagtttaagtgcatgttatttaagtaacatttaagtttaataagatcatgggatttaaccattttttcgtattttcaaattagaaaaattttgtatttttacaattagaaaagtgtaattttttattagtaggcaacagatatgacacagctaggctaaatcaaattattacatatagtccaaaatttagatgattatactgaatattagtattcacttactgtactactgaagagtcaacatttcaaagctaatgatgaaaattatctactaagtgtgtgactttttccccaagaatgatttcatctgcttccaccaatttcagtattctagttgatagagtcaaaatcatagcatgcggaagcagcacaagatatcatgtgcaacatgtgttgtgccaagtcagtaaacagccatcgtaggagtggccagcgtggccttataccttactagaacccagagaaaaaagagcctgctttttaaagagaaaggcaaaattgcttctggcctccatttcccactctttgtttctcatgggaagaagcaagaattccagaatcgtgtgaaattttcatggttttatgaaatcattctctgagtcattaaaatgtatgctaagaaaaaaaatctaacttatgctttatgctcagatgcaattttaatagtctcaaactaagataaacaaatatcccagcacacttttttaat

SEQ ID NO: 239738 - DNA, 699 bp, Homo Sapiens
ggaagggtaatgtaaggtaaaaggaagaaagttgcttgtgggtaagggaccaccttaccaggcaaggtggggtttgcactgggcttttgccattccctccacacctaggaattatggagagcctttctttcctagttccagtggcatatggattaccaaggccctttcaggattcgtttttttattttttattttttagagacagagtctcatgttgcccagtctgtagtacaatagctatttacaggcatggtcatggcgtactgcagcctcaaactcctgggctcaagcagtcctcccacttcaggcttctgagtagctgggcctacaggcatgcgccaccatgccctgacccttttggaattcttcacttcactttcagtctattaagaattctcagccgagtgcagtgactcacacactttgggaggcctaggcgggtggattgcttgagcccaggagttcaagaccagcctcagcaacatggcgaaatcccatctctataaaaaatataaaaaattatccgggtgtgttgatgtgcacctgtagtcccaggtgcttgggaggctgagatgggaggatcacttgagcccaccatgagagatcgaggctgcagtgagccatgattgtgccattgcactccagcctggacaacacagtgaggccctgtctcaaaaaaaaaaaaaggaattactgtac

SEQ ID NO: 239739 - DNA, 665 bp, Homo Sapiens
aagattagatttccaagtccacctgaaggaaagggcctgtccaaatccttaagcgtttacaacaatcttgagctgaaactacttaaagctgctctagccccaacccagctcaactcctaatgatatcacaggtcagctactcagcttcgctacctagtagagaatacagtatgttcatcctagtgtgaaattttctactttgatttccactgttcttatacgcattatgtctaagaagcaagaaatgatgtcacataatctaaagaagaaacaatcgatagaaaaagaccttatggatcacccaagtgttggaatttagacaaagactttaaaattccatgaaaaattttctttatgttaaagaaaaacgagaggcagaatgattgagagaatagacaatttgagcacagaaaaaaagtaacaaaatagaaaatctagaactgaaaatatatccgaaatgaatgcattgtttcatcagttatttatttttgtagaaccaggatctcatggtgttgcccaggttggtcttgaactcctgaactcaagagatcctcctgcctctgcctcccaagctgctgggattacaggcatgaacctctgtgcccagctgaaatgaataaattggataggcttaacaaaatggatgcaacaaaatggatacaaca

SEQ ID NO: 239740 - DNA, 700 bp, Homo Sapiens
gcaccttgaagacccagaaaaaattgattcttacttgtctttggtaacaagaccctgtttcatacctaagtactggtgaaacaagctttagtttgtaagctatttgagtagaactaatggaaagattaaataatagtacatcaatagttacaatgaagaaactaattatcccagagagtttttgagcatatgggtagtgtttgtgaatttaagtttgttccccacattgtcagtttattctaaaattatcaccattttagacttaaagaattttaaagccaaaagataagcaaacagacttgcttaggtcctgtagcaaattaattcagaccttgaacaacatttcattgtgctgtttaggaagtgttaagtatattgagattttccatattactgtgttactatcatacttaaattttagaagatgatcaaattattttaatgactaggactatgcttatgaagttagcatttcctgcccttatttatagaaagcacttgatatatttcacaaaggtgaggagattaactttttagggaacaagtcatttaaattcttgaaccagtttccatcttttaggctatatgagtattgaatataggagaaaagagaaaagtatgcatgtttctcaaaggctctttctttaaatgtcaccagcagatctaaacagtatccataggcacctatggcaaatttact

SEQ ID NO: 239741 - DNA, 656 bp, Homo Sapiens
  misc_feature (157)..(157): n is a, c, g, or t
aaaaaaagccaataaattttaggttatgaattctactgcttctgaaggtatttttaagatttttcaagaacttatttttttataaataagtctaatttgagcattctgcaatactttttttcctatcaggaaaactaatgcagatagtattatgggnacgtgtaggttttatagaaaaaaaaagtacatgtataattcaaaactcaactttgtatgtataggagtctgctggttgtttgtacagcctaatatgagcacataataaaagtccgtcattccccaaccccctccccctacacacacagcttattttgggaaactgccccttccctgtgtgatttgggaagagaaagtgataggaatcaagttgtcctctggcagcctcctggagagatggctgtgagctcttgctgcttaaacctctagtgccaccctcatttctgacctactgaatgctcagctgtttggcatttcctttgaatgacccagcatcttcccttttgttgtcggaaatcagaatcagtctctattgcttgtaacttaagaatctggatattctgtttattatattcttaaatggttatttggaaaatgtgctcatttataaaagttacagtgtctttttaaagtttgctgaagtaaatgaagcatatcgt

SEQ ID NO: 239742 - DNA, 759 bp, Homo Sapiens
aattttctggagaagccaaaggtggcctccctgtcccaaaatatattggctatataagagtaattttacccctctacgtacctaaaggcacccagttcattagtctgtggggtcctggagcctgtctcttctttctggaggttcaaactgaatagcaataattacgttacccaaagcatgtggaggaaaagtgaaaccagccacggagacgctggcccacgggctcggcctgcggtgtggcctgctttgctcaccagcgtcagccgctcatttccttctcatgaagtcccatctggtcatggggacgagggccgggagggcaccgggtagccttttcacacttggggattaggggagtgagaaaagatttgggccatgcatgcaaagtcaaagtttaaaattttatccttttcaaatagatgatataatatacctatacatgatataatatttgtatatatgaaatctctctatatttgtttaatttgagccattcaatctaaaccaatgtacaggtgtacaatgaaaaatttaaatgcttagttatttttcccaacacagtgtaaagtcaccctcctctgagagtgggatgtgcagagttttgatgttgcagctttgctcacttcctggcaagggcaggtcatgcctcaatttgtaatgggagtctggggtaagggtgggggttgaaagttgttatctttaaatacatgtacaaatcgttgtcaaaagtaacgttattaaaatagatttattatccct

SEQ ID NO: 239743 - DNA, 695 bp, Homo Sapiens
aatgagggggtggggccgggtctggccctctcttttctgggttgctccctctgcctaggccccttggtactcagtcccggcagcaagagaccccagggtgagtttctgagcgcatacgtagttggtctttacccccaggtgtcacacggggccgagagctgagcaagaatttggaatggaagttatgaccaagggaattatgctgttcatttataatagtggacattatggagagctctgattcctacataatatgaataaggatggataggccgggcgtggtggctcatgcctataatcccagcacgttgggaggctgaggcgggcggatcggttgagctcaggcgttcgggaccagcctggccaacatgatgaaaccccgtctctaccaaaaatagaaaaaaatatagccgggcctggtggcgcacgcctgtagtcccagctactcgggaggctgaggtaggaggatcgcttgagcctgggtagaggctgctgtgagctgaaatggcgccactgcactccagcctgggtaacagagcgagaccccgactcaataaataaataaggatggataaattgtagcgtatgcaccattcattatgctaagacattttaaagtaattatgagaaacgctctactaatgatttgtttttatttgtatttttctgcttattagacaaatatatactcattt

SEQ ID NO: 239744 - DNA, 608 bp, Homo Sapiens
gaaatttattggggaccaaaagctcttctttggctatagacaattaagaggttgaccttttaagttaatgtatatgcttaaaaacagttttaggaaaatatttggtagacaaagagtttcaactttaaatgttcactatgtcatttagtgtccagctttacggataggttgactatctaaataggcatttttagtcattaaaaaaaaatctagtcaccaggaggatccctataactcaaaataacttgtttgtaaaagaaaatttgtttacttacccattagtaagttcctgcatattcattataagatggcaaatcaaacttttctaggatgaagacagcttatttttaagttgtatagtcttagttggtttagggtctcaattttaattaataaaatacttggtttttatttgcttgtccttttgaattcctgttttaataattttaaaatgagcacaaagaatgttgaagttcagattaatctcttctgaatgatgtttttttcctctgtgatgagttgtttctgacttttttccttttgtatttgtaatgttgattaagatgtaaaataaaaagtgtgcctgattatttttgcaaaataaacga

SEQ ID NO: 239745 - DNA, 672 bp, Homo Sapiens
ttgggagaggaaaaaaattaagggccaggctaattccttggtgggttctggggatggtttttgcaaccacaaggtcattcttttgaataatcaaaggggttgtccttggtttcccatggagcaaaatgaataaaatcagatggtaaattggtgtgaattattcatcatgtggtaatacaaggctgtaattcctacctctgacaattgcggcctgtgtcagttccattgtttgtgttattgtactttatgcaccctccagaattatctaccccctccccagtgtaaaccattggttggaacattttgcttcttagaaggcagcagttttgtcttctgcctcttttaacatattctgtctcttaggtctgaattctgaatagaaatcagaactttttcactcccttatgaagcatgttagtgggggatgcttaccttccttaatgaaacttgagacatgcagtcttctttgatttccatatatgattaataaatgttacattcataacaatttttctctcttattttcattaacagaaaaatagcaaaatggctgcagctcagaaggctttggctaaagttgacaagagtggaatgaaaagtattgataccttttttggggtaaaaaataaaaaaaaaattggaaaggtttgaatctttaaaaataaaataaag

SEQ ID NO: 239746 - DNA, 598 bp, Homo Sapiens
aagaagtattttcatttcatcacccctcccatcaattcatgtgttgttccacacatttttaatgagcgtccttgtgaacgtggcacagttccgagtgcagtgaataaatgtctccccctccttgagcttatattctatttttatttttgatgtgtcatagttacttctgttaatcagttcagtagaagtgctgagatactctgtgacaaaacagatcccatcgacatcatttttacaaataagaccagatgtcctttagccttgtcaacaggcttgggccatggtgaacaatgtctgcctctgaagtgctcagcagaccgtgtgaaagaagaaggtccgggtgtttggaaacaatggctgagtggcggtagtggtgcattgtgacctcattattctgcttttggtttctcgccttgtaatatgaataaggcacatgaggatttagtgtgtgtcataagataagtgactgtcacgttaagcttaatgtctctgtttctgtaactttctccataatctggcagtatctcatttcttcgtggccagtgtttgggcactgaaaaggtcaatcaatacatagaattgtgactcaactcacgct

SEQ ID NO: 239747 - DNA, 604 bp, Homo Sapiens
tcttggaaacctttccttttgggtttggttttcttttccagtaaatacatatttctcttaatgtactgctaaaagtaatgtatctttttccttttttttttttaattgagatagagtctcattttgtcacccaggcaggaatgcagtggcacagtcatagctcactgcagccttgaaactcctgaactgaagtgctcctctcacctcacctttgtgcactgtcacacctggctaattttaaaatttttttttgtagagacaggtcttgctgtgttgcctaggatggtcttgaacttctggcctcaagtagtcctcccgcctcagccttccaaagcactggaactacaggcatgagccactgcattcacccttctttcttataactgcagttttgaccttatgacttttaaaaacattgttaggaaatgttttcccagtaagatagtccagaatcattcacactttagcataagaaaaaatagggcttagattcagtttatttggcagttcagagaatgttggagaactgttcaaatgaaaacctgacagatcattatatcaatgcaagggtttattaagtttcctacattaggtcgcctgccct

SEQ ID NO: 239748 - DNA, 649 bp, Homo Sapiens
gttttgccttaaaggaaattgtattgtcttatagagtatgtggggccattttctgccccgtaaaaggtcaaattgttttctctctctaaagctttgttcattgtatctggtggaattttggttctcagggagtagacacctagccatgcttctaatgtgaagtgtctactagcccagtggtctctattttggatttgaacttacttcgaccccccacctggtgccttaccttttaatcatattatgattgaacgtttttatttccacattttttatttcttatgttattattccttagttcctatctgtaagatcataaagtcctttgaaccaaacacagttgatatttcatacatatgttaaaaactgagctgtgagaccagacatgatgactcacgcttgaaatctcagcatttcgggaggccaagacagaaggatcacttcaagccaggagttcgagaccagcctggaaaacaaagcgggaccatgtctctaaaaaagagaattagatgggcacagtgatatagtgcctgctactctggaggctgaagcaggaggatgacttgagcccaggaattccaggctacagtgagctatgatagtgccactgtactccagcctgggtgacagagtgagaccctgtctaaaa

SEQ ID NO: 239749 - DNA, 678 bp, Homo Sapiens
ataaaaggatgccctgggacccttggtagggcctctccaccaagggtcaatcataacttctgttttaaaccagcccatcccattttctccaggtgctctccttatgtcttgttcttctcccctccaaccttttcagcataaggactcaatcctaggctcctaccccagacgggtgccttccaacgttcctggtgccagtggccccccatcagccatgttcccccagccccttctccacactcttgtcacccagggccccatccttcagtgcattgcacactttgcatgctgggtcagggaagattgtggagagaggacagtgcacctggtttcccccacatagactgcgtgggggtatgtcctgcttccgccacttccaactgtggcacttgggcacgcccctctcagggcaccttccctttttgtctccgcaaaatgaggttgtaatagtgcctgccgcactgtttggcacacagtaagctctcaagaaatgttagctgttgttgccgttagaaccccatagctagaataccatacctggcattcacttaaaaaaaaaaaaaaccaacttagggccaggcgcagtggctcacgcctgtacttccagcactttgggaggccaagacaggcagagcacctgaggccaggagttcaagaacaggctggccttgtctctac

SEQ ID NO: 239750 - DNA, 515 bp, Homo Sapiens
  misc_feature (17)..(17): n is a, c, g, or t
  misc_feature (219)..(219): n is a, c, g, or t
gggctagtgtgctaacntgctccctttaccagctcgggctagcgcttccggctcgatcggtcaaacccctccctctctctctctttttctctgcttctcacggttgtttccgttttccgcccagctctcctccccctttctctctaaggatggcccagaaggagaactcctacccctggccctacggccgacagacggtaaggcccttccctccgtccntgcgcccccatgaccccgcatggcgagttcctgctgggaaacttgagatcctgcaatgagcaatcctttaagcactttcttccccgttatgctccaaagtacgggtcccaagtttgacgacagaacccgctctggtcatttgtagccacatcctgtcaggtgctgccaacgtgaatctgaccagccagtgactcccagctggtgaggacctttgcagggctcgtcacatacaaatgatatctgggactgagcaggcagggcctggccttcaggccatgattcccaatccatatcct

SEQ ID NO: 239751 - DNA, 612 bp, Homo Sapiens
agttgacctgaccagtgtatgaaattcaaacactgtataggaacaaggtaaaagcacaggtaggaattgctgaataattacctttagaccagcctgaacaggagacttcccacgagggtgagctcatttaatggttcctaaaactcaatcttgtggatgtcagtggtcatgcttgattatttgcagcagtgttttatgaaaagcagtagaaatgcattgggaggctgcagagaaagaggacaataacgggttttacttttgtaaatgaaatcccttcggtatgagacaagtatgttttttgctgctctgcctaagccactgaaaagggagatgtatgtggatgttagtgtgtgagtatgtgtgtactgttcatgtaggcacatctaaaaactgctgtgcactatggctgatgaccaacaagagacctaaaataaaaagagaaaaaagatgctcattggctttggaaaggaagcaattataaatacagtttaaaagattaacctattttccatttctccactcacctattttcaagaaatgtaataaaacaccaagctctttaccatatgtttacaacatttctaagtaaatataagtcttttaaatgccaga

SEQ ID NO: 239752 - DNA, 638 bp, Homo Sapiens
gtgcgccaccatgcccggctaatttttgtattttaagtagagacagggtttcaccatgttggccaggctgctcttgaactcctgacctccagcgatccgcccacctcggcttcccaaagtgctgggattacaggcatgagccaccacacctggccacaaaattttcaagttatggaagttttttttttttttttttaagtaattattttaagagtaacaatctaatctagtcctgagaaccatcactgactaattcaatcacacaagagggccggctccagaagcagtccctcagaagatctcatctgtggactgggcatactgaagtgacataaataatctatatgccaaaaaagagaaagaaaatctctgggatccagtaatgactaaagttaaaataaacttggctattgcatgtacagttcacaaaaaactttaaatttgtggtatggagagtatatcaatgactattattggctgagaggtgacaaaggacaatgaatttagtggttctatggcatctttatggtcgacgcggccgcgaatttagtagtagtaggcggccgctctagaggatccaagcttacgtacgcgtgcatgcgacgtcatagctcttctatagtgtcacctaaattcaa

SEQ ID NO: 239753 - DNA, 348 bp, Homo Sapiens
  misc_feature (3)..(3): n is a, c, g, or t
gcntccagctttaaaagttaatagcctaagtgtgtatttgtttgaatagaaggctcgagaacctcttttactgcccagtacacgtaaagcttggctaagcagacgcatcaggagcaaaccatttgtgttcacccaatctgtctcggcaagtccccagggccactatcttgctagaagccactgtgtgcttttgaaagcatgaaattagttttatactgagcacatggtttctcgtttagcagctctttttatggtaatggtcaatttatggttcactgccaggatttcggtgtactgtcaaagccgatagcttctgctaaggcgtctctatgaagatttaaaaaaaaa

SEQ ID NO: 239754 - DNA, 427 bp, Homo Sapiens
  misc_feature (99)..(99): n is a, c, g, or t
ggactgtgaccccagccagtgttgggggaacaaggaagttgcctccaggaagttaagtggcagtgcgcccccccaaggggcagtgaagcccatggaagncgccctgcccttcctcactgcagtcaatgccagcccacacttgtgtatactgagtgcctgccttcagatcctcagtagataaaataattcccacatttaaaatgattcctgcctattttttataaagggtttgaaagccactactataatgactttgtcacctaattgattttctactaatttttacatattcagaaacttcgtgtttttttggtggacagaatattttggaggtctccgtcgctgtttagaatgtggccacttggctgtttcacagtttttaaagctattttattgaatagtaaagcagtgaacttaaaaaaaaaaa

SEQ ID NO: 239755 - DNA, 438 bp, Homo Sapiens
  misc_feature (6)..(6): n is a, c, g, or t
  misc_feature (27)..(27): n is a, c, g, or t
  misc_feature (45)..(45): n is a, c, g, or t
  misc_feature (135)..(135): n is a, c, g, or t
  misc_feature (298)..(298): n is a, c, g, or t
  misc_feature (386)..(386): n is a, c, g, or t
  misc_feature (413)..(413): n is a, c, g, or t
  misc_feature (419)..(419): n is a, c, g, or t
ccttgncagaaatggtttggagtattnccctaagttattaatttnggcccgatttgccaaatataatcctcagacaaattgtttattatccaatagtaatcattgtagtaaccatagagccctacctatatgccnggtacttttccgtgcattatcctattcccaataactctgtcaggtaaacatgattaagtcacccttatagatgtggatacaggttccaaaaatttaagtaactcacttgtgactaccaaactcatgaatggtggagaaggggcctcaccccaggtaagtgtgnctcccagccagcactatccattcccttcctcgtaactgctcttactgaataaatcactgatgtggttaatttcaaaattcttaatagncttaataatattccatatgtaacaagnattagncatgttgaggtccaaaaaa

SEQ ID NO: 239756 - DNA, 449 bp, Homo Sapiens
  misc_feature (24)..(24): n is a, c, g, or t
ctaaaaactactcttttttgtttnccttaaaaaatgactcatgaaccttaaggtacctaagtatggacactccctgacaactaatacccatagcggagaactactgagttaaagggtacccagtgccaaatagagggctgaaaacaaggaaggtcagtcagtgaatgggaaagaaatatgacaaagccctaggaaagggagctcctctagcatcaaactgtctgcatgtcgagtctcagaaaaacaaggattcgtcagtcaacccctttctgcatgcacagtggatttagggtaaagtttatgttaccctgtctttggccgagcgcagtggctcctgcctgtaatcccagccctttgggagactgaagcaggaggattgcttgaccacaggagtctgagaccagcctgggcaacatgacaaaacctcatctctactaaaaaaaaaaaaa

SEQ ID NO: 239757 - DNA, 439 bp, Homo Sapiens
  misc_feature (19)..(19): n is a, c, g, or t
ccatggggttactcccccngtttttgggttatcccccaagtaaagctgtttgaacaagtacaattatttgaaatagacataaagccatggcaatgttaatttccaatgtagaattcaaacccaaaatgtattaacctacaataagagagagcctttatattgcctgtcctacccaaaaagatacaggtcaatagctttccatataagcctttacaacaactttcccattgttgtaaaagatcctattctgaacaaaacaccaggcccagataatttcaaagttgtgccaaactttaaagaaatgatcatttccagttttcaaacagtttcaaaacatagggaaaaaatagtaagcttccaaattatcttgaggctagcacagccccgatccaaaaacctgacaaagtggcaacctccttcccctattaaaaaaaaaaaa

SEQ ID NO: 239758 - DNA, 496 bp, Homo Sapiens
  misc_feature (6)..(6): n is a, c, g, or t
  misc_feature (19)..(19): n is a, c, g, or t
  misc_feature (44)..(44): n is a, c, g, or t
  misc_feature (60)..(60): n is a, c, g, or t
  misc_feature (66)..(66): n is a, c, g, or t
  misc_feature (73)..(73): n is a, c, g, or t
  misc_feature (79)..(79): n is a, c, g, or t
  misc_feature (106)..(106): n is a, c, g, or t
  misc_feature (149)..(149): n is a, c, g, or t
ccctanccccctacccctngccgaaaatccccgccggggtagtnaccccaaaaactgtangaatgnattaacnaaaaancgaaacccctaaaatgtgttgatgccntagcatttatggaaatgatgtaaacacctttgaaaaggagtgnaagaagcctattggcttcactaaagatatacacaggcactaaactagaggggtgccttaccagaggtatcaggcttagtaacattctaggaatatttgaaggaatactgttatatatttaaagtataatattatatagaacaagtgtataaaaaactgtcccaaatactaacagagtataggtagagaaaaataaaggccagtgtcttctcagtatcatgttagtattatttcagacctcattaaagaataatatttaacgtgaagaacatgagtaataaatcaatatgaagaataaattctaaaattttaaacaatgaataatgacaatactttatttaaaaaaaa

SEQ ID NO: 239759 - DNA, 516 bp, Homo Sapiens
  misc_feature (4)..(4): n is a, c, g, or t
  misc_feature (10)..(10): n is a, c, g, or t
  misc_feature (23)..(23): n is a, c, g, or t
  misc_feature (28)..(28): n is a, c, g, or t
  misc_feature (48)..(48): n is a, c, g, or t
  misc_feature (59)..(59): n is a, c, g, or t
  misc_feature (196)..(196): n is a, c, g, or t
acanttgtgntccaaaatttttnactgnccgtcctgaatggaaattanagggaaaaatnattttggcccaaaaaccctaggttacccgtgaccccaagctccttttggcaagacccttgaacgtccacaaaacccgtacgccttgcctggagaaagggaaaaggagagttgcagcccacctaagagagtccaaagnctgtggcctgccctggtggtgttttataggaactggctcagggaggctgcatgtcctttgttttctgaggccttgttcccacgtggcctcccacttgaggcccaggaatattgcagcaatgcccgaagagtgggtggacaaatagccttattattaacctaagttggaaacatggctttttgagtgtcttcattcacagatgcagtcacaaaatattaatactctttttttgaacatgacaaaacaaagtattcatttaaacctcctttgtccacgtccatggtaaaagagcacctccaggcaggggagaaaaaaaaaaa

SEQ ID NO: 239760 - DNA, 448 bp, Homo Sapiens
  misc_feature (20)..(20): n is a, c, g, or t
  misc_feature (431)..(431): n is a, c, g, or t
taagaagtggccttaaatgnaaacactttatgccctcagtagaaatgtactgaatttataaaaggagatacagtaggaagtgagtgttgtattgtacatgttccataaacaaaatattagatcagcaatccatgtataaaggactattattgaggattttggatgccgtcatttattatagcccataaactttacaaatgacaaaactttatccatatatttccttcctgtttctcttcctaaatataaggatgataagaatttcttttaaaatcagctgtagagtacaagtttctctcccttattttctacaggcccatttagccacacagtcttgactgcctttttaccaactgcagtgctatagcttcctgattgccactataaaagctcttcttaacttactgttttaagatgaaaataagatatgnctttctttaaaaaaaaa

SEQ ID NO: 239761 - DNA, 552 bp, Homo Sapiens
gctagattctccaaagattctggaactgaagacatgctttggacagaaaagtatcaacctcagactgccagtgaacttataggaaatgagttagctataaaaaagttacatagttggttgaaagactggaaaagaagagctgaattggaagaaaggcagaatctgaagggaaaaagagatgagaaacatgaagatttctcgggtggcatagactttaaaggcagttcagatgatgaagaagagagtcgtctttgcaatactgtccttataacagggccaacaggagtgggaaaaactgctgcagtgtatgcttgtgcccaggagcttggatttaagatatttgaagtgaatgcctcttcccagcgcagtggtagacaaattctatctcagttgaaggaagctactcagtcccatcaagtagacaaacaaggtgtaaactcacaaaaaccctgtttttttaatagctactacataggcaagtcaccaagtaagtaaactattttccttaagccataatgttttgaaaaaaataaaatctaagaaagtaatgtt

SEQ ID NO: 239762 - DNA, 476 bp, Homo Sapiens
gctgtgtcccgtatatcctgtcatttccatttattttatcctcaaattataaagaattgtagtgttaagtccgttattcactttaagatgcagccagaacagtgactggagtggtttcatacctcatgggtttcccacacttccatcaacacacacttcacaacaccttggaggcattgtgaaaaggtcaagctttggagatggggaagagtcctgaagatgttgggtgacattgtacagtgaatggaggctgcctgcttggcacactttccatcacacatcacattttgctaatcttttggaataagggggaaagacatttaaatgagataattagagataagaatggagattttaatcttttccctgaagtcaagaaggcagataaggagaaattgctgtcactgaaagactgtatattttacaagaagttatttcagaagcagtctctattcctttaggctttaaatgaactt

SEQ ID NO: 239763 - DNA, 649 bp, Homo Sapiens
atactactagaaaaaagaagtgctgttcatacggaagaagaaaagaagtcggtcagttatccttctctctttagccacataacttcttctctcatgaatcatccagtcattccaatggcaaataagttctcacctacccttgagctgcaaggtgtattctctccattacagtcatctttgccttgtgacattcatctggttaatttgagaacaatacagtcaaaggtgggcaatgggcactccaatgaggcagccttgatcctccacagaaaagggtttgattgtcggttctctagcaaaggcacagggctgttttgttctactactcagggaaagatattggtacagaaacttttaaacaagtttattgtcgaaagtctcacaccttcatcactatccttgatgcattcacctcccggcactcagaatataagtgagatcaacttgagtccaatggaaatcagcacattccgaatccagttgaggtgaacctgactttcacatttggattgagaatcattggcttttatacctttcttggtttgacgtgcaataaagaagcacattattttagcttctggctactgtgagaacatgaattctgtgattctgtgggttttttcttttttcttttaccagaacagtaaga

SEQ ID NO: 239764 - DNA, 525 bp, Homo Sapiens
  misc_feature (159)..(159): n is a, c, g, or t
  misc_feature (288)..(288): n is a, c, g, or t
atctttggcccttgggcttggagtgccagtgggaattaattcaacatccttcactgcaagctttcaacctccccaggcacaagttgatcctttcccccactcaagctcacaagtagctgggacccaccaccacaaagtgcatgccaccccccaatcccnctaattttgattttttgtagagacgggtttcttgctatgctgcttaggctggtcttgagctcctgggctcaaagtgatcctttcccccttggcctcctaaagtgctcatattataggcatgagccaccncaccccagcccatgattctatttttaatgtataaaaatgcaataacaggtataacaaaaaccctccttctgccctactttctcgtcactgaggtaatgctactgtgtgtttagtatacatgcttccagacttttccccatttacctacatacatatttacataaagcaaaatagatttgttgtgtggtttttaaagtcgacgcggccgcgaatttagtagtagtagtaggcggccgc

SEQ ID NO: 239765 - DNA, 426 bp, Homo Sapiens
agacattttagtgatgagatttaagagaatgtgcagcctgggcaacacaaatgaaaccctggcactacgcaaaataaaaatattagccaagcttggcagtgtgcacccggtagttcctgctgctcaggaggctgaggtgggagaatcgcttgagccctggagtttgaggctgcagtgagctatgatggcaccagtgcatttcagcctgggcaacagagcaagaccctgtctctcaaaaaacaaaaaaatgaagattctgatgactgcctagggaagagaaattctaagataaaactaagaatttacggtaaattaactgaagagatgatggtgtcattttgaactggaaaacatataaaaaaggtttgaaaaggaatgctctgggttcagatttggacaggctgaatttaaaaagaaagtcgacgc

SEQ ID NO: 239766 - DNA, 484 bp, Homo Sapiens
ctgaaggaaggtataagcaaatagcataatgtgtttatttaacaaatatatatgatgaattcatcctcactccaggcactaagaatatacaaagacatggtgactgttcttaaagagcctactatctagctaggccttaaagaagactaatataggaataattagttttgtatagactttcatgtacttttcacaaaccttaactcatggttacaataacctcataggcattgttatccttattttacaagggctaagattagagccaaaagttgttatattatttagtaaaggttagacaggtaagctgagatttgaagtcaagcactttgcaggattaactgaaatcaaggaggggatgcattctagtcaagagcagaagcaaagctaaaaggtgctcgcttcagcagcacgtatactgaaaattagaacgatgcagagaagttagcatgacccctgtgcagtgatgacacacaaattcgtg

SEQ ID NO: 239767 - DNA, 414 bp, Homo Sapiens
ttggcaatgaaccggtaatcctttaaaaattcatgtatatagttttttttcttggaaattataagaatgatttgatgagtggtttgatgcaacttatattacttggtaagcagttttaaaatattcatgtttacttataaaatttaaattttttatttgtattatctatatattatttaatgttactgttctggttgttaaacattttgagttatcttcccaggttgaatgatttatggattaaagtactattgtacattttcgtacattgtatcacgtgaataggccagattcctctttcctattctttggttaatttctttggtgtattcacaagcttatacttccatatattaaaaacatttatcttacctctgtaaagacaaaaaatgggaaataaaaagccatttatcc

SEQ ID NO: 239768 - DNA, 477 bp, Homo Sapiens
atttgatagtacattttgatagtacaggaggcgatacggcatggtgacagaaaagcgccggcttggttagcgggaccacctggcagggctgcaggctgtgccacttaccaggcaggggaccttgggccagctgcttggcctcactcaccctgtttcctcagctgcaattgggatgaacagactgcctgcttcggggttgcctaaaactcacattgcttaatgatgtgaaatgcttagcgcagtgcctggcatagagagaattctcattagatgatacctcagctgggctttaggagctacagaagaagctgcatctccatgagctcagcgtgtttctagctttcctttttgttttctattcaacctttcacccaactcagcttctcaatccctaaatgacaaaggtttgggaaggaagacttggaccgatgcttgcatttgtttctgagaattaaacgttatgttttcttcaatcca

SEQ ID NO: 239769 - DNA, 609 bp, Homo Sapiens
ctggaagcaattcatagagttgtggaatttaatcctcatgttccaaaatatttattagagatgaaagttttaattttacctccagaacacattctgaaacggggtgatagtgtagcaattgcctatgctttctttcatcttcagcactggaaacaaatagaaggtgctcttaatctgttacagtgtacatgggaaggcacttttagaatgattccatacccgttagagaaaggacatctattttacccttatcccagctgcacagagacggctgatagagagctattacctacctttcatcatgtttctgtttacccaaaaaaggagcttcctttgttcatccatttcacagcaggattttgctcttctacagcaatgatagccattctcactcaccagtttcctgaaatcatgggtatttttgctaaagctgtaagtatgatctcaaggacttgtgtagattatttgtaaaacacacaagaaaccatctctgatctgcctgtgctaacccagcttgaacaatggaagaatattgtgttgtaaattaaaggaattgtatttggtatatagttgctgcccataaatacatcaaactataaaaaaaaaaaa

SEQ ID NO: 239770 - DNA, 547 bp, Homo Sapiens
gaggaaccagtggacgtgttagtttatggatgcagtgggtgcttcccaaaattactataaagctctttgctccagatcctgaaaataaaggcacagaggtttgtatggtcagtgaactagaagatctcagtgcttccatagatgtccaggatgtatataccaaagtgaaatgtaaaatagagagtttcaatattgatcactatagaagcaggccaggggaaggttggcagtcaggacattttgaaggagtatttctacaatgcaaagaaaaatctgtgacaactacaaaacttctagatggcactcatcagcagcatggattcctctctctgacatacacaaaagctgtaacaaaaaatgtccgccacaagttaacatcaagaaatgagcgaagaagttttcataagttatctgaaggcctaatggatggttctcctcattttcttcatgaaattcttctttcagcacaagcttttgatattgttctttattttcctttacttaatgccattgcaagtatatttcaagcaaaactaccaaagaccca

SEQ ID NO: 239771 - DNA, 305 bp, Homo Sapiens
gcttgaacctggaaggtggaggttgcagtgagttgagatcacaccaatgcactccagccagggtgagagtgagagactgtctcaaaaaaaaaaaaaacaaaagaaaaacttctctctagctctgtgacgggcagttcagataataccttcaccagatttacctgttttcagctgaagaatgtgagatgaagccttgaaaccctaaaagtgatatggtaactagggcaggtctttctgtacataaaagtgacttaataaacagtgaatttcatacaggtaaaccctattataccctcagttctaaa

SEQ ID NO: 239772 - DNA, 461 bp, Homo Sapiens
atctttatgaattcaattgttttaatttctagctcccacaaataagtgagaacatctgatgtttgactttctatgcctggctcatttcacttagcataatgatagatactttctttgtcaccttcccttacgtcattaccatcatcactaccccaggttctcataacagatacaggtatcaaatttctgcacacactataagaaacgtaaatatcctatattatgtgttttcaaatcacttgatcagtgttaattcaaatagtggctcagggtccatggtgtctcaattaagagatagtagacacacctcaaaactagattcccaagtcttcaggatgaactcacaaatgccttagcctggtattccagaccctcccagtgtggatccaacctagctctttaccatggtcctgctgctccccacaccacctccgcttactccacatgcagccttacgacgt

SEQ ID NO: 239773 - DNA, 378 bp, Homo Sapiens
  misc_feature (26)..(26): n is a, c, g, or t
gtagggtttatggtccatagggtttnatgaccagcctacctcagtgacctagcctgagatatagccacataaagtattccttataaagctttgacctacattttagtatattttctcttttttgaaatttgttaatttctggatgatttgaactaactcaaaggaaattcatgctgattcatgactttgaggagaaagcgcattttctagataaacatgagcttgtgttagcagattaaaaaaaaaaagagattgtaatcaaaagaaaaccaacgtagtttagataatctcagatgaagatctaatgtcataactaaaaaacagatccaacacgtagctttcaacataactgaatggaagagaagacaaaaaatgtgc

SEQ ID NO: 239774 - DNA, 377 bp, Homo Sapiens
  misc_feature (5)..(5): n is a, c, g, or t
  misc_feature (187)..(188): n is a, c, g, or t
  misc_feature (200)..(200): n is a, c, g, or t
ggccnaaaatgcctttgacctacctacattgggggaagttttcctgacccctgttttcctaaaaaaacttgacccctaaagtatttgtattaatgatagtacacatattaactaatatcactgaaatgaacctcagtcagttttagagcagattcctaggctagcagttctcacagcatgggccagnngatcccaggggnatccccactgggggcctatgagattaaaactactttcctaataatactaaagtgttacttgccgtttttcactctcattctcttgtgagtgtacagtggaattttccagatatgtaatattggagttgattgaatgcaggagcagatatgagaatccagctgttttctattaagcca

SEQ ID NO: 239775 - DNA, 435 bp, Homo Sapiens
tgctgggccccgaccacccctgccgaagtgagccatccccgcctggactctgacacctctgttgtccctactccttaagaggcccaaggcctcatatcactcgttatccttcccatcaatgtcttttctccctggttgattacacattcggtgagaatgcaattttgcttacgatttccttggatcctcccatatagctaatatgtcatttaattcataggaatccaataaacacatatttattattaaagactccactgactctgtcatttcagatggttcaagatgcctttccctctccagattttttaggaaaaaccgaaacaaagaaaatgcatggaaaagatttatgtgtttggttgggggaggggaaattaaacttctcataatagtttttaaattaaattttgtctcgtccaaatcctttccttctca

SEQ ID NO: 239776 - DNA, 461 bp, Homo Sapiens
  misc_feature (2)..(2): n is a, c, g, or t
  misc_feature (10)..(10): n is a, c, g, or t
  misc_feature (20)..(20): n is a, c, g, or t
  misc_feature (34)..(34): n is a, c, g, or t
  misc_feature (56)..(56): n is a, c, g, or t
  misc_feature (79)..(79): n is a, c, g, or t
  misc_feature (91)..(91): n is a, c, g, or t
  misc_feature (103)..(103): n is a, c, g, or t
ancaattttnccaggatttnccagcagcctgggnaatggccttcaaaaaccctgtnaaaaacaattttcaaatattttnctgcactgccantaaaagtttttntaaaagcccaaaaaggtaagaatggaaggatgctcccatcaacaactcatgttgtctcctcccatgtacagggtgttacagttcaaacatctcatcccctttacccctccttcccggggtagctggaacaacttatctaagaggtaaatctgaatagaacaggcattcacagctcagtgacttccctttattctgttgggaaagagctgcttgaaaggaggagggattctctgctcctagatgcttatgtcttatgtaggcaggttgtaaaacatgggaggcctgctccagcccagcatttcctgtgacagatcagccgaatatgcctaattctggcaattagcaggttcagttggct

SEQ ID NO: 239777 - DNA, 365 bp, Homo Sapiens
acatcgatacgacttttttttttttttttttttaatttaagtggtctcactctgttacccaggatggagtgcagtggtgtgatcacggctcactgcagcctcaacctcccaatctcaagcaatcctcccacctcagcctcccgagaagctaggactacaggcgtgtgccaccatgcccaactcttaaaaaaacttttttttttttttttgtagctatgggggtctcactttgttgtccaggctgacagaactgcatttttaattctatagaaatataattctttataggacttcctggtcaatacagtaatgtaagtttgagctcttgattcttcatcgccataattcccttctgtcgtcttctc

SEQ ID NO: 239778 - DNA, 269 bp, Homo Sapiens
tcgatacgacttttttttttttttttttttttagctcatcagttatcgttagtgttagtgtattttatgtgtggcccaagataattcttaattcttccaatgtggcccagggaagccaaaagattggacacccctgtacatgctcatatactttatctttaatctttacagcccttatctgtaagtgttcttgcatttgctttaaaagatctttataaaaacttgtccccaaattgtgagcacttgcaaatcccttctgtcgtcttctc

SEQ ID NO: 239779 - DNA, 462 bp, Homo Sapiens
aaccatgcttgaattattgattaccaaaatgatgagatacaataaattgcttattgtgctaagttttggagtagtttactaagtaacaatagataactggaactaaatttggtatctgaaagtggactttcactataacgaaaactgaaaacaaatggcaatgactttgtacctggttgccacagaagttagaaaggcctcgagaaaaatgttagtgaatattggaaggacatcgaggagactgctggagagactgaaggacagtaaagaaaatactatggggggtggctgaagaaatgacctgtgttatgtagtggcagaaagttttcgtctttgataatgtgggaaaatagaaaaggtgcccaatgaatgggaggatctggctaaggagattttcagcagaatttcaaaactacaaagaggtttcttttagccacattattataagatattgattaaaaa

SEQ ID NO: 239780 - DNA, 606 bp, Homo Sapiens
tatattctgtttgtagataggttttttatctctcagtacacattgccaaatggagtagattgtacattaaatgttttgtttctttacatttttatgttctgagttttgaaatagttttatgaaatttctttatttttcattgcatagactgttaatatgtatataatacaagactatatgaattggataatgagtatcagttttttattcctgagatttagaacttgatctactccctgagccagggttacatcatcttgtcattttagaagtaaccactcttgtctctctggctgggcacggtggctcatgcctgtaatcccagcactttgggaggccgaggcgggccgattgcttgaggtcaagtgtttgagaccagcctggccaacatggcgaaaccccatctacgaaaaatacaaaaattagccaggcatggtggtgggtgcctgtaatcccaactacctaggaggctgaggcaggagaatcgcttgaacccggggggcagaggttgcagtgagctgagtttgcgccactgcactctagcctgggggagaaagtgaactccctctcaaaaaaaagaaagacatccgattgtcggattactat

SEQ ID NO: 239781 - DNA, 373 bp, Homo Sapiens
agactcgagcttgcgtcagaatcacctacaggacgtatggtgcagattcctgggcctcacttcagagtatctgattcagtagatctgggcttccacccaataattttcatttctaatagatttttaggtagtaatgatgttgttctgggtaccacatcttagaaccactggttaagatgtagtcatgagaacaaaagaccagaaacaacccaaaaaaatacccatcaacaaaatctggtggatgaaatcacgatcgatatacacaatggaattctatgcaactattaaaaggaatgcagaagagttccatgttctgttctaggatatcctccaggatgcattgagttttttcacttaaatcaaagtggctccc

SEQ ID NO: 239782 - DNA, 353 bp, Homo Sapiens
tgtttccctttgtctcttcatataaggacaccagtggtattcaattaagggtctgtcctactccagtatgacctcctattaggttaacttattatttccacaatgaccctgtttccaaataaggtcacattctgtggtactgggcattagatctttaacatattttttaaaggaagagggggacatgattcaaaccataacactgcactagggttcttttgatttctttaacctaaagccttagttttaactggacaggtaagtaccttgcccagtcacagatgtaatacatggtagagggaagaatttctcaaagacaactgttctaagactcatattagggatcctctagc

SEQ ID NO: 239783 - DNA, 533 bp, Homo Sapiens
  misc_feature (37)..(37): n is a, c, g, or t
acatgtccttagatattgtgtgctctgttaatttttnccagagcacaagtaaatctgtacagatgatgacgcagagccattcctttagcttcactttcctggaggacttgcaggccaaaattctagggattccatataaaaacaacgacctaagcatgtttgtgcttctgcccaacgacatcgatggcctggagaaggtaaacgcttacacctccttattctttctttcatttcctaaggctttttgtctcagggcttctgagtaggaactggtggccagcagtgtcaaatagaaagtgtttctcactctccagcagctacagatggatgtctactggggagcattaaatagtatgggtcaggtttattgagaacaactaatcctagaatgtttgggatgaactaaaatgaacatttaagattatatgggagtcctaacgatcacccaccattctgagaaatggttggtatctatggacccctttcctggaaaaaagaaatcacatatgcatatatactactcagagtgtcgc

SEQ ID NO: 239784 - DNA, 395 bp, Homo Sapiens
tcccctggatagcccaatcccaggacattcccctgtaagaggcttcctccaccaaggcatactgtaaggaggcacacctcaaagatcctgattgtgctttataacattcctccccgtggaggccacctggacttccagtctggctccagacctcattggcgccccataaaaccagcaggaactgccctcagggtggctgttaccagacaccgagcaccaatctacagacggagtagaaaaaggaggctttatatacggatgttaaaaaaactaaccaaaacaaaaagccctaagggactgaagagatgctgggcctgtccatgaagcctgttgccatgataaggccaagcagggctagcttatctgcacagcaacccagcctttccgtgctgcct

SEQ ID NO: 239785 - DNA, 436 bp, Homo Sapiens
catgaggcagcctacaccaaatttttcttctcgcttacaggccaaagagttttattgtgcatggcctgtcaagcatagagttgctaacatgggcgttcttaaatgtcctagaaactcctcaccctttgtccttcccagcatccataaattcctttttggaatgtgtcaggaagagagaggagccacgggaacagccttaagtgtgtattttttttttttttctttttttttcctgaggacatctgatctccatagttgagtgagtccggtgcaacctgtgtcataaaagaattgagaaaactctaactgccaaagcgaagaccctcctaaccctaggtgtttgaagaattccagaactgagaagtggttgtccatttaggcagcacagtggcttagctggtgcccagttaagatgctgggggggccagtgatatca

SEQ ID NO: 239786 - DNA, 288 bp, Homo Sapiens
ctcttctcttttcctcattcttttcttcttctcctcctcctttttttctccctacttcctcctagcttcccttttctcctctcctctcctggtcctgctgtccccctctcctttttttctccacttcctctcttcttactatcttcttctcattttctcttctagtttttctctttcctcctccttttcttctcttctcctcctcctctttcttcactcctccactcctactccttctcttactgtgccactggccatgccaaacagcacccagcacaagtagtggca

SEQ ID NO: 239787 - DNA, 467 bp, Homo Sapiens
gttgcagcatgacaaggatttaatctgccattgctgactttgaagatgaaggaagcgagacacaagccaaggaatctgttagcctctaaaagctgggaacatcttcagtttatagtctacaagtaaatatggacttcattcctacaaccacaaggaattgaagtatgtcaacaactgagtaaggaaatggattctcccttagaacctatagaaaggaatgcagccggccaggcacagtagctcatgctcggcctcagtgatttctcttcttgcactgtttcttctgctttctttggtttattttttaacttttttttagtagagatagggtcccactagttgtctgggctggtcttgaactcctgggatcaagcaatcctcccgcctcagcctccccaagtgctgggactacaggcataagccattgcgtccagtcctttgtatcatttgctgtttctttttccagc

SEQ ID NO: 239788 - DNA, 568 bp, Homo Sapiens
ggaatagaccttaatttcttatcctattttttagctgaagcccaaaaaagttaaaaggaagtagacttctcaaattttttttaaaaaaagaaatgtcagtggctgctacatttaaagtaccttccttacatgagggaagtttgcaaaggtgaaggtcttccccaagaaaataccaaagcattaccacaaatctaaaactatatccattttaaacaaacacctttaatagactggttataaaactataattggacaattttaaggccagtttatacttttcccttttcaaagacattaattaatataaataagacactatcagatgatattctctatacagagcaagaatatactcttggatatctcaaaagagaagtataattgcacttatttcatacaacaattagcataataacggaaatggaaaatatttttgtatataaattccatttcttaattaagtaaaattaaagtttcattaagagtcagttaaaaaaaatagggcatatactgtctgtatatggctacctgtcttttagtaacatgaattttgtttttttgtttttga

SEQ ID NO: 239789 - DNA, 408 bp, Homo Sapiens
  misc_feature (344)..(344): n is a, c, g, or t
  misc_feature (407)..(407): n is a, c, g, or t
atgaatactggagtgatgatgccaacaagctaaggaatgccaaaggttgccagtaactaccagcagctaggagaaacccaggagctgtgtctccctcacagccctcaggacaaattaaccctgccagcatctgatttcagacttccagtctccagaactgcaggacaacccacagtaccagtaccacccggtttgtggtactttgctattgcagccctaggaacaaatacattaagctaccaagattttatgtccaaaagcaaaatagctaccaccaggaccaggccccatagcctccagctcacttactaggaaacaacctcagaagacttggaaaggaaacnagagttgccactgcccacattacaggtggcttgtacagcaggattccgccgtcgtgccgaatnt

SEQ ID NO: 239790 - DNA, 493 bp, Homo Sapiens
ccatttgtatatcttcttttgaaaattgtctattcatgtcctcccactttttgatgggattgtttgtttttgtttttgctgatttgtttgagttccttgtagattctggatattagtcctttgtcaaatgtatagattgtgaagattttctccccctctgtgggttgtctgtttactctgctgattatttcttttgctgtgcagaagctttttagtttaattaagtctcacctatttatctttgtttttgttgcatttgcttgtgggttcttaatcatgaagtctttgcctaagccagtttctagaagagtttttccaatgttatcttctagagtttttatgggttcagttcttagatataagtctttgatccatcttgagttgatttttgtataaggtgagagatgaagatccagtttcattcttctacatgtggcttgccaatatcccacaccctttgttgattagggtgtcctttccccactttgttttt

SEQ ID NO: 239791 - DNA, 687 bp, Homo Sapiens
gcttagagatcccggttcgcccaagtgttagaactcgtgaccagggacagacagacacagaacacatcaacagaattctctgatggttcccagggagagagctgctgctctttcttccgaagctctgggagctggcacagcccaggacttcctttgctcagtctccacctggacagtggcagtatggcagcctcagaaaagaaactttttgctgtcagggatcatcatgggcagattactggctaaggagaaagaagctccctgtgtatccatggtaggctttgatgagaagatgaaggtggagctgtggaacgaggtgagccaaatatccttatcctttcttggtcctgatgaattctgaagctgttacttgctcttcggtcctttggccgaacgggttcggcccaagggggttcggcaggaaacatgcatttcttttcatccgaatcttcagatgaaccctgagcagccgaagaccagaaaagccatgaagactttctgcttaattcaggggcttacaggattcttcagagtgtgtgtgaaccaaagctttatagtacgtatttttaggatacaataagagagagactatggcttggggtgagaatgtactgattacaggtctacagacattaagacacagaacagatgggaagaggcgtccagcatctggtgatgcctagggta

SEQ ID NO: 239792 - DNA, 418 bp, Homo Sapiens
  misc_feature (33)..(33): n is a, c, g, or t
  misc_feature (104)..(104): n is a, c, g, or t
  misc_feature (116)..(116): n is a, c, g, or t
  misc_feature (137)..(137): n is a, c, g, or t
  misc_feature (223)..(223): n is a, c, g, or t
  misc_feature (291)..(291): n is a, c, g, or t
  misc_feature (342)..(342): n is a, c, g, or t
  misc_feature (355)..(355): n is a, c, g, or t
aatacaaacaggaattttaaaagtttttataanccaatgtgaataaaaacataggccagacccaaataaagaacacaatgtgttgccaaaaacttcactccctntccttgcctccntccttaacactcaaaagaaantgaggtatctcccaactatttgcattatttgataaggaactaaatacaaactatatttgaattaattatgtaaattccacataatnttttaactatcttgaaactagagcattttggagaattatactgaatatatttactttttattcaaatntcagattctaaattctcaaaagctaagaggaaatccattacaattcataanagaatcaatgagnatttacactacttgtaaactgaggaagtaacatccagaggaggtaatgtcccacaaaataaac

SEQ ID NO: 239793 - DNA, 421 bp, Homo Sapiens
  misc_feature (4)..(4): n is a, c, g, or t
  misc_feature (34)..(34): n is a, c, g, or t
  misc_feature (137)..(137): n is a, c, g, or t
  misc_feature (157)..(157): n is a, c, g, or t
  misc_feature (198)..(198): n is a, c, g, or t
taangccccaattttccggaagagggatgaaaanagactttttgccatgtccctctatgaaatgttacccgaagcaatgccctatactattacaacaagttccaaggatggcccaaaaaaaactacgttggcatttncagaaatcccttcccatggnccaaaactattacccaaagactcgatctatgactcatttgnacagagaagccaaggaaaaaaagcttgcttggcccattaactcaaatccaccaaatacttttgtctaagttctcattctttcaattgttatgcaccagagattaaaaagctttaactataaaaacagaagctatttacatatttgttttcactcaactttccaagggaaatgttttattttgtaaaatgcattcatttgtttactgtaaaaaaaaaaaaaaaa

SEQ ID NO: 239794 - DNA, 497 bp, Homo Sapiens
  misc_feature (18)..(18): n is a, c, g, or t
  misc_feature (38)..(38): n is a, c, g, or t
  misc_feature (54)..(54): n is a, c, g, or t
  misc_feature (65)..(65): n is a, c, g, or t
aaagggaaaaattgaaanctgaacaaaaggggggaaancctgccttaataaaancccaatcaagntctccgtgaagaaactcacttccactatccatgaagaacagccatgggggaaaactgcccacccattattcaaattatctcctacttggtcctgctcttgacacctagggattattaaaattcaaggtgagatttggtggggacacagagtcaaactatatcagtgactcaccatcccagtttgccctgggactgtgcccaggaaaaccctcagttttggacaaaccaggatggttggtcaccctaaaggtaaactgaggcttggagggtaaggacattctccaagatcttgtggttgatccgtggaggcctgggatggccactgaagtccacctgatggtgatgatactctaggaggacaatgatcatatagtaagtgtctcctctgtgcctgccccttcttcagccctcataacagccccaggaggcaga

SEQ ID NO: 239795 - DNA, 468 bp, Homo Sapiens
  misc_feature (13)..(13): n is a, c, g, or t
  misc_feature (30)..(30): n is a, c, g, or t
  misc_feature (35)..(35): n is a, c, g, or t
  misc_feature (44)..(44): n is a, c, g, or t
  misc_feature (52)..(52): n is a, c, g, or t
  misc_feature (76)..(76): n is a, c, g, or t
  misc_feature (130)..(130): n is a, c, g, or t
ggggccccacaanaaaaatccaatttaaangccangtgtttaangccatagnctttcctatttttccccttttccnctttaacattcccaaattaggaataataatgcctaatccaaagtaatagtggcngcgtttcctttccttccctcctagtctgcaggtagcatacaaatgtaataaagtactcattcatgtcacatctatttattttctgccttataccaagcttgtgggattctcttaaatacaacatttttatacttacacctatgcaatacccattagcatcgccttcctaaatcaggggaaattgagtctctgtaaggtgcagtaacttactaagatacaaaactcagcattaaagtctgtatacttcaatatcctgccctcttctcatttgtctttactgccttttatgtatgtgttagatgttcaataaattctcttttttaaactgaaaaaaaaaa

SEQ ID NO: 239796 - DNA, 484 bp, Homo Sapiens
agaggtgatcatatgtccgctgtgttgctcccatccaagccctggtgactggtagctctcatgagggtgtgatggtcaggccttgcccctggtgtaaattctgtctgtaataggctgtgactttctaactcaacatcaccactggcttaggagttccatttgcacagggggagctttattgcttttctatatacataagaactttacgtctcaccagtggaggttgggcagccaagacaccacaatgctgggtgtcttcagaatggacttaatcttgtccttttgctttctgccagtgcagatcaccatctctcagatgagcaggaccccaccctctggcagtcttgtcttgggagaatcactctgagctcccatcctttgtaaattaacattggtttgagcaccaccctccatcacggctgcagtgagccatgattgcaccactgtgttccagcctgggtgacagagcaagaccccattccaa

SEQ ID NO: 239797 - DNA, 446 bp, Homo Sapiens
  misc_feature (23)..(23): n is a, c, g, or t
  misc_feature (320)..(320): n is a, c, g, or t
  misc_feature (390)..(390): n is a, c, g, or t
gaacccttcccggggaacaaccnttctggtggtgaatggggtcatcttttggccctcaaatgcccaaacaagcttgaagcctctctttccccgtcttctgacacttagactcacaaaggagcctgcaagccctaagggggatgaaactgcatgcctttggagatgaaactggacttgtgtgtgggcgctgagcattaaaggttgggaggtgagggtgtgtgcagttggatattataataacctcagtaatgattcacacatgtaaggcaaaaataagaagctcaattcttcctgttaaaaataaaggatgccgggcatgngtgtcacgcctgtaatcccagcactttgggaagccgagggggatggatcacaaagtcaaggagttcgagnaccggcctggaccaggatggtgaagccctgtctctactaaagatacaaaaaaaaaa

SEQ ID NO: 239798 - DNA, 404 bp, Homo Sapiens
  misc_feature (10)..(10): n is a, c, g, or t
  misc_feature (23)..(23): n is a, c, g, or t
  misc_feature (31)..(31): n is a, c, g, or t
  misc_feature (44)..(44): n is a, c, g, or t
  misc_feature (70)..(70): n is a, c, g, or t
  misc_feature (193)..(193): n is a, c, g, or t
  misc_feature (388)..(389): n is a, c, g, or t
cggggggcanaggttgcgggtgngcccaagntcatgcccattgnacccccagctgggtgaagaagcaagnctcccccctcaaaaaaaaaaaaaaaaaaaaaaaaaaagaatggctggaactcactgtgagaaatgcactttatggcaccccacataacacacatacatatttattataattgaaataaaatantctccaaaatacacttaaggtgcaaattaccctgatgttttctatgttatcctatcccatcccttgccactccactccactctaatatatttttgttacaaaaatgcgaattatgacctacctaaatgactttacaacctacaatttgaaaaacatttacttaattggtggatttctcggggctaatcctaaacnntgaaaaggcatttgc

SEQ ID NO: 239799 - DNA, 517 bp, Homo Sapiens
gagcaggaaaagcatgatacacaatttaagacaagtgccaccataggctactgttggcaaacaagagctccaccaaactttttaaagtgaagaagcaacagtctgagccatttttctcaccagtggcaggagggggagacttccaccagcaacatggaatcttcagtggatgcagctgaccaaccctcctgacttctcagtcttttcccaccactgctcaccctttatgttcagatgtattcagcactagataaccattcttattaactataagtgatgtgtgtgtgtgtgtatgtgtatatatatataaaactgtactttaagaataaatatatataaactatatgtgtaacaaatttataatatataaactataaatctgtgaaagtattcagcattatataacggcaggctgtggtgatttagattggtggagctcctgaccatgcctgaaaatccctgtaccccactttgaccgtgattttttaagggaatattgtttttttacatctgtatt

SEQ ID NO: 239800 - DNA, 584 bp, Homo Sapiens
caagctgtcatcccgctttggcttctcaaagtgctaggattataggcgtgagccaccatgcccgaccagtttctgcttttattaaaattgttcacagttttatacattcatgttcattaaaaatgctatttagaaaagagtttgataaaataaatattatacaaaattcgaagaaaaaagaaaagagtttctgtttcagtcacaaattagggttattgtgatgtgtatttatgatgaccattgaacaaatgtgaagaatactgtgaattctatgactttatcaaaatcagccacatccaggagcttgcagttgttgaccaaatgaatgatgacatagagtagttcagatctatcatgtgctcttctatctaatcagtcaatatttccttggccctcaagccaacattcattttttatgtataaccttcttcatgattttgaaattttgatagggtaactgctaatgagttcacaaatgtagcactttaaaaggaaaataaatggagagtgaaaacaacttggctacgtataattgtgggttttaatttttctgtttttaaaataaaaaatggcattgatagttt

SEQ ID NO: 239801 - DNA, 540 bp, Homo Sapiens
gtcttccagcattctatggtcccaccaggtgggtaggtgactaggaattcaggccaggtcctagagagtagtgagaagttttccagtttgcagtttcctctgtgctgtatgtacagccatacagcctatggaacctgacattgcagtgggcagcaggacacggtcaaggctcctagctgcctctccatctatggaactatgaaatttcacacatattccctaggcagcattaaggcccaggtatattgagtagtccaaaccaaaaaactatattcgagtatcagtttaaattcttccaagccctaaaaattcttacgtagtttctcacctaaaactaatggcttgtgccaagaactgaaactaagctattgatttttttttaagaagtcttaatctatacataagaaattacatacctggccaggtgcagtagttcaggcctgtaatcctaacaaacactctgggaggccaaggtgggcagactgcttgagctcaggagttcattacccgtctgggcaacatgataaaaccgtgtaataa

SEQ ID NO: 239802 - DNA, 425 bp, Homo Sapiens
  misc_feature (12)..(12): n is a, c, g, or t
aaatgtaaaganaaacgtgtttatcacctttggatagaattcttaagcagaatctaaaaagattgaagagtttgaatatattaaaattatagatttctgtgcaagacactcccctcccctaaaaaacaagtgactgatgagattttccaatacatgtaacaagggtttagagaaatgagtactgatgtcatgctgacagaagtgcaaatatttatggccattttttacagctgttgacaagatccactaaaataaaaattgcagatatcctgtgagcccaattctatttttttggtaactttatagtatcatacaggtgattcactttaaaatacctctgcatggacaacgtgatatgtatgcgaagaaacattcacatgtgtacaaggaagcaggtagaaggatgtttactgcactgctgctta

SEQ ID NO: 239803 - DNA, 536 bp, Homo Sapiens
taggatactatatcactattagtttggacttcaactagtctatagatttttttctttattatttattttattacaggtaattggccttttaattgctattatatatgagagcaaaatagaagactgacattttcttattagttccaaataactagataagttaatttgcagatgtataaaatttattgaaatcacctttgacgtgttgtaacatttttaaaaaaatcattagttattgtgctgctgcttctcagatatttttcagtgccacgaaagcttttattatcagttcagtccctgcccttaaggttcatctgacctcccttccccttccacagatttgtattaagtgaatgattttttctgtataagcattgggggggattgggggaggtgggatttaaaggtgaataaggggtaggcccttcactaaagaagcgtatctcctgttaggaaactgactatctaagcatagagttgttgggttagctttgaagttgaagactgtgaatctgtgtctcaagtaaaaatctagt

SEQ ID NO: 239804 - DNA, 512 bp, Homo Sapiens
ctgaaggctatctgaatgtgcctgcatttagcaagtcaaggccagaccctccagatgcactggactgtggggacattttgtgtgaatgagactattaagaatttagcagttcattctgacagcttgatagatggagtggttttgcatggcatccatgtaggaattgactaaaaaggaaacattttctgagagtccggctgtgtgtgcatgctgggaggtttttctcaaatcagattttaaaactttgctctgaaagaccaacaacaataacctaatccaatatccttgtatatttgattctactgaccataacatttcttaatttctgcttttggcttctgtagcctaatatactaatgataataagtattagtgttgtattaggaggtagatgctattatccctcttgcattcgttggagtctagttaggggatagaaaccatgctagttgagctgttctgcttatagagtagccattctttattcctttacttttttaataaacttgcct

SEQ ID NO: 239805 - DNA, 526 bp, Homo Sapiens
ggtgtgctggtacacgtatgtagtcccagctacctgcctgtagtcctagttactcaggaggccgaggcaggaggatcccttgagtccaggaattcgaggctgcactgagctatgaccgtgccactacgctccagcctgggcaacaaagcaagaccccatctccaaaacacacacaaacatcctcactgaaattccttactgtatttgacaattaaaaagaaaagcattactatttttcttgtatatattatactttagggcaaccctagttggcagctttgagagaagttcttcattacagaagaattccattaaacatggaaggaataactaaactaaaaatcatcactttgcaattctgaatgaaataactgactcaggaaacaatttattattggataaaaccatcagatataaggttaatagggaacttgacagcagacagagggaagaggttgtccctgtgcagctactgattaagctcaccattactaagaacaggacaaccaaatatctgcttgccaaa

SEQ ID NO: 239806 - DNA, 669 bp, Homo Sapiens
gaaccgctggttaattgcgacgggcacggatgcagcgtcgcggtgcatcaagcttgctatggcattgttcaagtacccactggaccgtggtttgcaggaaatgtaatctcaggagagagcagccagagtgatggtatgcaattcctgttggttagcctcatctgaaaacgtcactcctggatacatagaacatcactgcgcatgtgcatctccccacccccgatgcctggtgtctaacgttcctccagtttctggtgctctgatgcattgcttttgggcttgtcttactacagcagctttcttcggtcctcagtcatttaccacttgtcatatgtcctttctagtttccagggatattcttttttatatttatggctttatgccatttatctcagttgtcattggcgtttcaagaaggagaggtggtagtgtttaagtggaattaactacttgtgtttctgatgtggtcttttatatttcttacagggttttgttttaccaagtactagtcttcagtctatcctgtttacttgattttttcccactcaactcacaaacatttttgaatcatctcatgaattctgctttccatttacatttttgcccttttgtcttttcctcttcgctgttaaacttcctgaaaaaataaaactagttgattcacttctt

SEQ ID NO: 239807 - DNA, 605 bp, Homo Sapiens
aagcaacattctgcgtgggatgcggtttgtactctgattccagctaaagcagtgttagagtaaaccaaaaatatgctttcacttagtgcgtaggttttaccggggatttaatcctcatgtgaagatttaatttgtcatgtgacccattaacatatatgtatgtagccctgaactgtgtatttagaaagcaattttagtaaattgaactattttttagacctggaaacgtagcaaaattgagacttctagttcagcatgaaataaacactctaagagcccaggaaaaacatggccttcaacctgctctgcttgtacattgggcagaatgccttcagaaaacggtgagttttaaagtataagcatttttaaagaacattaccttaattttttaaaatcatgaactttttattgaaagttttttttttctgaaaacagcagcttggtcacattatgacagatgtgttttttattgctgcaaaatagttaatgtagttaaatataagcacttagaggagcaatgcctggcacacagtgaatgttacatattagctgagctgttactgttattccttaataattaagttctgataattattcagcctgaa

SEQ ID NO: 239808 - DNA, 444 bp, Homo Sapiens
aaaaaactgttatgtaaacatcaaaaaattcaattattgttttaatcacagtatttttatctttttagaataagtacatacaaatagtgaccattaaaatagtcattgctttattggaaaccaacttttttttttttgtgcacccactcctctctcacccttggccaaaatcaaacaaaacttactgctccttctaaaatctagaaagaatactgcctatttttgtattttgtatatgcttaaggaaggaagagtctggaagtttcttcattggcttcttacattccaactttgctagtcacaaggcctttgtaaaagagactgtggaaactacttgtttgcaagacatttcccaaatttactgtgcttggcctgtgacacttaatttcatggaatgggattcataaagatgatcttaacctttcattccttaagaatttatcg

SEQ ID NO: 239809 - DNA, 599 bp, Homo Sapiens
cagtaggatggcttgacgtctcatttgcttgatgacactgccaagccagagaactgtgagcagacaaatgtaatgaatgactaaggagatgcagggcttcatatgttgagaaaatattttcgtgcattatgtcattgaattctcccaacagccttgtgacgtaagtacagtttggattcccattttacagatgagaaagctgaaaactcaagtaggaactcaagatcccacagccagtaagtggcagaactgagattcaatttcaggtcttcaggagaagggcggggggtggtggtggagggaagtgtccaggtcctcttctctgttggacagtagattcaagcacattagaagaggtcttatggagaagcataaaatgaaataatttttctgtgttggctgtaactcctcctccatgacagctatacttcagttgtgtcaccaacgaaaacagaggctgtatctcattcatctttgtcttcccaaggcctcctgtgtgcctggcacagaacaggcactagtgtgtgtgtttgctgaatgaaagggtatttgagagtttctgtgctgtacgctgctatatggaaatacatgccagatat

SEQ ID NO: 239810 - DNA, 564 bp, Homo Sapiens
tgatgaaaggagtgacaaggtcacattggagaagagcttgtggggtgggagatattatagccatttttgggaaatatctgcataaaatgagtttatgcatacatgaaggactttattttcattggctttaagttgagggtttttgtttttgtttttgtattggagatgggttcttactatgttgcccaggctggtctcaaacccctgggctcaagtgatcctgttgcctcagcctcccaagtagctgggactacagctatgtgccagtgcacccagcttgttttttttaaattttaggatagataatggtacttctggctttatttaaataatttttttagggaaaccattgtatttatacatgcatatatttttatatatacaaatatgtatataaaagtatatgttttacattttcaatatatatataatatatacatatatgttatatacgtatatatattgcaccctactttaaaattgactgataacaaaattggtaattttgtataaaatgcccaactgtgcattattaataaaagtatgtgaatgactctaaaaaaa

SEQ ID NO: 239811 - DNA, 429 bp, Homo Sapiens
ctcagcctcccaaagtgctgggattactggcataagccaccgcgcccggccaggaaacacttgattttaacttgctacttggactactctgaaagtcctgtgtaatgattctgaacatatatttcagaatatgacacattaattcatgcataataatatatagtttgaattatgaacttacctttcatgaagtcagagatgcctctgacattcctgcatttatccattcagatggaagcttgatataaaagattataaaacttttaacaggcttaacttcttctaatttgaaatgcatgcactacctctttgtagcttctaaatgaactggcccaaaaccagtcagattttacagttggatggtaggtttctttactgaactatgaaaacagcagtgccaatggggaaaatgtgattgctgcattaaaa

SEQ ID NO: 239812 - DNA, 581 bp, Homo Sapiens
  misc_feature (22)..(22): n is a, c, g, or t
aatcagcagattgagttttcancattgcaaaatcagttttttacctctttcctaccaatttcacattttgcagaaacttgttcatatttccaacaatatcagaattagaaaacagttcagataacaagaaagattaaaaattagggaaattctgatatcaccataaagcactattttacatttagagattacatttaagataaagtcatcatacacaaaaacaataaatatttataactttctctataaggtccgcatatactgtatatattgaaacaatctgaatgactagtagatttcatatgaccattgttatttccactttctccaatacttgtattttatgctacatgtaatgaagttggacctttttattatttagtaattcctatatgttcctatacttttcattttcaagatgattgctctattgtttcatgttgtttctagcaatatatctccatgagatatgcactttgtttcatattgaaaagtataaaatttatctttcaattcctgtgtgtgtatcctatggttatctgtatgtattattttctattctaataaaatttataacaagc

SEQ ID NO: 239813 - DNA, 488 bp, Homo Sapiens
ttcttgagaaacttagtatttgtgaatgcttcctctatttaatatgtatgcaaatgtttttaaagacctaggaatgcttttcttgaggacctggaagccatttctttaaaatgtaaacatcaaggaagatagggccccagtctccttgtcactttgggagtttaacctaggtgcgttattcctaattgtaaacacctgtttcgttatggagctgtgcattacttaggaggaaagccgttagctaacacaggtggttaccccaattaccagatgaattaaagaggaaatataaaagaatgtatagaacactatgttaagccctcttacatgaggacacgttaccagtttccttgagaatgtgtaatggattgtgtctccttggctgtataaaagagggatttccttctctctttgtaacctcattagcagattagccgtgatgtgcatcaaagtctagttgaatgcctaataaaattgttgtctttctg

SEQ ID NO: 239814 - DNA, 434 bp, Homo Sapiens
  misc_feature (22)..(22): n is a, c, g, or t
  misc_feature (161)..(161): n is a, c, g, or t
gatgaggggactctaaagaggnaatgatgaatctgttatgcccaggaaatcaactacagcattgggactatagtttgtcttcttctcttgaaagtttcccgtggaaacaaaataagtagaatccttaagaagctgtttcccggcctggcgcggtggcccanacctgtaatcccaccattttgggaggccgagcaggaggatcatgaggtccaggagatcaagaccatcctgaccaacatggtgagaccccgtctccactaaaatacaaaaaattagctgggtgtggtggtgcacgcctgtaatcccagctactcaggaggctgaggcaggggaatcgcttgaacccgggaggtggagattgcagtgagccgagatcgcaccactgcactccagcctggcaacaaaggtgaatccgtctcaaagaaaaaaaaaaa

SEQ ID NO: 239815 - DNA, 475 bp, Homo Sapiens
  misc_feature (80)..(80): n is a, c, g, or t
ccaaaccctggcccgcggggaaagggccaactctggccaaaagctgctgtgcccttcaaggaactgaacaagttacgtangggcaaaaggtcgcccagctagcccagtgtctcctcccatctggggggcgtctgtccacttgtcaccttaggttttcactcatttgtcaccttggggttttgctctgtgtgtttcatatccaacggcaatacttgcagggggacagagtcctctaaatactccaatcctgcggtttttacaaacataaagggggagaccccaagtggaggaccctgggcctggagctccctcccaaactttgtccagcatccagcctgttccctgggctcactggggagggagttgtcttcatagcacacccagagccagggatccctttgtagttttttgacaacggagcatttctcttctgtacaggacccaataaaaacttccttatgatttgcaaaaaaaa

SEQ ID NO: 239816 - DNA, 512 bp, Homo Sapiens
  misc_feature (18)..(18): n is a, c, g, or t
  misc_feature (31)..(31): n is a, c, g, or t
  misc_feature (46)..(46): n is a, c, g, or t
  misc_feature (77)..(77): n is a, c, g, or t
  misc_feature (86)..(86): n is a, c, g, or t
  misc_feature (107)..(107): n is a, c, g, or t
  misc_feature (135)..(135): n is a, c, g, or t
  misc_feature (153)..(153): n is a, c, g, or t
  misc_feature (214)..(214): n is a, c, g, or t
  misc_feature (303)..(303): n is a, c, g, or t
  misc_feature (503)..(503): n is a, c, g, or t
  misc_feature (505)..(505): n is a, c, g, or t
  misc_feature (511)..(511): n is a, c, g, or t
gcccttgaacccccctgncccttaagtggancccgccccacctggncctcccccaggtgcctgggatttacgggccntgaagcccnccgtggggccggggccccatnaaagcccctttaaaaagaatgccagggngaggcccaataccccagnacaaatatcaaagagagagaccagaatcccccatcagaaaagtgtcaggaagccccggaancccgggtgagcctggatagtaagtataataatacttaataagtattaagtactggataataagtataaattaagtataatatataaaanaatcctaaaaacaaccaaagacataaaaagctggtaagaaacaatcctacagaaaataatggtgacagaataatccagatatggaagactggaatcctagtgatgtcgagttttgtgcattttttaataatgatgtagttatttctgtcaagactgcgatattatttttatcttttttattatacagatttgttttagtnanttattna

SEQ ID NO: 239817 - DNA, 448 bp, Homo Sapiens
  misc_feature (366)..(366): n is a, c, g, or t
ggaaatttcataacgggtaacagaaccattctcttgggtaaacctacagagaaaagaaacggagaggactccaaataagttttaatactccaataaaaatttcaggtaaaaaaatatctgacagtaattatcattaaccttttccagatcagtcagtcaacatgtataccattttgcaagaggcccataaatcgctcacagatctattttgaaattgctcttaatattttgataaataatattttccactctcaaaatcaggatggctacatctaggaagcaatttcattgagtgagctaccatgaattctgaaaatcaaaagcaatgctattgaatcatgttctaatcgactgtagaaatccatnatggttctcaatgtggcatatcacatattccaggagaaacgggttgtcaaggttcaaagcatagctttccatgcagacctca

SEQ ID NO: 239818 - DNA, 437 bp, Homo Sapiens
accaatgctaaagattaacgcattgaattaaacagaaatacagaaaattcaaatttttggactgatttaagattatgaacctttttttttttactttccctctttttatgacaggcaataaacaaagaaaaagtttaccattcttcaagacaaatcatcttaacatctcccttaccatccggaagtatgttttacaatcatgagcaattaaaaattagctcctccaagagaaattagtgaagttaaaatggccactggttactttaaattttaaaccacaagttacttgatctcaccaagtgggatactagctttgtctctaaagctactctaaaacttacagtgactagacctttacactcaatttcaaatcagggtcttcaacattttcatttcagtctttctcctcccccatttatcatgtaaaaaaatctttc

SEQ ID NO: 239819 - DNA, 542 bp, Homo Sapiens
  misc_feature (20)..(20): n is a, c, g, or t
  misc_feature (117)..(117): n is a, c, g, or t
  misc_feature (125)..(125): n is a, c, g, or t
ttccagcaactcagaagtcncctcctgcccatgaccttcccgaacacaactctttccctccctcctaagtgtagtcattattctaacatttgtgataatcatttccctgcttttctntgtcgctntgtcgcaagcatgcatccctaaacaatatattgtttagtctcactctttcttttgaactttatgtaactggaacaatataatatgtaatctgttgttcttgctgcttttgctcaacattgtttttaattcatatgttgttcaggttgttcctatagctgtaatttgtgcattttcattgctgcatattacagtgtcccattataacaatatgtgacaatatgtttagccattctattgctgatggacatctgggttgtttccagtttaggattgttataaatgctaatgtgaacattcttcatatatgtattccatcacatctacgtcagtttcagtataacatatacctgggagtgtaatatgtatcataaacttgaataaataatgccaagttcttttctagagggttacacagt

SEQ ID NO: 239820 - DNA, 805 bp, Homo Sapiens
  misc_feature (169)..(169): n is a, c, g, or t
catggcaatcacgcagtactataaggcaggttcaaaaacatgccgccaagtgaaacaaggttcctactgtcggccatcctatgctgccttcaaatgttttattgtagggtcatataagaaagacagggtcaccaaaccccaagtgtttgggatctgtaatggtctttcntagtaagcgttttattaaattatgattcccttctcctgtaattcaaaagcacaagctaaatttaaaaaatattttagaaagtattaaatttctggttgagaattataacaacattgaaacttaaaagaaaaaatacatctgataataaggaaataaggaatactaaaacatacttgtatatgaaggcaatcaatctacttgttcacaattatgcttcttatacagctcatatctagttccatactctcttacccatgttaggttaggtgttatgtttaaaaataaatcacctccatgcataccttaatgctttcttcaagacgaacttcaatgtttttcaatgtaacaggtttaaaattttaaatcatctgaaatttataggcataaattgtgaattcattataaatagatcaaaatatccttaaacgtacctgcctagattaaacatacctcagggttgtgcacgtgttctgcaaaaatcactgacaccatagtctaactcacagatgtctaactcagcacaattgaaaaagtgctttttcccctcctggtgtccaggaggtacattagctgcagacagatgcacagcactgattacatatttctgtagtgagccttctgagttaatagagcaaa

SEQ ID NO: 239821 - DNA, 615 bp, Homo Sapiens
tgtcatgcgaccatttctcagcatcgtgctgtttgctttggcaggagccgtggggtttgtaacacattacgtgctccctcagctccgcaagcatcatccctggatgtggatttcacaccccagttctcgaaataacaaagagtatcatcaacgggaagtgagagatgttgcccatttaatgtggttcgaaagactctatgtttggcttcagtgttttgaaaaatacatcttgtacccagcgctaattttgaatgccctcactattgatgcatttttaataagcaatcaccggagacttggtacccactgggacatttttctgatgatcattgctggcatgaagctgttgcggacatcattctgcaacccggtttaccagtttattaacttgagcttcactgtcatctcttttccactttgactacaaagatatttcagagagcttcttactggatttcttacatggtgtccattttatttagcaaggtgtttctgggctacgtgaggcaaaaataaaaacagagaaactcaccacagtgtttttccttggatcccatgatgcccagatgctctactttttccttttacctttcagaaggtgtttttataacatgc

SEQ ID NO: 239822 - DNA, 600 bp, Homo Sapiens
gctctgactctgactccatggatcatgtgcaccagaggcccaggcagcccctgaaagagagggaggtgccctacagagcacttagctttgcggtcaccggagcctgccctcaccagccaggtgacaccaagtgttactagacctctctgaataccacccaaaagctgagaaacagaggcctctcagaattcgcattacacatggaatcagaattctgggcagcgtgaggtcattcttcactcactgttcaattccaatctctaccaggtgtttgctgaagaaaacaaactggtttgagtgtgtctcacgagtctgtttccaacaagctttccagaacccacataggaagccgaaatgccctggctgacagtctcttcatcaacatatccaaagacagtattcaaattccctgatgtggtagagtgtctgttcatgtccccctcccacaatggctgagtcccagacctggacagtgacctcaccaccacccgtggtgcgccctggccctatttcaaccctacttcctatggtgttctcatagcaccgtggagaattaaagaggccactaagtaagggcactctaaataaacaaagcactat

SEQ ID NO: 239823 - DNA, 763 bp, Homo Sapiens
ccgccccgggctggagctgtcccccggaggaggacccccatacaagacccgagttcctccagcggctgggagccgccggtcacttgacccgcagagccgcgcctgggaggacccagttgagaaacagctacagcacgacgcggaggcgccggcaggtgacccaagcgacacagcagggccgaggctgggaagtccgggggcgcgccggtccgcctggccccgcctgacccgactgtcttacttcctacagcaaagcgccccccaggtcgctgtcaatggtcaccgagacttggagccagaatctgagcctcagctggagtcagagacagcaggaaaatgggtcctgtgtaattatgacttccaggcccgcaacagcagtgagctgtcggtcaagcagcgggacgtactggaggtcctggaggacaaagagaaagtgtcagagctggaggcagtgatggagaagcaaaagaagaaggtggaaggcgaggtggaaatggaggtcatttgacctgccaggcgcccttcgcaaagagtgacgaggccccgtgggagaacggactcctcagactctccccaatagcggaagtcgatcttctgaaggatggccaatctgctccggcctggtcttcccccatcccggtggacagacttaacgatccttgctgcagtccctccggagaggatctggactggctgggagtggggagggcgtggagacagtctacggaaagcgcctagcagacctacgagcggggcagttgag

SEQ ID NO: 239824 - DNA, 453 bp, Homo Sapiens
aaatcccagcacttcgggaggctgaggcgggaggatcctttgagcctctgagtttgaggccagcctgggcaacatagcaagacctctctctctgcaaaaactttttttttttttttttgagacagagtatcactgtcactcaggctggagtgcagtggcgccatctcggctcactgcaacctccacctcctgggttcaagcgattctcgtgcctcagccttccaagtagctgggattacaggcacacgccaccatgtccagcctctataaaaacatttaaaattagccaggcatggtggtggatgccctagagtcccactgacttgggaggctgaggtgggaagatcgcttgagcctgggaggtcaaggttgcaatgagccatggttgctgcagtgagctgtggtcgtgccactgcactcaagcctgggcaacagagcaagaccccatctcaa

SEQ ID NO: 239825 - DNA, 475 bp, Homo Sapiens
gcttctcatctgtttcccagagttttcccattcactaggtcatttaattcttaaacaaatctaggtaaggtggatagtgacaaatcaactgtggtgagtacttgtatcacgacatactaagtttagtttcctgatattcaaagtagaaatattccacctacctctcaagactgctgcacgaattggttgactcagttcttaagccatggaacttgctctactgtgagagcactgtggaaagagcaactgaccctgagtagtaggattggaggagggaaggaggtcagcaacagggaactcatagtggaaagcaagacttgtaagggcagagtgagaatgtgggaggacattccaggaagaagaaactggatagtcgagagcccagagttgagacacactgggaaagtagggaattacagattccttagtcgacctccagaattagaaatcaagtctatgtaagcttacttgaaaa

SEQ ID NO: 239826 - DNA, 560 bp, Homo Sapiens
ctgcatctactggtgttgccaaggctgtgggcaaggccatccccgagctgaacaggaagctcactagcatggccttccgtgtccttctgcaaacgtgttggttgtggacctgacctgccatctggagaaacctgccaaatatgatgacatcaaaaaggtggtgaagcaggcgtcagagggcccctcaagggcatcttgggctacactgaacaccaggttgtttcctctgactttaacagtgacactcactcttccactttcgatgctggggctgccattgccctcagtgaccactttgtcaagctcatttcctcgtacaacagtgaatttggctacagcaacagggtggtggcccatatggcctccaaggagtaagactgctcgacaaccagccccagtgagagcacaagaggaagaaagagaccttcagcttctgggcagtccctgccatgctcagtcccccaccacactgggaatctcccctcttcacagtttccatgcagaccccacaaagagctctatcttgtcgtgtaccatcaataaagtcctctgtactcaaa

SEQ ID NO: 239827 - DNA, 450 bp, Homo Sapiens
ccgaagaaaagtaatgactgagagcattgatgtacttattttgtcagtttgtaacaggaaagtgggggggagtctaagtcttcatagtctaatgtccaagtgggttgcactagatgtagacacttggaggcttacttttcatggtaatgtccatttcatttataacccctctgggaacgtttgtctaaaggaaatgtttctgttcagtgtaacaattacagttgcacctggattgcccagtcctgcccctgcactaggggaccattaatcactgcaaagtagaagaattattaagttaaaccagagtttgagccaagaaaacccctgaacaatgttcattttctgtgaaacttgttcaaatagttaagcttaaccatgttgctgccaaagacttttcctatgcagtggtggggcaccttgatcatcatcattatcttgattggctgaaaa

SEQ ID NO: 239828 - DNA, 415 bp, Homo Sapiens
  misc_feature (31)..(33): n is a, c, g, or t
  misc_feature (36)..(36): n is a, c, g, or t
caaaaaaaaaaaaaaaaaaaaaaaaaaaagnnnccnaaagaaaaagaatatgctgaaattgcagagaagggaataaaaattaccaccatctattaattgtatcagtgtttgggtatatggtgatgtgagatcagggatgcataaagcgaacaaattcaactgaggattaaaaacaaaacaaaaaaaaaagtttttaaaggcacagacaatccagacccctcccattccctgggtgctgacctggacccagcctgagacgggaagtgattgctgggccctcagccagtccttctccccagtgccccttcactgtgttgtgtaggtgtattcaagtgtgtgggcagtgtaaggaatgtttaaaagccaattttgccttatgtattgattttagaaccttatttgtagcaatttattg

SEQ ID NO: 239829 - DNA, 568 bp, Homo Sapiens
atttgtgttttcaaaagttattgagtagatagatattttttcatgaatttttaaacattagacttagctgaattgattaaaattaggtgattatgaaaaaaatattgccctgctcgagggcatctggagccctacagttaccattactaaagtctgtgagtatgtctattttgaaaagtgtcataaaaatatctagtccataaatcattataggttcagtaatacatcattttgaactgattctatcttctgtgaaattctagagatatgttatctttaggtagcatgagtaagattcaggtatgctgtgaattttgttaacgtttatgttttccattaatggatagtcaggaatcttttgaactgcgtctatgtatttaaatgatttggaaagatagcatctctcagtttaaactaagcatctcattttggcaagataaattattttagctgtctggccttttctttgtcttcttagagttatttctgaaatgtgcatagccagtcataaaataacttgtgtaaatagcctaatgtaatttatttctaataaatacgtagcttaatg

SEQ ID NO: 239830 - DNA, 540 bp, Homo Sapiens
taggcaaagactgggcaattgagcagaggagacggacctgtgagtctgaccgtgaggcgggccccttcaccttggctgggcctggtcctggtccttaggttttgtcaggttgtccttgtttggatccctcaactaggtgataagcactggagggggatgacccgccttggacgtgtttctttaacctcatccatataatagggccgtgggatggttgtagaggtaaagcaggatgatggtgttttaagaccagagcttgggaccagggctcctacacctaattttctctcctggtagctgaacaaaggtctaaattagcttaacaaaagaacaggctgccgtcagccagagttctgaaggccatgctttcagtttcccttgttgacaattgctctccagttcctatgaaagcacagagccttagggggcctggccacagaacacaaccatcttaggcctgagctgtgaacagcagggggttgtgtgtctgttctgtttctctgcttgccgaactttctcaataaaccctatttcttattt

SEQ ID NO: 239831 - DNA, 525 bp, Homo Sapiens
  misc_feature (53)..(53): n is a, c, g, or t
aaatactaggtttgtaaaaccccccaaccttaataaagagaatagaaagagtncaaataggagagtgaacagttaaaatggttagatgcaagagtgtccgtaggtcattaggctcagttcttgctaaagtagagacttgtaaaatcaaaaggcacaaagagtcagtcaacataattactggatccagtcggtaattctcaattaggaaacgtgcctctcatgggaagggtgtatcacagtccctcaaagctatctcacatgggtatggtttgaaaaaagcaccttcaaaaaattgtaagtgcagctctgttgtataaaatgaaagaaagtgattttataatacaactcacaggaagtaaaactcaatagactcttcttgacgggtgaggaaatcccagagatacaatgatttctattgtgtctggtgagtgggcaatagtaggtcccttaaaaggaacctagctgacttagggatttaatgaaaatatgtaaagagtaagtttatcaagtgtggcgtatatattt

SEQ ID NO: 239832 - DNA, 569 bp, Homo Sapiens
aaatggaatctgtcaagagcaggtatttcatacggttaaaaaaatgaacatgcagactccttttcaatatgggtttatatatataagtattttttgtgtattatgactacgttaggagtttaatattgtcaaggacagtacaactgcaaagggatgctgtatagcagcacatcagaagtcggaaggaactgacacattctctcagagctcaaggtcttaaagagcttgagttaaatctaggtacagttacaggcatgtatagacttaaatggatgcaatggaagctaactaaaataaggcttagttgtcctttctatttaaataccccaagttgtcttcttacttcctctcccctctcccattttgcactgtgtgtcgatgcaatcttcgctagcacaaaatattgtcgctaatagtcatttctgttttcccattgtaaatgctgttgagctttattctattttatgttactttgttaatgaaatttaggaaagcagttgtttctttaaatttattgtgatattctatatctagcggcctttatatgcaaataaaattgcaagattttt

SEQ ID NO: 239833 - DNA, 466 bp, Homo Sapiens
caaacactggggataaaaaaacaagtaaaatacaacctaaaaatgattattatagagtctattttcacttaaacagagaactatgactgaagtgttattaaagtatggattttatgcatgataagtatatttctaagtaaaattcccaatttaccatttcctgtcttgaataatcccaacaaaaccatttgaatcctcaagtaaaaatatatttatcacttaaatcagaaacaatgaattcaaaatggaaaagtagttaaagtctaaaatgttttttcccataaacttagaaagaattatcttctacttccataaatatattatgttttataacgatgtattgtgttaccacatacaacaaacctttatgaactgctcatataactgtttaattgttttcaatctctggctctgaacaattctagattgttgaagaatcttttgttgctgtcgaaacatattctac

SEQ ID NO: 239834 - DNA, 295 bp, Homo Sapiens
gcagccccacccccaccccagccctgcgccaaagggagagcagagccccctccccgaaggccacgtccctggggagacagtgagctcatgcaaggggaatgttcccaagttggagtgagtaagaggcgggccaggcggtgggggggctgccaggcgcggggctccgcgtgccctcgccctcgggtgctgtctagacagagggcagaggcgggagaagcggctccagggcctgctgaccctgacatgcccagtgcctggtgtttggtggtgtttgaggggttgggcaggcggccgc

SEQ ID NO: 239835 - DNA, 405 bp, Homo Sapiens
  misc_feature (14)..(14): n is a, c, g, or t
  misc_feature (19)..(19): n is a, c, g, or t
  misc_feature (34)..(34): n is a, c, g, or t
  misc_feature (49)..(49): n is a, c, g, or t
  misc_feature (405)..(405): n is a, c, g, or t
tagctagggattanaggcncggcaaaaatcatgnctggccaaattttgnatttgtagtaaagatgggggtttcacaatgttgggcccaggctggtcttgaactcctgaccctcatgtgatccacccacctctgccctccccaaagtgctgggattataggtgtgagccacccatgccctggcctaagataactatttcatgagacagagaaaatacttaaaaactgcaagttccccaccccattcccttcttaccctagactatgctcaaatcgattgtgtgaagctcctggaaaaacatagtaaccacctcccagctgtttgatgtatcgaagacgttgaaattgaggtgtatcaatgattcggacgaggagagggtggagctcaatgtggccatggataaatn

SEQ ID NO: 239836 - DNA, 518 bp, Homo Sapiens
cagtgtagaagcacaccacagaaaacatgttttggagggtaacgcagagcatggagtttctgttagcagtgtcctcagtggcaggataaatactgagatgtggttaaggattctggaaacctctttgcctagccacacttagacttttttcagctaatcctttaaattgaatataatctttagtccgaggattcccatttaaacaactcagtattcttttaagtgtgtcttttagcccagctcaagttaacatgaaactccaggtgaattttcacttactattccattgctagctattatagaataatagcgtttgctgcactattctagtcatgaggagtgaggaaaaacatacataggttgtctcccttaaatggtttgctttgctgaattttttttatcctaatcacctgcaaatttataacccaatcattcttcctcaagatttgaaaatgttttaatcctgcaaactgggtgaattctaaacagctctacaaatataaggaaatattacagca

SEQ ID NO: 239837 - DNA, 547 bp, Homo Sapiens
ttggagaagcccacattgacacagcaaagaaggctggggctcttgtgctggttaaatggaccttgatgtcttccaaatgttttcatgctggattctgagccactctcctggctgcaactctgaggccgggcagactttccgctggaaagagaactcaaatactggtgagaggtggatttgaagccaggagccccaggttttggctctgcaggtttgcacccagctctgtggtgtatgccctcacaggtcacccaggacctcctgtccaggcttcttcaggccacccatgatggagtagatttgaggaatgaggttttcaaagcagttagtgtgcgggagagtaaccctggggcctccggaaccagaagggagggatttgggggctggagcttggcagtccaggttccattgtcctcatgttctccccactggcctggcctgtcactccagtctctgcataggttgtcacatggcattctccctgtgtgtctctgtgtctcttctcttctttataaagacatagttataatggattagggcccaccct

SEQ ID NO: 239838 - DNA, 400 bp, Homo Sapiens
gtaataaatgtaactattaagctaaaatgcaaatgtcagtactgaattcctgcttgttaattacataatatgtgatgctctagaaaatagtcacaagtattaataatgccttagatgatagtcttaaatattaggttgaggtctacctaacctaagctgcttcctggaaagcttcatgttgaaagaacctatgggtggcaccatgtggacttttctgtccctactgtgatgaatagccccacccttcttgctgtccccaacacacctgatgtcactttgagccatatagttgaagtacaaattaataggccttatgatatgcacgaattttactatagataatatatgttgtttctggttttgtttgccaatgagcataataaatgtaaaacctataaaa

SEQ ID NO: 239839 - DNA, 319 bp, Homo Sapiens
ctagggcgctttcgggtccccattgcagcccccggatgagcccgcagtattttccttatatgatcaggtcccattgcgggcggcgccgcttgcccggagcctgagaggattatgaaaacgtggcgagcgaaatggggccaggggacctggagcgggggcgtgaggagagtaggcagcgggtgaggctggacgggagggaggtctagggaggcctctgccgcgggcactgtgagtcctggccgatgatgacgagaccactgcgcaatctgagttctgggaaccaggtgatggagtatgttctgagaacagactgaggccg

SEQ ID NO: 239840 - DNA, 503 bp, Homo Sapiens
gagcagagttccacttgcaccatggaacacagggggaatcacagcactcaccctgtgccctctgggaaagtgctggtgcttcagagtcattggcagacattccatgtttctgctgttgctgctgctgctatttttgttattattattttctatgtccgttgttgtaagaagaaaacatcagctgcagagggtccagagctcgtgagcctgcaggtcctggatcaacacccagttgggacgagtgaccacagggatgccacacagctcggatttcagcctctgatgtcagatcttgggtccactggctccactgagggcgcctagactctacagccaggcagctgggattcaattccctgcctggatctcacgagcactttccctcttggtgcctcagtttcctgacctatgaaacagagaaaataaaagcacttatttattgttgttggaggctgcaaaatgttagtagatatgaggcgtttgcagctgtaccatattaaaaa

SEQ ID NO: 239841 - DNA, 966 bp, Homo Sapiens
tcagaggatcccgcagtgaaaaaaccggttcaagtcgcctccttaaaccccggactggttcagctgctacttcaccccaaattttcgcgcttcatatgtcctgaaaccaatgatgtgtctgccgaacaaacaggcctacttgcctagtagaaattcttgatcaatctggcaagctacgtgatcaaccagacttgaccaccaagaactgtcatctcattcaagaagggagtaacctgatcaaatgaggccagcaatgctttttttcttggcaatcatcaaagctgacatttaagaagagatgctggtgatagtcatctcatcctactcaatttttcaaaggcagaaaccaaccctggagcaattgagaggactgtttaaacacagagcttaacaatggcagaattgtatatctcgtgcttaacagattttggttgaactttaccctaggtcaggggtcagcaaactactgcctgtgggccaaatttgcccaccacctgtatctgtaaataaggtttcattggaacacagctgtggccatatgtttgtatattgtgtgtggctgcttttgcattaggatgacagaggtgaatagttgcaacagagactggctggtctgcaaagcctaaaatatgtcctgtgtggccctttacagaaaaagttttctaacccctgctctaggttacggagaaaaaaaaatggaataatgttctctgctacttttaacctgattttctttgttacctaaataggcagctagaatgctgcctatattttaataaggatttggatctcacaagacaccttaggccttacacaagttgttcagattctttgccccagttctaatctagtgacaaaggcatagaattctcctcccacaggaatgtatttctattttcaaggtgttaattagttccagttttggttttgtcgttttccccatttaaccgatcgctgtattggatg

SEQ ID NO: 239842 - DNA, 530 bp, Homo Sapiens
ttttgtagagacagagtttcgccatgttgcccaggctggtctcaaactcctaagctcaagcaatctgcctgcctcagcctcctaaagtgctcagattacaggcatgagccaccacacctgcccttttttgcttttcaattagtgagtcaaggggagatctccaatatatctccaatagtgtggtggctggtctgctctgaaatgtaagcagtttttttttgtccccttgaccagactctaaaagtcttaaggtcaaaaagtccacaaataacgttttgtttacccatcctacagtgctaggcctaagcctcggacttaggcaaaggagatcagaagggtcatatggctaaatgtaggtggacaagagggagtcggggagggccttcctgtgaatcctcctgcctctcaaggacgctctgttcccttagcttgagaagccttgaggaaagctttttccatgaacaagcttttaaaaaccttttagctctttaaaagcagcaagtaccattccagtcatgacctgcagacag

SEQ ID NO: 239843 - DNA, 650 bp, Homo Sapiens
atgacggagggacttctgcatgaggccatccgtgcaggctggagaagagaaggcaagttggcaggagtggagccacaggcatttgagccacttcatcatgtaacttaacttgtgccttcaggacctgctcaagcccgatcacgtatataccacttccatttgatgatggaatgctgctgttcatgaccaactttatggctagatgggtcagaaagcacccagttcatgataggcagttcaggtcatatggtgacttgatgacccagagtcaaacattcagtttccaccaaagcccagtaacaggccaagagctgtctctcaaaagaagagtagttatctgcagaagatggcagggccttgctccgaaagcctagagaccgccactgtgattcacctatgggggcctgccaaaggctgcagccagcatccttatctgccactgacacctcaagcaacattggatctgctgggtcatatggcccaagtggcagagcaacttgcacaacagcctggacctgtcatagagctttctcctgttttggaccccactcaaaactggcagcctttcaggtcactcaataaatgtgctggagtaacacactcaaacgaggaatgtgttgcctccaaaatccaataggcccaaaaaaaaa

SEQ ID NO: 239844 - DNA, 631 bp, Homo Sapiens
  misc_feature (37)..(37): n is a, c, g, or t
gcccgaggagaaaacaagcaaatcttagtgctgggcntggatggagcaggaaaaaccagtgtcctgcactctctagcttcaaacagagtccagcacagtgtggcacccacccaaggtttccatgcagtttgcatcaacactgaagacagccagatggagttcctggagattggtggcagtaaaccttttcggtcctactgggaaatgtacctatccaagggattgctgctgatctttgtggtggattcagcagatcacagccgattacctgaagccaagaaataccttcatcagctaattgcagcaaacccagtacttcctctggttgtgtttgcaaacaaacaggatcttgaagcagcctatcacattacagatatccatgaagctttggcattatctgaagtgggaaatgacaggaagatgttcttgtttggaacctacctgactaagaatggctcagagataccctccaccatgcaagatgccaaagacttgattgcacagctggctgcagatgtgcagtgaccaggactcagcccactgtgcggctcacgactgagatgtcatcagtgttgaatggcaggcttgaagccaaaggtttccacctcaaataaaaattaagccatttcct

SEQ ID NO: 239845 - DNA, 479 bp, Homo Sapiens
  misc_feature (17)..(17): n is a, c, g, or t
ttggagttctctctgcntaagtggtccccacccctaaaaaataactaactgctcagtagcctcataaataaaactaatttttctcgtccttccgtcttaacacacacgctcatgcatttccaagttatttctggtgacctaaaagacgcacgcatgccaaacgcctgcagattctgccagagtcaaccttcttctcctgtcttagtggccagagaacagtccctggaattcaaaggataaacaaggcctgcgtccagacagagttgtttctctgaaacattgctggcttcttctgagtttgattcagctgttctctgatgaaattcagggaaaacttgccttcagagatatctctcaaattttactaatcttcagctttagttggtcaacattcattccacaaatatcaattgaactcctactgtgggcctggtggtggtctgagtgctgaagatacagtgatttaaaaatattaaaaa

SEQ ID NO: 239846 - DNA, 527 bp, Homo Sapiens
ttattatcactctgggaccacgttttactgttggcacgttcggcttttctcatcttttccctgagatcatttatgatgtggaaattactttgctggctgaagttgggaatagaaaacagtagagaatacttcaagagtattctaggtatgcactaagtttatgggaagatatgccatctacataatttaccttcctctctaggcccatcataaaaatctttgaaaaattaatactacattttagtatgaatataagttaaacttagaggtgatatctattttgtggttaaatgtgttataaacatttatttagtgaaatacagtacaattacaacaagcatcaatgaatatttaatgagcagctgttaatttctgaagcagaaagaaagatgaataaaagttctggttttacttttaaaagtgaaggctaactgttagctcaagaaatactttatgtttgtcctatatgaaagtgttgattgcacctggttctttgctgtaaattaaataaaaattcaaatatttgt

SEQ ID NO: 239847 - DNA, 516 bp, Homo Sapiens
ggagacggggtttcattgtactggccaggatggtcttgatttcctgaccttgtgatccaccccaccttggcctcccagggtgctgagattacaggagtgagccactgcgaccggcccatgagtctttattaatagagatttcttactggtgttatgtggcagattctgcatattcctcacccatcatatgtattccactttcctttattatggggaaaactactctttttggcatgatacaatgttgactccattttctttgctaataaggacttggtatcaatttatcagtatgtaaagtttaccatagagtattgtctcatgtgaatcattcccattttttgctctttactctttgtcgttatttctgagtattatttggatggttcattttgacttaaggatagccctgtgatatgacaatatttttatctaatctgatggagaaagcatttagtctcctgatcaagtatgatgttagctgcaggtttttaataaatgccttaattcagtttg

SEQ ID NO: 239848 - DNA, 586 bp, Homo Sapiens
attgttaaaataattaaggaaaataaagtagttttgattgtaggagaaactgggtctggaaagaccacacagattcctcagttccttttagatgattgctttaaaaatggtatcccctgccgtatattttgtactcaaccaagacgattggcagctatcgctgtggctgaaagagttgccgcagagagaagggaaaggattggtcaaacaattggttatcagatccgattagaaagcagggtttctccaaagacacttctgacattttgtactaatggggtattgcttcgtacattgatggcaggagatagtacgttgtcgactgtgacacatgttatcgtggatgaagtgcatgaaagggatcgatttagtgattttttacttacaaagttaagagatttgttgcaaaagcacccaactttgaaactaattctttctagtgctgccttggatgtaaatctctttataagatattttggaagttgtccagtgatatatatacagggaagaccatttgaagtaaaagaaatgtttctggaagatattttaagaacaactggatatacaaacaaagaaatgttaaaat

SEQ ID NO: 239849 - DNA, 447 bp, Homo Sapiens
gcaagttgatgaatcacaaagtatcaagaatgagctcactattcaggtgacttcacttcatgctgcattagaacaagaaagatctaaagtgaaagtattacaagcagagttagccaaataccagggtggcagaaaagggaaaagaaactctgaatccgaccagtgtaggtgattacattagcctttgaagtcaacacaaagtttaaaacttccaggattttgcaaagttgtatatatttaatgctgtgcaactgctaaactatgcagtttttcttgaaggaactaaaagcaactagctccctaatggtctataattttatttcttttggcttaaagtgaaaaagaagaaatagagaattccagcagaattcagtggttgtctactatccatacttcttatcactttagtttttcatcagtcaataaaattaatttactcttccacta

SEQ ID NO: 239850 - DNA, 525 bp, Homo Sapiens
  misc_feature (51)..(51): n is a, c, g, or t
attcagaatgctccaataatcgtttcctttgagcatcatgtcagtgctcanaaagttgcagattttgaggtatttcagatttttgaattaggaagactcaacttgtactatcattctatagactttatgattgggtagactacatgagtattgaacccagaaatcattgtctagcaaaagccagtatagtgattaattaccctgtgactattatataatgttcaaaaaagctaacatattagaatgtccttagcgtgcagagagcaaacagagacaaaaagaaaagttaccctgaaaagtttgtcagaaaaatagaatatcagacgctaaactactcatccagaattttgtcaaaaaagaaaaataagataaaattcactggtagacaaaaagtagtaacataccagtttgtaatttctcagtttcaaaccatgaatatgtatttgtataccaaaaatcatttcaggagcagagaaggaggatatgccttttatgtggagactttaaacataaaattggaaaact

SEQ ID NO: 239851 - DNA, 488 bp, Homo Sapiens
  misc_feature (47)..(47): n is a, c, g, or t
agggtggcagggttgaagagggtcagagtcccccccacaggtgtgcncaggttggaaccttcatgtgccaggtgctagctagagtgattaggagaatgagtcaacctgggcgctcagaccactcattcatctgcaaagcacagtgcctggcgcatgggagatgcttcacagttagctacttcctgagacttatagaagactgatgatgccttgggaccaggcagggacaatcgtggcgggtccctcagcggagggcgctgcttacggcctgtcgtctccctactgcccagggcatctacagctgcttcagcggggtgcagagcctcgccagcccaccgcggcaggccagcccggacctcacggccagctcggcccaggccagcgtgctcaagatgctgcaggcagcccgcgacatggtgaccacggcgggcgtaagcagctccctggaccgcgccactcgcaccatcgagaattggggtggcggccgc

SEQ ID NO: 239852 - DNA, 438 bp, Homo Sapiens
attccaaagagtaccagattctttcaaaaagtcagatgagtaagggatagaaaagtagttcatcttaaggaacagccaagcgctagccagttaagtgaggcatctcaattgcaagattttctctgcatcggtcaggttagtgatattaacagcgaaaagagatttttgtttaggggaaagtaattaagttaacactgtggatcaccttcggccaagggacacgactggagattaaacgtaagtaatttttcactattgtcttctgaaatttgggtctgatggccagtattgacttttagaggcttaaataggagtttggtaaagattggtaaatgagggcatttaagatttgccatgggttgcaaaagttaaactcagcttcaaaaatggatttggagaaaaaaagattaaattgctctaaactgaatgacacaaagt

SEQ ID NO: 239853 - DNA, 562 bp, Homo Sapiens
gcaggcccccttcatctaaaaggtgttgaaagccttggactatgtgaattaacttagactgcttattggttatcctggaaatcggtaacagcagataaaattaggaaaggagatgattctgcttttaaagtagtgagtggcatgtcttaaccacagagtgcagtgattataaaattccatttgattctttgtttttctcaaattgcataagcagtgagtaggaagaagatgatgaaccacaggaggagtagtcagaaggggagaagaacgagaaaagtaatgtcacagactgtgagggaaaattatccacaaagatgggatgttacagtgtcagatgctgcagaggaggataggtgaagaaagtagaacaaaatactgatggttgttgaagctgtgctgttaggtacatgggagtttattgtattagtctatctgcatttgtcatctatgggttgttttttttttgttttgtttttttgtttttttagatggagattcactctttcacccaagctgagatcgtgccactgtactcagagtgatgacagttagaccctgtgtc

SEQ ID NO: 239854 - DNA, 442 bp, Homo Sapiens
acgtgcttatagcagctttattcctaatcgccaaaaactgtaaacaaaccaagtatccttcattgaatgatgtaaatcaaattggtacatcaatacgatgaaatactactcgctgttaaaagcaacggcatagatgaatctcaaagacattatgccaagtaaaggaaggcagcctccaggttatatcatgtatgatcctatctatgtgacattctggaaagggcagcagggacagagaacagatgagtgtttggaagaggaggggtggggtaacaaaggggaagcatgaggggatttttaggtgatagaactgccctgtgtcctgattgtggtggtagatacattaatctttacaaatgttacaactcagagctgtacatccaaaaagttacgatgcaaaaaagttttatttaaatcctcacatttatgatgtttagaattc

SEQ ID NO: 239855 - DNA, 472 bp, Homo Sapiens
gctgaggcagtagaatcgcttgaacccagatagcagaggttgcagtgagctgagagtgtgccattgcagagagactccatcccaaaaaaagacagctgtcccaggccaagggtacttgggagagcccctcatggagaacctagtttagaccaagtagcagaagctgtggtcataacaaaacaatttgaggaagaaatcttacaaatcaccactgccctttctccttttccataaaactgtccatcttttcggtgctccctaatccaagcagcttgactttagagaagttgcagaagcagtgaagccactaacatgctgtgtgactttatgcaagtcactcacctcactgagccacctccatttcttcatctgtgaaataggcataacagtaatacataaccctacctacctcacagggctgttgtgaggatcaaatgaaataatgtaacgtgagaatacagtataaatgata

SEQ ID NO: 239856 - DNA, 484 bp, Homo Sapiens
gatgtaatttcaagtacagttgttattgtcagttttgctttccatggtttcagctacccatagtcaatcacaatataaaaatattaaatggaacattccagaaataatacataagttttaagttgctgaataatgtgatgaaatcttaggctgtcccacttcgtctcgcctgggatgtgaattgtccttttgtcctgcttatgcacgctgtatatgttacccaccgtttagtcacttagcagccatctggattctcagattgaaaacagtgtgtatagggttctgttctatcaaatgtttcaggcatcctctggggggtcttggaatgtatcccccatggataagactacttgtataatctggtaaaatggatgaattattcataaataatgtcagaaccagctatttcaaacaagattagattctctagcctcatatcatatgcaaagataaattatatatggattaaggatttaaatgtaaa

SEQ ID NO: 239857 - DNA, 505 bp, Homo Sapiens
tacagtgaagatctctcaagaatgatttgtgtgatgtagttcggtggatcatccagcagagggcagtagagccagagccatagtaaaagttatagtaaagttgctcttagcaacttgagtcttacttagatttaattttgcatagaaccaaaagttcagtttagtagccattttctttaaagtcaggctgtagtggttccgaaatgaaaattaggccctgattttatgtaagatgatgtccaatctttaattgacaccttaaaaatattaaaagattatgataggatcaggaaggagtttttgaaaatgcaatttgtagtttttaacaagtgatgtagaataaataaaaagaagtactttttaaaaagtaagtataaaattattttccagttaactatgggatataaatgattgctttaatacaggtcttcctaacctgtacagcatttcctaacctgctctgtgaaaaacaaagaaataaaacttagtgctctctttaaaaaaa

SEQ ID NO: 239858 - DNA, 499 bp, Homo Sapiens
agatacctgtgtagtgcagcttctaaatttcataataaaggtaaaaatgggaaatgttttcagttcagataaggttgactgtgcagctcacatctgtatgtgaagcatagtacggatattcataaggatttttagttatcaaaataggttaaattatattctgtatacttaagatgccagaaatacttctatggaaagagttaaaatctcctatctaaactgttaatattaggtgtttaaagaactcacatagtatgactagtttctctcttaagagttaataaataaggaatctgcactgagaaccattgcaaaggaagctggagacgggtggctttcatagagactgggaatgtgagtgctctctttaaaaaaaaaaataccctccttaaaatattataggtgttcctgcatactcatacagtatttcagtatgattttgtccatagactcaaagagactgttttaaagtatagttctgatcatgtcagacctcttt

SEQ ID NO: 239859 - DNA, 478 bp, Homo Sapiens
caatgtaaatgctatgtaaataattttatactgtattttaaaatttgtatttttttactgtcattgtgttttttctgaatatttgtgcattgctattggttgaatctgcatatatgaagagctgattacatatactactaaatttcttgcctacaagtgctatcaattactgagatataattgtggatttccaattatgcttgtggatctatttcttttgttctgttagtttttgcttcataaaatttaacactctcattataggttcatactagcatacatattcctgatgaacacagtcatgtgtcatgtaataacattttactcaatgatggacacatatacaatggtggtcccataagattacaatggagctgaaaaattcctatcacttgtggacgttgtcatgcaacatatcactcaggtgtttgtggtgacgctgctgtaaataaacctactgtgcttccagttgtaaaaa

SEQ ID NO: 239860 - DNA, 504 bp, Homo Sapiens
ctgctgatctgggcaaaacacggaggtcaggagcaagggcagaggctgcaagtcccgaggctcagacatttgtcctttcttcttctgtgcccacaagcacctgtgtgtggcatgttgagtttcagtggaagtcatatacttctgggcttcatagtttatggctgcactgtgggacatacaccagctacaaggaaggtgaaaggataggacccgatgaagctgaaatcacatttattctaactacttatagcagcatagcactttgttcatgaaggctgagatagtcgctgaggcagtgaggaacttttgaagacgaacaagggatgtgggtgtcaagagagctgctgccaggtgggaaagaccaatttggccacataacccctgtcatctgccatccagatactaaaaggcaaagcaaagtgtaaattgaattttctatgtgacattttaaatagtatttctgctgcagcctgtgattcagttaacttacctcaggctaagcct

SEQ ID NO: 239861 - DNA, 482 bp, Homo Sapiens
  misc_feature (16)..(16): n is a, c, g, or t
caactaaagttgttanatttgtatataagtttgtgtaaattagtatataaccttaaaaggagattttttgaagctttgtaattacattgaaagtatatttgtttccttgaaaacaatttttttgaaaagtgaataatgatgtaatacagctttcaaattatgctgttactttattatattcacgtgaaagtatgtgatcaattgttgctgcatcagagatattagagattctttattagttgggcattctttatgaccttttctataaaacagtaaggacattaaaatgtaagatgcatgacaaaaatataagtggagaggctcattgtaattaacctatattaagtaatgtttaaggtaggtgttcagagtaatacttttctacattatactgagagaaagaaattataaattaaagtatatcaattattttactaattttactgttacgtaataaaatgcaatatatttaaaaattgtta

SEQ ID NO: 239862 - DNA, 450 bp, Homo Sapiens
tgaactttcttaaattgagaagaggcaagaaatcactgcagaatgaaggaacatcccttgaggtgacccagccaacctgtggccagaaggagggttgtaccttgaaaagacactgaaagcattttggtgtgtgaagtaagggtgggcagaggaggtagaaaatcaattcaattgtcgcatcattcatggttctttaatattgatgctcagtgcattggccttagaatatcccagcctctcttctggtttgctgagtgctgtgtaagtaagcatggtggaattgtttggggacatatatagtgatccttggtcactggtgtttcaaacattctggaaagtcacatcgatcaagaatattttttatttttaagaaagcataaccagcaataaaaatactatttttgagtctaaatgatagaagcccaaatatattttgttcatggtaaaaaa

SEQ ID NO: 239863 - DNA, 477 bp, Homo Sapiens
  misc_feature (9)..(9): n is a, c, g, or t
  misc_feature (27)..(27): n is a, c, g, or t
  misc_feature (35)..(35): n is a, c, g, or t
  misc_feature (41)..(41): n is a, c, g, or t
  misc_feature (53)..(53): n is a, c, g, or t
  misc_feature (71)..(71): n is a, c, g, or t
  misc_feature (80)..(80): n is a, c, g, or t
  misc_feature (88)..(88): n is a, c, g, or t
aaccctccnacctggccccccccaaantgccgggnattaangggcgtgagccnacggcctgtaaattttgnccttttaanggggagcncccatggaagggcagtcaaaaagaccccagtttttaaaaaagagggatttcaccttccctttgaccctcctaggcagataagaacagggagaaattccttgcgtacccacccccagacttgcccagaagcctcgtggcccaagaagtagccccgtgccctggctgcccctgaggcctcctcacacccaggagcatttgatagcttgcccacccctgttctgtgtctcctaccactccctccatgccagcggcacgtttcattatggtttcccacatccaaacctcatagcaaatgtaattgtggtgataataggtagtctagccagcaacactaagtattaaaaatgactcaatgttattttggtatttaactttgtaaaagaaaaagg

SEQ ID NO: 239864 - DNA, 425 bp, Homo Sapiens
  misc_feature (7)..(7): n is a, c, g, or t
  misc_feature (44)..(44): n is a, c, g, or t
  misc_feature (55)..(55): n is a, c, g, or t
acaatgnagaatacccacttgtaccctaactaaaatggcctatnaattagaaganaaaatcaactagtgttgttgcaacatgtggagaaattggaaacctagtatactgctggtgggaatgtaaatggtttaactgctgaggaagatagtttggcaattcctcaaaacgtaaaacagaattatcacccagtaattctactcttaagtatataccggatatagtttgactgtttgttcctatgcaaatctcatgttgaaatgtaattaatctccggtgttagagttggggcctggtgggaggtgattggatcacgggagtggtttctcatgagtggcttcaccatctctagctgtcatcaagattgtgagttctcacaagatttgattgtttaaaagtgtgcagcacctccccacctgtgccgaat

SEQ ID NO: 239865 - DNA, 468 bp, Homo Sapiens
  misc_feature (4)..(4): n is a, c, g, or t
  misc_feature (40)..(40): n is a, c, g, or t
  misc_feature (65)..(65): n is a, c, g, or t
  misc_feature (86)..(86): n is a, c, g, or t
  misc_feature (426)..(426): n is a, c, g, or t
aaangttgaacccgggaatgggaggttgcagtgagccganggccggcccaatgcactcccacccngcccaacaagagcgagacccngcctaaaaaaaaaggaaagccttgccttccgtgtaggttttttaacttaggtcagtgccataggactgaccaaatcataaattgaggatgctgttggtattcaaagtttttactcattacccttactcagtttgcagctgcaatgatctgtacttaacctgcttttacatattatgcttccttgacaatgggaggaattttaatggttaacttgcagaatatgacagatacttgtcttaatatcattcttcctaccataatctaattcaaaactatccagtagaactttctgaaatgattggaatgttttttatctgtgctgtccagtgtggaagccagntacgacatgtggctgttgagcacttgcagtgtcactaatgcg

SEQ ID NO: 239866 - DNA, 481 bp, Homo Sapiens
  misc_feature (5)..(5): n is a, c, g, or t
  misc_feature (31)..(31): n is a, c, g, or t
  misc_feature (37)..(37): n is a, c, g, or t
  misc_feature (47)..(47): n is a, c, g, or t
  misc_feature (89)..(89): n is a, c, g, or t
  misc_feature (102)..(102): n is a, c, g, or t
  misc_feature (464)..(464): n is a, c, g, or t
  misc_feature (468)..(468): n is a, c, g, or t
atggngcgcaaccccaacaacgggcctaatnatgtantttttgggtnggaactcccctatattgcccaaggttggtccttgaactcccnggactcaagtgancctccccacccttggcctccccaaagtgcctgggattaacaggtgtgagcccactgtgccctggccccacattcttattactaattacaatttctctcttctgtgaattggctggcattatcacactgccatgaattactcttaaacagtacctttaccacagaaagaagtgttgataatgcagtcagaatagctggatgatgctataattttttaaattaaagcaaattttaaaaccttttgacctcaatgaacatttcaaaattaaacataaaataagaatcatattacctaagtacatacactatttaaataccttttacattattgacatattatacaagtatcatatcatataccanttanataatacttggtg

SEQ ID NO: 239867 - DNA, 274 bp, Homo Sapiens
ttgcttaagcctaggagttcaagaccagcctggtcaacaaagcaagaccccatttctatagacagataaaatcaccatgcctggctaattttttaattattttgtagagatggggtctcactttgttgcacaggctgtttgcttgattcttaagaacgtatagggatccagctgtacagagctttctgcagtcttttgtaatagaattagttgttaaaattgtacttattacatgagcatcaaagaccttggaataaagctattcctcacataa

SEQ ID NO: 239868 - DNA, 567 bp, Homo Sapiens
tgacagagtggtgtatatcaaatacgtgggtagtgttgcatttcaaatgaggctcttctggttgaaatgatatatttataagaccagaatatcacaaatgggtgatgtataatgtctctttagttttttggtatttggcctcttttaaagcctgtcggatgtatgggagaaaacaatgaacgtgctttgatttcctatcagtcactcttaagaacatacatattgtttaagtaactcggtcttttttatctgattcttgaggcactatgggtagcaagtaaccacttacaaatttaaatgtaatatacactccttttctgtgtgtcaagtccttatttttaggtgcatattgacatttaaatgttaattattgtttggcatataatatcaaaaatctattatttattttatgctgttacagttaaaagatgtgatttatgacatactgaatcaacttgccttccaatttagtgtgtaatatggtaagcatttatacttttagatatgtcttatttttatttggatgcctgtctaccaaaaaataaatgtactacctatgattaaaaa

SEQ ID NO: 239869 - DNA, 554 bp, Homo Sapiens
agatgcactttatttaatgtctttccctagctaattcttactctcaccttaaatatgctttcttgttgcatatatgcacagatacacacacacacacacacgaaaataaataaatgttcatattcttctgttcaacagacatttattttctcctctcccttgaataagaaaataagttttccattcctatgaactgtctaatatctttctattacagaaggggaaactgaggctgggaaaggctaaatgacttatcctccatcagttataacagcccctggtcttcttaaatttaaacacgggacttcccgaactaatttttttaaggatactgaaaaatgagagagagtggtcgaatgcctgaaattttgcttaacttactgtacttaaaatcaattataacttctttttgttactcagggccccactttttgttgctttctagacttgtgtgtagaaagaagattaatgatcacttaaagtagtttccttctttattctgaaaaaatgaggaaaaaataacaacagtggcaaataaaatcatatttggtact

SEQ ID NO: 239870 - DNA, 556 bp, Homo Sapiens
ataaaaaataaatttgtctcccatctcatctcctaataccgaattcccgttccacagaagggagtacttaatgtgtctgtacttaatgtgtctactttgagtaatatttcatctacatacaagcagatattgtatgtttagtgtacatatatttaatttctcctcttttacaaaaatggtagcacgcaatacccattgctttctatttttttttatttaacaatatcttggcaatctttctgtatcagtatataaagtgctattctctttttaaaaaaaaaaagctgtatggatcttctataatttgtgtaaccactaccatattgatagacattttacttttcgatttcactaggcatgcctggcccatattgctctacaggttgtgcattgcacaagtccaagcagtgtcattcacatggaccacagtgttaatagtattccaagtcatgcttggaaccctgcacttggggaaatatcaaaaactttaatcattcaaaccatggattcacaggcaatagagaagtaaaggacaatgaaaggaaaccagaggaag

SEQ ID NO: 239871 - DNA, 552 bp, Homo Sapiens
cattttcctccaataagaaatctgttttgccttttctgatggatattaaaaagaaagatttttgctcagtatttgtcatcataaattctcattgctgctgctgccctcaaaaggattgtataaatgagggggtgaagccagccagttttgacaaagtagcaattcctgaagtgaaggaaattattgaaggatgcatacgacaaaacaaagatgaaagatattccatcaaagaccttttgaaccatgccttcttccaagaggaaacaggagtacgggtagaattagcagaagaagatgatggagaaaaaatagccataaaattatggctacgtattgaagatattaagaaattaaagggaaaatacaaagataatgaagctattgagttttcttttgatttagagagagatgtcccagaagatgttgcacaagaaatggtagagtctgggtatgtctgtgaaggtgatcacaagaccatggctaaagctatcaaagacagagtatcattaattaagaggaaacgagagcagcggcagttggtacgggaggagc

SEQ ID NO: 239872 - DNA, 404 bp, Homo Sapiens
ctttgaatgtaagtattttatctaaaagcacttatgtgtctaaacagacttctacaaatcagtaccaaaatggtaaataattccacagaaatatgggcaaaagcttatcattatcaacaaatgagaagaaagaaaccctattccaggtaacaccaaagctttggcccagtgccctctgttgaaacatcctaggctttttctttccactcctattacaactgatctgatttggccccttcacacttcactcatagattttgctagacctttctattttgtctccctgaattaagcttttccttttggacactttacatatggattctaaaacaatcctctgcatgtctacacttgcacataatgcaaaaaacaaaataaaataatcttcctgttttgatcatgta

SEQ ID NO: 239873 - DNA, 566 bp, Homo Sapiens
agatgacgtttgaagatgagttttagttcttagcaccaatacaacaaatgatgggatttgaggtttaagtgcctaagtttaaggctctcatataataactcttaatttctttttgtgtcgggaaaagaacaaactcttgccttgaattaaccagttattttaaaaaatcatagacttctgtcattagaggaaacggcctgaactccattaccaggtgactttttagctttagtgggtggcacatgggactgtctgtggtgtgccatctgcagtgcgcaagccatttgtttctggaaacagtctcacaagcaatgattctggtgagtttagaaatgaatcaggatgtgctaagctcaatgaggactcattagccttggataatgtgattctataaatgaacagaatggagacggtgaagactcaggagtatagagaaaataggatgacactggaagctaggctgattggtgggagttttggaatcaatgtgcttcaactattagttgattaagcatatagttgaattagtaaagagtgggagacttgccccttgactgtgtgttatt

SEQ ID NO: 239874 - DNA, 559 bp, Homo Sapiens
ctggcctccacccctacctaccctatgtactagactgtttaggaaggctgaggccatgtgtcagtgagcttaccgttacatcctgggaactggtaggtgctcaataaagaaatgaaatgtaggtggatggatacatcatgtggctcagatcccttgttttgcaggtgagaaaactgaggtttaaaggaacaggtgacttggctgggagcactcagtcatttagtggcagtaggcaactgtggccccatctccagtactgagtcccgagcccctttcactagcacatgctgcctggtagagtatgaacagatagttaccaaatgctctacacagagaacatttaacccccagtcttaacaagtgccggtgattcatgagatattgacccatgtcctttattttacgagtgtgtctcttttaaactccaaaaatgtttttatgcttttatgagtgtcctgaactttacatgggtgctgctggagattaaatcctccatcagacccctccattcaatattttcagcagaattttatcactatgaattcaacatccccaccac

SEQ ID NO: 239875 - DNA, 478 bp, Homo Sapiens
atgtgaggacacgcagaggctcgaatatgctctcaaccctatcagttgcctgctttaattcatcccatggaattgttttgtcttttcgacccctcggctatgttatttgtattgtgatataggggatattcggagtcctctgagacgggacaaggacactggacggtctattgtgccatgcttatatattttctgtatacaatgctttctgtataaaaccagtaatacctgagaaacaacagtaacttgacaaaattactattgatcacttaactttatgtatcacgtaagttaaactttatttatttacatgtgtctccctcattagatgctaagttccttgatattttatacatttgtgaattcctggtaattcacatgaagcttgatgcattgtaagtattctgacctggtgaaataaatatacgaatgggcaaaaaaatatatactaaaatgatcaaataaaggttgtgttcag

SEQ ID NO: 239876 - DNA, 580 bp, Homo Sapiens
cattttatgtaagcaaaactgaacaattggtgaaacattttgttactcttggaattgactctggctgtcagtgtgagccattagagtaacatcgaatcttggggcaaagagctgcccaggtgaattaaatttttccaggacactagctagtgtgccttggattgattacctcttctactgcattgaaaggcgccatgttttcctgaaatactaaattcccaacacctgggtaaacaatgaccttccagagagtggctcccgtatgcctctccctaggaccaaccccatgaacatgttttgtcacgtttgtctcatgtttctacttcacaagtcagtgagtgtgtttaaggtaagtacaggattattctagtaggaataggcgattgctgtcataatcaattctcatgttgatttcattttattgtaaagataaatttaaacccagttttgcttaagcacattgatgtaattttttggtattatttgacatgaaaaaacagcaaaattgagtgatagatacaatatgaaacttgttgatgaatgaattcaaatttattaaaaaaggagtaactgaaaaaaa

SEQ ID NO: 239877 - DNA, 486 bp, Homo Sapiens
  misc_feature (118)..(118): n is a, c, g, or t
gttgacccaactggtgaatagagaaatacagattaagtatccctacaatggaatattattcagcaatagaaagaaatgaagtatggacccatgcatggaaggatgcaggggtgtttcntacagcatagaaggaccttgaaaacacagggctaagtgagaggagccggacaggaaggatcatgtattgtgtggtctgctcatgtatgatctgctcacatattgtatgatctgcttacatgaaatgcccaaggtaggcaaatccagagtcaggaaataggtcggtggttgccagggacagggacttttgggggaaaatagagagtgactgttacagggacctgctttcttctagggtgatgaaaatggtctaacattgattgtagtgaggggtgtgcagctctgttaaatatgctaaaggaccattgaattgggcccttttaaatggggtgcaaattatatttccaattaacctatctgtagaaactt

SEQ ID NO: 239878 - DNA, 513 bp, Homo Sapiens
  misc_feature (19)..(19): n is a, c, g, or t
  misc_feature (47)..(47): n is a, c, g, or t
agtgccgatctgtgatggnaaaaataacttcagaataaagcaaaagnttgatgtggacaccagtacccagtaaattactgtgaaaaaaaggcaacttctcttggtccagtttacctttagataaatgttttaagggtaaaaatatgtgtatttcaagatatgtcttatgtaaacttttttaagttatgaaaatcatccatattgaaaaatagaatgttttctattttgaaactgttttgcattgtcagttacttaagcagccattttacattttggtttttgagaacataatagggacctgtatactccttgtggggccgcattttaagactcctgacagctcatcctgcaaaattaaaatccaaaatctaagtcgcaaaattctcttttctccttcctcagttatttacttagagtgtagaacagacatcctcttagagttttttgtaactatcagttatcgttaacatcatatttttattctaaatccttccatagaaacactgcttgttg

SEQ ID NO: 239879 - DNA, 462 bp, Homo Sapiens
gtttgttaccccacttgtggggtgttgctgtctgatcaccatcttccttccaagggtaggggaaagggccctggctggttcaagtcacagctctgtcctcagcgccaggcacagtgcccagctcactggcacagcctcagattccctggacacctggctccccggctgcattttttaccattgggataagttattagtaccattgaaaattaatacctggggattctcttaatattgttcatattcatgttcttctcagcagttttaccatgaggaatctgtcttaaacaatgtcagttgtcaatagcgttatttaaaatagcaacaacaataaaaaaaggtggtcagacctggcagcttgtgcctgtaatcccagcacttggagaagccaaggcggggggatcgtttcagctcaggagtttgagaccagtctggccaaaatagcaagacctttgtctctat

SEQ ID NO: 239880 - DNA, 527 bp, Homo Sapiens
ctgcacaaaaataaaaattccaagctgtggatgaccaatgtataaaaatgactcatcaaattatccaattattaactactagacaaaaagtattttaaatcagtttttctgtttatgctataggaactgtagataataaggtaaaattatgtatcatatagatatactatgtttttctatgtgaaatagttctgtcaaaaatagtattgcagatatttggaaagtaattggtttctcaggagtgatatcactgcacccaaggaaagattttctttctaacacgagaagtatatgaatgtcctgaaggaaaccactggcttgatatttctgtgactcgtgttgcctttgaaactagtcccctaccacctcggtaatgagctccattacagaaagtggaacataagagaatgaaggggcagaatatcaaacagtgaaaagggaatgataagatgtattttgaatgaactgttttttctgtagactagctgagaaattgttgacataaaataaagaattgaagaaacaca

SEQ ID NO: 239881 - DNA, 482 bp, Homo Sapiens
  misc_feature (33)..(33): n is a, c, g, or t
gtcattaaagccattgataaaattaaagataanaatgtggattatgaggatctaaatacttgtcttcaaaattttggtatttacctttctaagccagaatttaagaagatcacagaactgactgaagctggtgaaacaaaaaaagtgaattttaaagaattcattgatactatgatgagcaacacggaatgcttctctgaaaaattagtattgcctgatgctattgaaaccctcgacgatctcagaaaggagacgatgagtgtttctgacctgtggaatactctgtctagtttgaatagtaatttaaaaaaggatgaatttctagctgcattggaactagtgacagttgatgataatatggaggtggatttaaaagatttcttaatgaaaatgaaagaaagtccacatttccaaaagtccaagggtaagtgaatacttcttgttcaagagaatggctagaaaataaatatttaaaaatgaaa

SEQ ID NO: 239882 - DNA, 569 bp, Homo Sapiens
aagaggagctgccgctcgttgccatcaggcacctcaggagctggacatggtattcattataatttctgatgaggaactagagaggtctcatagcatatagaccttgatcaaattgggtcatggtggagtcaggcaaaactctgcaatgactcacaggtacctaagtataaaacaaagtctcaactcagagcatccatcagagcttcaggctcagtagtcattcctttatgctgttgctgtgtttgtactgtgataactggtgcttgaagggaggacatatagttacatgttgcgggaaaacacatgtcattagaaaacttggcatgatttagggaccattgccttttccatggtagatgtgggactctctgtcatcttcaccttgttgttccaagtgcagaagagaaagcttcttcctgctttcagctgcgtgactgacaagggaagctggaattcagagaatcagtggcagcctctgtctctccaggccccaaccctgcaggtttaaggaatggacttaggtctctggcactttgttctcaacacacattttccttcactcattcaga

SEQ ID NO: 239883 - DNA, 490 bp, Homo Sapiens
taggcaggattgatgagaaaaggcatacacctaaacatactctgacagaattcctgaatctcaaaggttaaagagaaaaatatataagattccagacagaaagaagttatttgcaatgggaaaagaattggactggtatcagacagtggaatcatatctatacctgttaagagaaaaggaaagtaaccaagaagtctctttccagccaagcatcattcacctgccagagtgaaagggatgcagaaaggattccaagaatctatcatctgcatatccccatctgaagaaactgaaaagaggactgtaactaaataacaaattaatgagaatagagacttcaagaaatgagaaggtaaagtagaaagggaagatgatgagtgaacaataagccttgtaatatacatgggtatgtatcttaatgtacttggatgatgatgaaatgactgaaaatgtgtactatatgtgttaaataaagactcttaagataaaa

SEQ ID NO: 239884 - DNA, 521 bp, Homo Sapiens
aacattgccttaataattgatggctcaaccagtgttgtagatagcaattaccgcctcatgcttgaatttgtttccaacatagccaagacttttgaaatctcggacattggtgccaagatagctgctgtacagtttacttatgatcagcgcacggagttcagtttcactgactatagcaccaaagagaatgtcctagctgtcatcagaaacatccgctatatgagtggtggaacagctactggtgatgccatttccttcactgttagaaatgtgtttggccctataagggagagccccaacaagaacttcctagtaattgtcacagatgggcagtcctatgatgatgtccaaggccctgcagctgctgcacatgatgcagcaaaataagtttaaaagggaatctgtggcattcaaccgataaacagaagatcactaagagatgaaaaaaagctactcttggagctcacttcccccaacaagagcaccacattcctaacccctaaggcagcacacagagtcca

SEQ ID NO: 239885 - DNA, 538 bp, Homo Sapiens
ggcacgaggttttttgtcttgctaacaggtgcatcttcagcgcactcagaacaatatctggcacagcacgagacccctagaaatgttcgccgaacgatcgaatggctgaatacattcatatgttgctttgtacaaaaacttgctttcaaatatctgggaagagttagagataggaaagcagaggtcatttcaaagagagagagtgaggataccaccgggaaggcagcgccgaaaaaaccagaggggaaccacttgccgatcccccaggcacagtctggaggtcccaattcccgcggtaggggggcgagagatgccactcgtctgatcagcaaccattttgggcccgcttgcgccgcttctccggggcgtccgcgttgtgctcatccagttgcttttgaggttccggccccctccaaacctctgaagcgctccgtgcacgcgacgcggcggcggggtaagctggagccctcgccgcgagccctctccgctgcctgcccgcagcacagccgcgccgacctcctcatcatggcggcggccg

SEQ ID NO: 239886 - DNA, 525 bp, Homo Sapiens
actctgttgcccaggctgctcttaaactcctggtctcaagcaatctgcccacctgggcctcccaaagtgctgggattacaggtgtgagccaccacgcctggccctctgttaatgtattaattataactctttgttttgttatttgagggattactttagggttttacaactcgttaagtaaaaggggatcatcataaatgtattggaggaggaagggttggtcttgctgtgtcaggggtagcagaggtacatcttgacttaccacagtttctttctttcttttttattttattctttactcctggcaagctgtgacacagttattttcaagagatgtaatatactacttcatgcgtaagaactgtacaattatatacctttttgccagtcccaattttatgcagttgttttcatacattttatgttcatatatgtaataaaattaataatacgttgttatttttatttaaatgaccacttaggttttaatgtgtacttaataaacagtaagcagtctcttctgtt

SEQ ID NO: 239887 - DNA, 678 bp, Homo Sapiens
  misc_feature (13)..(13): n is a, c, g, or t
  misc_feature (670)..(670): n is a, c, g, or t
gttaccgaattancaaacctaataaagatttgtacttctttgcatatcaaaaagtagatttaattctccaaaatactacagtgatctctgagaagaacaaattagaatcagattatatggccgcatcttcacaactccgtcttacagagcaacatttcattgaattggatgaaaatagacagagattattgcagaaatgcaaggaacttatgaaaagagctaggcaagtatgtaacctgggtgcagagcagactcttcctcaagaataccagacagtaagtataaaaagtatataatgctacaattgccatatttaacatttttaagattatggaatcttagccattgtaacaggccgtgaaaaacatgatgtgtcgtaaaaaatagggagtttttccacatttttaaactgaatatatatatatatataaaataatgttgcttaagagatcaatggtattggtactataacatttattcttccaatacaaatgccttttaatgggtacagttggaacatatatagtttttcatggaaacattgtaccagtaattggtatatcagaaataataaatagaatattttaaaaataaagggaaaatgaaaatgtttccctggaaattggggtgtttaattagggttcaatgagagctgaatatttaaggctancatctgcc

SEQ ID NO: 239888 - DNA, 568 bp, Homo Sapiens
tcagtggcagcgtcgctatttttacctctttccaaatagacttgaatggagaggagagggagagtcccggcaaaatttactgacaatggaacagattctctctgtggaagaaactcaaattaaagacaaaaaatgcattttgttcagaataaaaggagggaaacaatttgtcttgcaatgtgagagtgatccagagtttgtgcagtggaagaaagagttgaacgaaaccttcaaggaggcccagcggctattgcgtcgtgccccgaagttcctcaacaaacctcggtcaggtactgtggagctcccaaagccatccctctgtcacagaaacagcaacggcctctagcacccagaaacagggagggtcctcgaggaggacacaccagggtctcagccttttggggtgaacgaggatgaggcatctgatctattcgctaccgggactcctccaggctcccgagaggagtcgggacccttcggcttggggtcagctcagctccctgccttgtcacatttgtctgcattagaaactactgaagaaataaaagttctttttctttgctacaaa

SEQ ID NO: 239889 - DNA, 529 bp, Homo Sapiens
cagtccagaaaggcattcagaagatttgagccttaaattattccaagatacagaaggcagacttgctttgctgaattgacattttaatcagtatttccttatttattttttaacaaggcaactatattatttataatatcctgccaaacatgaatgcatgcctttcacctgtgtaaggggctcaaggatggattcttggctgaagaattcctctggaaatatttcccaggccaaaggtgggaaaataggctgccagtaattggaagttttatgaagtatgcattaagattttatttattaatagtctcaagatttagccttatctttccaattttctttgataggtaaaatcagtagcctttctgctaccctttagggtgttaaagcagtgagttgtgttgggggttatttttcaacccagggtccatgttttttcacccacatgatttttaattacttcacttccagttaaagaatggtatgaaagtactgtttatatgtcttgttaaaataaaaacttagacaaatt

SEQ ID NO: 239890 - DNA, 748 bp, Homo Sapiens
gggtagcgggcccacactgtccccccaccaccgccgcccgatttgttgtgtacaccctttagtaagagtggggttttcaccagtgttacccgggatgatcgccgacctcctgaccgtcatgatctggctgccctgggcctcccacaagtgctggggattacaggcgtgagcctccgcgcccacccatcttgacatctttttaatagagatagggtctcaccacgttaccaggctggtctggaactcctgagctcaagcagtcctcccatcttccctcccaaagctttgggattaaaggtgagtcatcacgccctgctgcttcatttctttttttttttcatttttacttttagatccagggtctccttgtgtcgcccaggctggagtgcagtggcgcgatcacagcacactgcagccttgacctcccggactcaagggattgtcctgccttggcctcctgaggagctaggactacacgtgtgcaccaccatgcccagctaatttttaaattttttgcatagatggggactcgccatgttgcccaggtcggtctccaacctacgatctcaagagatcctcctgcctcgacctcccaaagggattacaggcggcagccactatgcccggctggtgtcttttatcttgataaaatcatttagaaataatagcacttgtatggtgcttactaggccaggtacctcaaacatattatgtctacaactcagtcaacagtcacttttattaataa

SEQ ID NO: 239891 - DNA, 844 bp, Homo Sapiens
tatggtgtgttttgtttgtgtgtttgtgtgtgtgcaaaccagttgaaggcacgaaaggtaagaaggtatacctggaaaaaatcgggcccaggtgttacccacatattcaaacgagcagatatatgacaacataaatcagtccatcccatataacgttacaataagttttccagacacccggacctattgctcttaaatatgtgtgtacagtcatcataatcgagccattgttcttccaacatgtttatttcaatgcagatccgatcagcatgaagagtctagtacaagatagcagacatggttatcactctgcatcaccagtcacatggttacagaaaacagaattgggactgcatagggactctactgcgggcccaacaacctattagtggattgatgtaaggcattagtaaattggcatataaaaatagcttaatgagtgatctaatccatttagaatgctgaagcacttctgtggtaaatgttagtctattctacaattgaaaatgcctcattttaccttttctctaaactgacaaatgcaagtagccagtaactgtaggtctagaattttcgttcactgaccagaaggactaataggcgtctatgtgctcagaaccaccagtcccgcaccaactctcctttcagtgagcactgtcagccacatcctgtagtcactggtcagctacatggaaagtgtgactgaggggcttacggatggcttctggtaaagattgtccaagtcatattccgtcatacaaccaactccaaggaactctaactcactttataattttgatttaccagctattccttgggtttacaatttgttctgcagataatt

SEQ ID NO: 239892 - DNA, 536 bp, Homo Sapiens
aagatatttagaaagtccagcatgtagaagaattgagtatctggtgaagaatttattagatatagcctcataaattccttagatatataacatttccaaattctttgtccttgaaaaaagttgattttgaaaatttgactagtttattgaacatatatcagtttgttaattggattgaatcactattatattccaggtattttactaggacctttaatatacactgtcccatgtaaggtaataagtactgagtttaggtgaaagtatgaaaacaggagagatgttgaggatggaattattgaaaaggaattggccttgaattctaaccaagatagctaagtaaggtcaggctttgatttgtccttgccagcaaaaagacttaggcagtaacagaaaacatgtgaaggaaaataaaaaatacctctgagttaaaaagtgaggtaaacgtttcatgaaatggaaataaaatccagtatgaaacagttagctaggttcttggtccaaaaagttcaccagtgactaggattttagcatac

SEQ ID NO: 239893 - DNA, 449 bp, Homo Sapiens
agatgaaggttaatcaaggtcctcatggactgaaccttgaggcccttctgctgcagtcacttttgccctatcagacttttagagtaacttcctctctttatttcctctttggtggggttatcagaattattttgtgactattggtttcctttgcggtttttagtgaaattcagaatcatcttcgacggataggaaatagtgcaatcatatgtgtcagtattccggtattctaggaacttaaggaaatgcatataagggtttgaacatttttttcttcagctcactaaatgaacgaaaggtaggcgtaggcgttaaagagacacataatgtggaacgatgctgtattttcttagctactaaaacttcatttgtcattgactgtctcagggctttaaaattttatgtaggtctatattcagcttttattaaaatagaaaattccttgaaaa

SEQ ID NO: 239894 - DNA, 510 bp, Homo Sapiens
tgggatttgggaagaggaaggcatccaagaggtgtggggaaaacattggcactctcggggctccaactgaactgtatttaaataagcagcaacacacacattgactccctaaggactaacgtaagtccatttgagggcctcctacttaaggttctaaggttgaagcagttttataattctacaaccctagttttttgttgttccttttttaagtacattcaaaaaaaaacaataagatggggacagggttggggcatataaaacaggtccctaaagagatgacagaccttgtccttttacccgtgtccagttaccagtaagtatacagtacccatctcccctcaatgaggctgtgtagttgtcttttccactgttgttcagtaagttccaacgattctaccttgaaataggtaacagtctttggaaaaagtcactctaggttgtacaaaggttctatgtatacgtctgttacaagtaacaaagctactttgcaagacccgcttctttcca

SEQ ID NO: 239895 - DNA, 541 bp, Homo Sapiens
aaaaataaatagcggggaaaggcatcttccattcgcggagagcagggagggtggggacggagcggtgagtcactgtttactgttgaaaggcggccacacggagccctctctcagctggccagatttccatttcccgtgtggactggacccgaaacccagaaagtccactccagaaacctttagactcagaaacagctgggacaagaacaggcacaacttcttctccgtctgggtggcaaacagctttgccagagactgtaaacaaacgcagccatcgctgagccccgtgggtgaaagcacacgccttgtagacagcgaagtggcccggaagacggtctcccttaacagcagcctcccgggtgcacacaaaggctggcgccccgacaaccctgaccctcggtaaacgctggctcccgggtttaccagcacctggggagtcgacgctgcgggcaaccagcccctcaaagccctggctcggttcaaggataaaaggcaggagaagcctggtttttctgctttaataaatgtcttattttggaaa

SEQ ID NO: 239896 - DNA, 555 bp, Homo Sapiens
aaatgtttatagtttactttgaaagtaaaatatactatgtcttggttttgaggatattggatacaaaactctcttcctttagggctactgagtcttgattcctgatcatcagaaatttcaccagaaacaacttgcttccaatatacccaattctatatgaagaattcatggagagtgtactggcactggaagagtttagtgtttcttgtatgcttgaaaataaagtatgtactgttttgaatgtgttccaagtcctctgcataaacgatgtattttggggtctggttgggcctggaaaatggatgagcacttcagaacaggtcattttcctgatattggaagtgacatgtggccctataggaggcatgatgttagttaattacacatttgcctacatctgtgggaaatggagaacaaagccatgtgggtactgtaaacacacgtttatcttttggcccaatgccatacatatggtaggcatttaattactgattgtgtttggataatttgggaattttcgactgtggtaaaatatacataaaataatacttatta

SEQ ID NO: 239897 - DNA, 530 bp, Homo Sapiens
acaatgatagttcgtatttcatagggttggcaaaggattcagcaaactaatatttataaaacacccagaacagtacctggcacatagtaatcactacgtatgtgtttgttaaacaaatgaattagagatcatttatggaagagtagtatgagagactagagtacaggaacccaatccagcttggagttggggaagaccccctaaaagaggtggcatctgagttcatcctttaaagaaagaaggagtggtcaaggaggcagctgagtacaggtgctcctggccaaatgtgcaaaggcagagtgagagagagcaggcccaggtgagtcacctgtaggtagttgtgaagttggaacaaagtctgggacctacctcctatcactacactattcctgaggctgtgaggagccactgaagcgaggaagacaccatcagatttgtgtcttggaaagactacagtccagcacagtgttttccaaagcaccttcatcagaataacctgggaagcttgtcaaaatgcatgttccaaaacc

SEQ ID NO: 239898 - DNA, 477 bp, Homo Sapiens
atacttacttttctttgttttcctcatttaaagagaatagggatatttctgtattatatatttactgtttcatccctcacctttggagtgaccatgaccttggcatgaaggagagaaacctctgctttccgcctattgcttccaggagttactaccttactggccttggagataatgctcttttgtgccaacctgaggataattttaacaaaatgtaaggccagtttcagaggttgttttgccccacagagagactaatcccaatacaagaatattgacaacaaaaggacaaagtagttattgcacaggacggaaaggtgtctttatttcatcccctccccacttccaaagatgcaaaaggcctaattgaatcaagtctcctttccatctggcaggagacattttaataaggactttttaatttcctacatttcttggccaagtgtcataggaatgtggcctcttttgaaatttaaa

SEQ ID NO: 239899 - DNA, 555 bp, Homo Sapiens
aagcaaactaaaatctgattcttcttattagaaagaagagtgaatttctgcaattattttacatttgagaatttaatgtgatcaggtcataggtattctcacaacaaaatttgaagcatttgcttgactttatttcacctgttgaaacaaaagcagttctcagtatccaagtttattgctttactaaccaatgtctctgttttttgctttacaaacatggtattggttctcacaaattagttcaacttcccggtgcattcataaacatatacccacgtttagttttccttccagtgcacaaagtttccccagtaacctaaaagtactaaatgttctacattttgtgacttgtgttctttactttttggaatataaaaataatccttaaagtttaatttaaactgggagcagtgaattaaaaaaaaaatgtaagcttgaaactattgaaaagatcatgaaaatgcagagtattttttaggatgaagctcttcaaaaagaagaaaatttggtgaatctctgtactatagaaatggctgtatcaattggaggtaaaaa

SEQ ID NO: 239900 - DNA, 524 bp, Homo Sapiens
cagactgatcatccgtgcagaggagctggcccagatgtggaaagtggtgaatctcccaacagatctgtttaatagtgtgatgaatgtgggtcgcttcacggaggagatcgagtggctgaagtttttagcccttgcttgcagcgctctgggagttactattaccaaaactctcaagatagtgtgtgaggtcttatcatgtgaccataatggtgggtcgccccggatcccgttcagcaccttccagtttctctacacgtatattgccaaagtggatggggagatctctgcatcacatgtcagcaggatgctaaactacatggaacaggaagtaattggccctgatggtataatcacagtgaatgactttacccaaaaccccagggttcagctggagtaaaagcacaattttggcaattttaaaggaagatacagagatgattgtacttcagaatgactgaaacccatataccacccaaaatcaattttcttgtacaactggtacacactaataaacaattaaacat

SEQ ID NO: 239901 - DNA, 517 bp, Homo Sapiens
agttattacatatggggttttattctacatattatactgcacttgctttttctaatataatgtgtatcatgagcaccttacaaatttttaaaggtctctcaaatttatcagtaaacatatacagtctaacgttaatgagaagatattttggtgggcagtttgctttaaataaatgggatcatgtacgttctctgcatctcacatttctcatttaacaatgtaggatgagaatttctctaagtctatcatagctcttatttcctttttattattacaataaacattcctgtgtatatgtttgtcaccatgatggttttacgtctgcggaatagattccctggagtaggattgctgcattgaggagtatgtatatttaaatttttaaataaatattgacagattgtttccaaaagtggccggaacagtttttatttccatcagtaaatgtataaaaacacttttcccttaatactcatggcaataactattgtaacattaaaaaatacatagaaaaaag

SEQ ID NO: 239902 - DNA, 540 bp, Homo Sapiens
  misc_feature (72)..(72): n is a, c, g, or t
tctaacgtcagaacggctgacgagcagttgattgtccttgcttgtgttgttgacaggggtgggtggggtggnagcagggggtatggatattgcataagttattgaaatgctgacccccgttcaggaaaccatgcagccccttcccttcccttcccttcccttcctttcccttccctagccagggctcaggtacctcactctcctgccttgtgcgtagctcctggggccccggtcagtccccagcagccttggcacacagtgtctggagcctctgctcctgctgcaaaagcagaaaccatgtgaaccttctggccagtactggaaaggggaatgctatttatttttatattgtgtatattttgtcgtggtctgctgattccctgtttcactgagagcgacacttacctcaatagttagttcaatattgtgtgttggataattttttaaaagaactttttaaaaagctttttgatccttggaggtctgtagatttatttccatatgaactggttattttgtataaagtacatgcttgaaata

SEQ ID NO: 239903 - DNA, 556 bp, Homo Sapiens
gggaaatttgctgtttctcctagtgagagagggagtctatttctttacccttgggcatgggctggcctggtgacttgttttgaccaatacatggaagaagtgacattatgtgagttctgcagctgaagctttaagaggccttgaagtttctcctcaccttcttggaaccttgagaccaccatgctgtgagaagcctgggcatatctactggaggccgaggggccacatgacacgtctaaaactcatacgtcaagatatggtaatataatgtgaaattcctagagcagcttaatgctagtctctatttggctacctttttctttagaattgcttatatagttagtgtatgagatttttgttatattttgcaaatattttctctccattatagctcatcatcttttagctttgtttatggcatgtttttatgatagagaagtttcattttttatttttaagtggttacatctattaataatttcctttgtgtctctgaggttttgttgcttaagaaggacttctcaaagatttaaccttattttttacttaaagagca

SEQ ID NO: 239904 - DNA, 495 bp, Homo Sapiens
gaagggaaaggagggccaagtagagcctccacgaccctcggcttcctcctcaccagctccccctccctccaagtccagtaagaagttgggccaagctggaagggattgaccggccgtttcctctccctcgccggcctcggcggagattccaggccctatagaaaccaggacgtcccttagcgccaccgcctcacatgccagtgctgccgggaacccagcgatatccgcaccagcggagaaggttccaggctgccggcggcggcgcagagagcggaaagagaggctcggaggaagccccgggcgtggcgtggtcaggctccgagagcggccgggatgcggccacaccggcctggtaaactcgcacctcttaggatcttgctcccggactcattcccttccccaccccctattttaaagttttatttgggtcgtctgtatcaatttagaacgagataaattaagacaaagaaagtaaaataaatcgaaataaaatat

SEQ ID NO: 239905 - DNA, 569 bp, Homo Sapiens
  misc_feature (14)..(14): n is a, c, g, or t
tttattccaggaanaatgtggacatcagctaggcacgcctagcaaagaaagtggaggctgctggtttctgtgctttaactttccatagattttaaatggataaactgcttgcccttctttcatcagaatatgagctttccccagatggaaagtcttttctaaagcaaagttgcacatgggagctctagcttggaaacaatttgctcttttttccccagtctctgccataaacacttgaatgtgcacacaactgcagagcttaatgccacaacctccaggagattggggggaggggaaagctgcccaggatgggggtgggaaagcgaaggaagatggagaaatggctgcagtttgctgcccatcagcttttctcttttaaggggcagacattgcagacgtagttttaaaaaagttccataaagcatcgccaaggcagcatgcctgtgcgacacacgcagggctttgggggtgtgttttccccgtattaacagcaagtcgttgaagcgttgagaaggtattatgatttctaatcaggcccagaacaggccaagtataggctttctgaatga

SEQ ID NO: 239906 - DNA, 575 bp, Homo Sapiens
cagggccccatgcagggagaggaagttgtggggaaaggcagaataacaagcagagaaactaattttttaaaaaggtttttaaaatgttgtgggtgaaataaaacacgagctatcagttaatctgtataaccaatgccaagtttcattacctctcttgtccaacttcctcatcaagaaaatgagcatagccacatctttttttgccttaaggggagaggcagaattctaacaatcataagacatgattcctgatgtgtgcgtgatccccactgaatctgagagtcaagcactgttgcctcggtcatacaacatgtatgtgttgatcctgactttgcaccaggtcctattctcaccccagtggagaagttaaggctcagagagttaaggagtttgcctaaggtcacacagcacagaagagtcagtaaattcatttgctggcgggacacggtggctcactcctgtaatcccagtactttgggaggccaaggtgggaggatggcttgagcccaggggttcaagaccagcatgggcaaaatagcaagaccctatctctacacaaataattttttttactt

SEQ ID NO: 239907 - DNA, 630 bp, Homo Sapiens
gttcctcggaaaatgttcagtttgagagcttccatgggcacatggtgaaaaggttcacttgcacccacctgacacttatataagaagccccaaaaaagcagtaatgccatttgtatcagcttttattcttcacaagacatttagaagatacagaacttttaataatattcttctattcgtgattgaaccatgaaatatgagaaaccaacatgcatttcaactttgtgatgtacagagtggcaggtattgatggtagggcaggaattcacagccgtggaaaattctatcatcctaacctaggtctttgtggcaatgtgtgctataaatacaagcttctggcattagcaactgggtcagtcccaatagtaaatcactaacaaaaagtccaggcagcagagaaatggacaaaaatgaagaaccagtgagaaaggaagaaagcgacaggcagacattaagagggccacggcaaccagacctctattgctatgattgggtggtagagtaggtaaggagggagaagagaagaggagaaaggggtgtctctcaaaagaacttttataacatatatgcaataaaatattgtctactggtcatgtaccttgtcgtggtggattcatctctgcaaacctc

SEQ ID NO: 239908 - DNA, 398 bp, Homo Sapiens
  misc_feature (6)..(6): n is a, c, g, or t
  misc_feature (16)..(16): n is a, c, g, or t
  misc_feature (75)..(75): n is a, c, g, or t
gaaccncccaaacttncaacatgagcttgccccaaatgcaaggccacaagggggtcagggaaagggaaaggcttnaaaagttgttagcaggccgggtgttgtgactcaaaatactgtaatctcagcattttgggagacctaggtgggtggatcacttgagcccagaggtttgcaaccagcctgagcaaaatattgagactcctgtctctccaaaacaataaaaaataaataaacaaataaataaataaatggctagacataatggtgtgcacctgtagtcccagctgtttgggaagctgaaatggaaggatcgcttgaggcccagagtctgaggctgtggtaagctgtgttcgcaccactgcactccagcctgggtgatagagtgagaccctcgtctc

SEQ ID NO: 239909 - DNA, 415 bp, Homo Sapiens
  misc_feature (4)..(4): n is a, c, g, or t
  misc_feature (24)..(24): n is a, c, g, or t
  misc_feature (32)..(32): n is a, c, g, or t
  misc_feature (55)..(55): n is a, c, g, or t
  misc_feature (84)..(84): n is a, c, g, or t
  misc_feature (91)..(91): n is a, c, g, or t
  misc_feature (118)..(118): n is a, c, g, or t
  misc_feature (125)..(125): n is a, c, g, or t
  misc_feature (161)..(161): n is a, c, g, or t
  misc_feature (165)..(165): n is a, c, g, or t
  misc_feature (178)..(178): n is a, c, g, or t
  misc_feature (412)..(413): n is a, c, g, or t
gtgnaaaccctcgtaccccaagcnccctgtgncccctggctggctgtcccccggnacttgcaccctttcaagcagttatcctanaccctgnccgcagtggccctgagttgccagtgantccgtantcacctcaatctttgatgttcctagatcccacccantcantcgttgccgttanttttctgggatgatgaagctacccagggttttgtgcgtgttgtttcagcatatgacacgtggcaccagctgtacactgcccttctggttagtgttgttcttggtcaagggctccaggctgtcttccatgctatcttcatgagtgggtggcagcacgtgcccaacgctgcccactgggagaagcattgatactgtggccactcactgcagagagggttttttttggcaaagtatnnat

SEQ ID NO: 239910 - DNA, 601 bp, Homo Sapiens
  misc_feature (103)..(103): n is a, c, g, or t
  misc_feature (184)..(184): n is a, c, g, or t
ccaaccacggctgaacgggctgcttcggacagaggccgcccgttcgcaactcaagccttgagcatccagtggagtccacaggccagtgtggcagcatcgagcntagttgccatgcagctggttcacgaggcatcaggaaccacagccatcactgccactgccactggctaccaggagtcccacntcagctctgccagaacaaagcagccgcatgaccctctggtgcctctgtcggcctccatagagctcatcctggtggaggacgtgagggtgagcccagaagaggtgaccatctacaaccaccctggcatccaggcagagctccgcatcagggaaggctcaggttacttcttcctcaacaccagcaccgcagatgttgtcaaggtggcctaccaggaggccaggggtgtcgccatggtaagcttgggccatcggtccccactgttggttttcattccttatctgggctgttgtgtggttaattgattgatcattttgaaagctagcacttgactcacactcggaatcccagaactttgggaggtcaaggcaggaagatcacttgagcccaggagttcaagaccagcctggacaatatagt

SEQ ID NO: 239911 - DNA, 613 bp, Homo Sapiens
  misc_feature (140)..(140): n is a, c, g, or t
  misc_feature (162)..(162): n is a, c, g, or t
  misc_feature (169)..(170): n is a, c, g, or t
  misc_feature (173)..(173): n is a, c, g, or t
ctcccaacctattttaagtgggcaaccccccaggttttcccagttcccgccggtggtaaaaccgggccctggattttttattccccccccttaggggggaattggggcgcggggcccccctaaagaaacccaatttaggncaaaatttgtccccgccccccnctatatnnttngctgttgttgcttttaatcaatcttttattcacagctacaaactttaatcaattatggataaaacacaaaagctttttgaaatgctgataaaggaacccataccgagagaccaaataaaatccgagtgctgagctggccatgggcttggcaggtcagcagcacacggaggcacagagatggtggcaccaacagaaaggaatgtgggaaaattttgtcccccagataatatgaatagaacagtaaaatgaggttcagggttgaaatggcaaagccaacgttgctgtcattctcttgggtcccttccatgtgctgggctacgattataaatggggcatgctggctgcatgccaggggctcttggcctccaggagacagacactgtcacaccaggctgagcaagtgccataaagtcagggattgcttggggccaggagttaaa

SEQ ID NO: 239912 - DNA, 798 bp, Homo Sapiens
  misc_feature (212)..(212): n is a, c, g, or t
atttagtagtatgtagaatagctgttagagaggaataagaggggatatgtaagaagggaggggaaaggtctagaaagaaagtttcagccaccttgagacagtatttttaacaaggcaatatttgtatcctgaatgtgtttggttttgtttttattttttttagactcaagatatcaatgaaatatgcatatcttatttggagtgtatgattntatagcctccatcttttagttcagttttaagaaaaacagactaaatgatccctgtaatgtttgaatatgttactagctggagttccagaaaatattctggcatgcctttgaactttgagagctcatttcgtgggtgctctgatttaatgtcaactatgcaaaagccaagtaaatgcaagcactgaatacacaaaggccaaataaatacaagacaggacagaaaataaaatacatgcttaccagtaagaatgataagccttctccaaagaaagggaaaaattccctcatccaagcctcaaggtccaaacctcgcagctgaggtcaacagggggaaaataattctacccaacagatctaccaaacaagagggggaaagacctctccctaatcatatcccaaataaaacagaactcgaaccatatctgagagttctgtccaagagatacttactggagggagaaaggattacctgtgaaagtggtgggggtgtagggggttcaaagggccccaacatgggtacctcatgccataactccaaaggccaatgattctccatgaggtgagtcagctttgtatcccacttctg

SEQ ID NO: 239913 - DNA, 627 bp, Homo Sapiens
  misc_feature (52)..(52): n is a, c, g, or t
  misc_feature (57)..(57): n is a, c, g, or t
  misc_feature (109)..(109): n is a, c, g, or t
taatgtgcacggagagcaaagtcacagactaagagccagtcagtcggatatntgctntgcggcaaagatttaaacaagaattaattatctttggacactataaagattntgttcccttccttatagcaatataatcatgacaggccatggttaactacatcagatacacgtagcagccgtgactaattaaatcttaaagcactgcaattactggcaagacagctggtcttaagcagttttgtgactgcccttttcatccactacatgactattccggcctttctggagcacttttgaaaatctacttgactctgtccacaagactgaggaaagtgaaagcaaagtcccgggaaagcgggagatgattcagcccggggttctgcccctcgcccctccagcagcctctacagttagggagctcttgaactgttctcagcaggggcccccaaaaagtcaacccttccccaggtctgcgttcttcgggagaacaccttctgctggaaagctgctagcttacctgagctcagccgtgctccacctagcttaggcaagttaaataaggccaggagagagcctttaatgcgttttaaaagcgacagaccctctctcctgagtagctcgggcctg

SEQ ID NO: 239914 - DNA, 641 bp, Homo Sapiens
  misc_feature (101)..(101): n is a, c, g, or t
agctaggaccaaggttgcaaagatctctgttggtggctaaaagtcaaagcaggccaatccaccccattacctgaaatatttttcaggctaattaataactntatggatttcctcgatacaagtttattagtttattctccatatacaagtttattctcccagaatagcagcaaataaaacttgaattggatgtacagctcctaataaccttgatgtcagagttgtcacttggttggaattattatgatcccccaatttaaattttcttgataaactcagcgttgtttgttttcagtgacaagaaaacatacatggaaaggggacccaagacagttcaccaagatagttcacagccctttgcaggatatgcctttggtgggtgggagcacctagattttagaggactataaaacgccatgtttactttgtttgaaattttctgatgaaaagtcttttgtaacttaacattccacattttcatttaaaaagtcccagaaatataaactatccaatttacaactaaggtgggtatctgtaaaaaccttaagaatagttactcttcccaagagaattacagcgtctaagggggggaaagaaagcatctgagcagtaaaagtcaagctggtaaaatccaatacaga

SEQ ID NO: 239915 - DNA, 777 bp, Homo Sapiens
ggtttcaccatgcggcccaggcgatctcgcactcctgacctcgagtcatccaccctgcctcagcctcccagggtgctgggattacaggcgcgagccactgcgcccatgtagggtttccctttccgtgatttggtgaaataagactgtcccagtaggcacgccactgatgcctcctcgttcctcttctaaatctcagggttcgtcattgtgccaatgcccgatgttttcacccctccgtcttaaagcattgttgcaatttcatcagcctagatgacataacagccttacaaaaggacagggaggacgtgtccgttcctactctcacatagcggaggaaagttagagcctctcagtctctgtttatgaggactcattaatctcaaataattgatgcatttttcatacattagggtctctgtccatgtgtcttcctgatattgttatagaaatggcttcaggctgctggtaacagatgctgcggaaaaagaatgccttaaacaaagccaggcacggtgactcacgcctgtaatcccagcactttgggaggctggggtgggaggatcacttgagcctaggagttagacacctacccagcctgggcaacacagtgagacctcatctctacaaaaaacaaataattggctagatgtcgtggcgcacagctgtggtctcagctacttaggaggctgaggcgggaggattattgagcctgggaggtcacaactgcaatgagctaagatgcactataccctggcggctgagacaagataccctatc

SEQ ID NO: 239916 - DNA, 657 bp, Homo Sapiens
tgtaaaattagtcttctctggccttgaaattatttctacccattcttggtcccttggaatcatttccctaaactcagcatttattcaaaggaccctggaacatcttatgttataataattgtaaagttaggtctaaagcattttcttcccaatctttgcttgtttttgtttaaaaaaaaagaatcacacttcgctaaacatggctgctaggaagccctgagctgaacttacagttgaccttacttttactaatggtgtgggattttcctgcatgcaatttctgccacaactttttctgtagtcttgttttataactatacctctttttatttttgtatggatttatctatccaaaatcttattgaacatatttttctgagccacaggaagtacttttgggagtgaggtggtgtgaatttatacagaacaaagcagcacattaagaaggacacccacaggtggagcacttagtcactcccaccggccaacagcgcttgcttagggagccggatgaggaaagctcatttaaaaatatggtaacatctatgtgtgagatgctgagtgatgctctcagatgaaacccaagatgatgacatccttgcagacacccaggtgtgtatttcttcatactctagaaaatgatcagtcatgaaatgg

SEQ ID NO: 239917 - DNA, 610 bp, Homo Sapiens
tcccggcacaccccgtaggaccaatgctcaggccaaaggtgtccaaactatacagacccacagaatctagactacagatgtctcaatattcctcgtcctagaatctctcagaggatccagaactacagccggtcctcgctgggctgttcctgtccatgtgcctggtcatggtgctggggaacctgctcatcatcctggccgtcagccctgactcccacctccacacccccatgtacttcttcctctccaacctgtccttgcctgacatggtttcacctccaccatggtccccaagatgattgtggacatccaatctcacagcagtcatctcctatgcgggctgcctgactcagatgtctctttttgccatttttggaggcatggaagaaagacatgctcctgagtgtgatggccctatgaccggtttgtagccatctgtcaccctctatattattcagccatcatgaacccatgtttctgtggctttctagttctgttgtcttgttgtctcagtcttttagactcccagctgcacaatttgattgccttgcaaattacctgctttcaaggatgtggaaattcctaatttcttctgaatccttctcaactc

SEQ ID NO: 239918 - DNA, 947 bp, Homo Sapiens
  misc_feature (1)..(1): n is a, c, g, or t
ncttccgccgtaaattgcgtatgcttagctcactagagcccggctctgggcccgggaccttcggaggcacaggagtcagctagagattgcaggcctcaggaagacatgacccggtccacgaatagccataagacgggcacagatggagcagcttcatcagggcgccaccagggtccacgtcactagagaaggcgtcgtcctgctcgctctggcgtaccagtcacccagccaggggtcctgagccctggaccccaccggtgtgccctgcattgacggcccacagcgtcccccttgcaatgcactgccactccctctactccgtgcgcctgctggccacatccgcgcactggatgtgagagtgccctggcacactagggcctgcctgccaggggagcaccacctgccccaggtgctggacccagaggcctcaggtgacaggcgcacatatgcccggcccccaccctgggcacccccatgcagcctggctctgccaagtgcccaagagagaggagtcacagtgactggacctcagacccgagtcctggcagagagtgttgacggaggaggaggtggtaccttctgcacctcccctgcctgtcgaggcccccgaagacatcaccagggctacagaggtggggccggggttccaaacctggcccagagactggaggccctcagagaccagacttggcagctccctgcgacgtggccgcagccagccagcccttcagtgagggcgcacggagcccaggccaagtcctccctccccagttgaaggccaagctgggaacccacggagactgctgtgtgacctcagactgggctccacactcttgggctccagtctgcccatctgctgaatggagacagcagctgctactccacctgcagctgggctaggggcggggactgggggtggctatttaggggaccaagggattcaggag

SEQ ID NO: 239919 - DNA, 653 bp, Homo Sapiens
gtaccttttaaaaggtcagaactttccagccccccttataaaagttttaaaaattacactagcgttaatagcctactttagagtttatctccgtttctttgaaaattgggctttggcctaaacttgcacaaattctggggaaaccctttaaaaaaaaaaaataaaaacaaaaaactaatcacgccattttcttactttctaagtacttacactgttaaataaaataactgaggctgggcgcaatggctcgcacctataatcccagcactttgggaggccgaggtgggtggatcacctgaggtcaggagttcgggaccagcctggccaaacaatggtgaaaccctgtctctactaaaaataccaaaattagctgggcgtggtggtgcatgcctgtaatccccagctactcaggaggctgaggcaggagaattgcttgagcctgggaggccagaagttgtagtgagctaagatcgtgccactgccactcccagtcttgcgttgacaagagaccctctcttaaaaaaaaaaaagactgaaaaaaatttttttttggtacaagaatcaggtagatgattctcatttgggggttacatgaaaaaaagactcaaatctatttcattaaggggaatggcactattttgagtcataaaaat

SEQ ID NO: 239920 - DNA, 584 bp, Homo Sapiens
gagctgccgccgcagaagctgcaggccctccagcgagttctgcagagccgcttctgctccgctatccgagaggtgtatgagcagctttatgacacgctggacatcaccggcagcgccgagatccgagcccatgccacagccaaggccacagtggctgccttcacagccagcgagggccacgcacatcccagggtagtggagctacccaagacggatgagggcctaggcttcaacatcatgggtggcaaagagcaaaactcgcccatctacatctcccgggtcatcccagggggtgtggctgaccgccatggaggcctcaagcgtggggatcaactgttgtcggtgaacggtgtgagcgttgagggtgagcagcatgagaaggcggtggagctgctgaaggcggcccagggctcggtgaagctggttgtccgttacacaccgcgagtgctggaggagatggaggcccggttcgagaagatgcgctctgcccgccggcgccaacagcatcagagctactcgtccttggagtctcgaggttgaaaccacagatctggacgtaccacgtgcactctcttccctggtaa

SEQ ID NO: 239921 - DNA, 629 bp, Homo Sapiens
tgtacaggtattttcccattgttactcttagagacttttgtttcaaaaaggcaggctcattgttattttgttttatcttagaacattttagcagctctttgtcatgggttaaaaaaatctagaattaaaaaaatgtttaatatatgatttatataattttgacaagaatacaaattcttagtcgttcaaaattggaagcgctcttagaagtgtcaagctcagctttccattccacaaatgaagtaactggtaactgtgacttattatgttatacagtgacagttattatgttatacagtgtcagttatacagtgacaaccaggacaaaatcctagggttctagattccccttctggtgctctttttaccagatgatggcattactaacttgcctaccttgaggcctttgaaatcaccatgtctgataaatacatgcaattgctttggtgaatttgtttgttttattgcttgttgctttgagtgaatgcttcagtttgctctagattttactttcgtttgcttacaaaattaccatgcttttaacccccgagaaacatttaatgtttttgaaatgattttttcataacaatcttatgagtctattatataactagcgaagtattttggga

SEQ ID NO: 239922 - DNA, 606 bp, Homo Sapiens
cgcgtccgaaaaatgcctaaatgtgagcatgtcaatgaaaactaaagacaaatacttcactctttttcatactattataagttattctggtattaaatatgttaataaaagtgtttttgttttgacatatttcagttaaatgaatgaatgctggttgtattttatttgaatgagtcatgattcatgtttgccatctttttaaaaaaatcagcaaatttcttctatgttataaattatagatgacaaggcaatataggacaactattcacatgattttttttaataccaaaggcttggaagattttataattaacatgtcaagaagactttatagtaagcacatccttggtaatatctccaattgcaatgactttttaatttattttttcttttgctgctttaacattttctggatattaaaatccccccagtcctttaaaagaatcttgaacaatgctgagccggcagctgaaaatctaactcataatttatgttgtagagaaatagaattacctctattctttgttttgccatatgtaatcattttaataaaattaataactgccaggagttacttgacgagatttaaaatacagtagttcagcg

SEQ ID NO: 239923 - DNA, 661 bp, Homo Sapiens
ggtgcgacttccgcgggaaacgggaggccgggctgagcagggcacagctggctgtgccagctgcggagccgcgcgcgcgtgcggacgctggacggcaccgaggcgcccttttctgcgctgggctgacggcgcctggtgcccgccgtgcccctgagccagctgcacccccgcggcctgcgcagctgcgctgtcgtcatgtctgcaggcgcaatcctcaactcttccttgggcgaggaaatagattctcatgatgcggttttgagatttaactctgctcctacacgtggttatgagaaagatgttgggaataaaaccaccatacgcatcattaattcgcagattctgaccaaccccagccatcacttcattgacagttcactgtataaagacgtcattttggtggcctgggaccctgccccatattccgcaaatcttaacctgtggtacgaaaaaaccggattacaaccgtgttcactccatatattcagcatcgtcagagaaacccaaatcagccattttacattcttcatcctaaatttatatggcagctctgggatattatccaggagaacactaaagagaagattcaaccaaacccaccatcttctggtttcattggctcatttgtaaaaattggccataatatagccgcctgcagtga

SEQ ID NO: 239924 - DNA, 474 bp, Homo Sapiens
atgggccgcgttcgcaccaaaaccgtgaagaaggcggcccgggtcatcatagaaaagtactacacgcgcctgggcaacgacttccacacgaacaagcgcgtgtgcgaggagatcgccattatccccagcaaaaagctccgcaacaagatagcaggttatgtcacgcatctgatgaagcgaattcagagaggcccagtaagaggtatctccatcaagctgcaggaggaggagagagaaaggagagacaattatgttcctgaggtctcagccttggatcaggagattattgaagtagatcctgacactaaggaaatgctgaagcttttggacttcggcagtctgtccaaccttcaggtcactcagcctacagttgggatgaatttcaaaacgcctcggggacctgtttgattttttctgaagtcgctgtagtattttcaataatctgcacggtggcggggggggggtgtggggggg

SEQ ID NO: 239925 - DNA, 439 bp, Homo Sapiens
  misc_feature (20)..(20): n is a, c, g, or t
  misc_feature (46)..(46): n is a, c, g, or t
  misc_feature (82)..(82): n is a, c, g, or t
  misc_feature (98)..(98): n is a, c, g, or t
  misc_feature (389)..(389): n is a, c, g, or t
tgagaaggggggttttaacnctgtgtcaacccaggctggaagtgcnagtcggttcaatcccctgctcactggcagcctttgnacctccctgggctcanaacaatccctccccaccctcagcctcccaagttgctgggattttaggcacacactacccatgccccagctaattttgtattttttgtagaaatggggattcgccatgttgtccaagctggtcgcaaactcctagactcaagcaatccacctgcctcagcctcctaaagtgctaggattacaggtattacccctggggaaagaatcttttaggttaccttgcaatgggaaggatagaggccggttcagttatctgactacactcatccagcacaactacaggaaatttaagntcattcatgcatgggaatgggcaggctgcacaggtaactccaactactcg

SEQ ID NO: 239926 - DNA, 407 bp, Homo Sapiens
  misc_feature (6)..(6): n is a, c, g, or t
  misc_feature (11)..(11): n is a, c, g, or t
  misc_feature (54)..(54): n is a, c, g, or t
  misc_feature (62)..(62): n is a, c, g, or t
  misc_feature (67)..(67): n is a, c, g, or t
ccaggnccttnccagaccccttgattaacacccactcacctgacctccacaccnccgaatantcccngatccctagtgacaaaagttatagtatatttaagtccccaaaagttccatccatcattcctaagttcaaacctaagtaattccctagtaaggaatttcccaatgtgagaatgttatagcctccaagcctttcagaacctgttaagtaaaatccccagagtttaaaaaaaaaaaaaaatcagaatttttaacaagggtgccagttcaaagctggaaactaaaatttcatgaatataaatgtgcaccctcccacagaaaaaaatacgactgtcactgaaaaatattatctatgtaacgagaattgttcattaattttcaaatgtagatgacaggttatccct

SEQ ID NO: 239927 - DNA, 540 bp, Homo Sapiens
  misc_feature (35)..(35): n is a, c, g, or t
taaagtaactgttcatttgagttatttacagctanaaccacattatgtttttctggagcataatgtttgtgttttctagttatcgtaccaaagtaaacagtaatatctttagcttaagaacccaactgaaatgtttgtaaaatatagattgttttgtaatttggctctttttttttaatggtcctatgaatgcaactatagtgtttgcagtatttgtacagtgcatggggtgctttttctgggtgctgagaagggaggagaaatgatagggaagaggggatttggagtagccgaaggaaaaaatgtgcaatcagtgttgttgattccaccgaattctaagaattccattacatcttgatatctggtacaagctcaaagttaatcttaaattttggcttagggcatggccgtacttgctggctacttgggaggctaaagcaggaggatccttagagcctggaaggtcaaggctgctgtgagccatgaccgtgccactgcactccagcctgagtgacagagtgagaccctgtctttaaaaag

SEQ ID NO: 239928 - DNA, 539 bp, Homo Sapiens
ggagacctgattccctgtggtgatacctataaagaggatcgtagtgtgtttaaataaacacagtccagactcaaacggaggaagcccacatattctattatagatatataaataatcacacacacacttgctgtcaatgttttgagtcagtgcatttcaaggaacagccacaaaatacacacccctaagaaaaggcaagacttgaacgttctgaccaggtgcccctcttcttctttgccttctcttgtcctctttctcctatttcttaccctgtcctccacctgccttccattttgaagtgggatgttaatgaaatcaagttccagtaacccaaatcttgtttacaaaatattcgtggtatctgtgaacatgttaagagtaatttggatgtgggggtgggggtggagaaaggggaagtggtccagaaacaaaaagccccattgggcatgataagccgaggaggcattcttctaaagtagacttttgtgtaaaaagcaaaggttacatgtgagtattaataaagaagataataaataaaa

SEQ ID NO: 239929 - DNA, 428 bp, Homo Sapiens
tctatacagtattctcacttacttacaaactattaccaacagcatgcattttagtatggcagatacaagaaatttgtgtgatgttcccttagaaaccaaatgatattaaattggggaaatggttttaacccactctgcaagggatactttaaaatacaatttggcacctatagctcttgcattttaatattcttttaagctgctgtttggaagaaggcaccttataactagccattagcaccaaagcatcacgttggtatcaggattattttgatggagagaatgtcatcatttgcaaataaatcagttatctaacaaaatcagaatcccccaatatgtactcagaatgtactaccctgtatcttctttgtggaccttaatcattaggtaacattggccataataaaaaataataataagaatcacaa

SEQ ID NO: 239930 - DNA, 474 bp, Homo Sapiens
tcagattagaaaataaatatttgaaattccaagttagaataggaacctagatgttgacataataaaccagatgttcaagaacaattaggctgtcaagtccatgaagaagtctacagaaaagcaggcttgagttttgggatgaaatgattggggagtgtaaattgcagcaaaagagttccctgaatttgcaacctcttcccattaaacaatattgtaggaagaggggtgtttggtaagcaatttacctggtttcctgctccacggatgacaactttagtagaggctgaatcacaatcttctgaaaatgcagctgcatgtcctggcttcagtgctgtattgtaaagggcaagaatatcacctgaaatagacaagatgttaagatttacatttccgttgccttgagagttccctgttactcccacttctccctatggtgaccttttatagaagaccataaataaaccactacagccc

SEQ ID NO: 239931 - DNA, 463 bp, Homo Sapiens
ggttcttgcctcagaaaaccttccagtctctgagctctaaggagatcaccagccggctccgccagtggtccatgctgggcagaatcaaggcgcaggcgttcggctttgaccagacctttcagtcctatcggaaggatgatttcgttatggcttttttcaaagacccaaatgttattcccaatttgaagttactttcagattcttctggacaatggatcatattaggttttgctagtggaagactcagaaaaatatgaaatattcagccaaccagatagagaagagttcctgttttgtcttttcaaacatctttgccttggtggagccctttgtcaatatgaggatgtgattagcccatatctggaaacaacaaagcttatctataaggatctggtgaggtaatgttgctagatcacaatatgtaaatctctagttaatagaataaattatttgcttaaccttg

SEQ ID NO: 239932 - DNA, 498 bp, Homo Sapiens
  misc_feature (189)..(189): n is a, c, g, or t
gcaccagccacgcgcagcggctccgcggggtctcggccgggtccgcgctctgaaggatctcgagagccatggatggtgcaggcgggaccctcgagctgcagcatctccggtgacccggggttgccgaggaggtggagaccagcacaggtggtccggcccgggcgcctccgaatccgggggtggtcaagncggatccccaaggctgaggtcggcagtcccggggactcgcagctgttgagcctgtggagacgcggccccgtgaccgaggcacccttcagcaacccgggggcagcgttttccccctaccggaaatctgatgggcttatgacatcatggctggctgctgagcgatgaagtggatgccacaaagaaatccgacatatcagatagattctgaaatcggtttccctccagctgtagtaacaggcgtgaagtcaggagaatttgagctttgtttaaaaaataaataaataaataaataaaccataacaaagtctt

SEQ ID NO: 239933 - DNA, 576 bp, Homo Sapiens
cagcatgaagagaagagagaatcgcattcacagatcgatatggaagtccgagagacaccccctcagagtcgatggatgtcagcaacagaatgagaagctacaaacaagaaatgggaaaactcgaaacagattttaaaaggtcacggatcgcctacagtgacgaagtacggaatgagctcctgggggatgatgggaattcctcagagaaccagagggcacatctgctcgataacacagagaggctggaaaggtcatctcggagactagaggctggataccaaatagcagtggaaaccgagcaaattggtcaggagatgttggaaaaccttagtcatgacagagaaaagatacagcgagcacgtgaaagacttcgggaaacagatgctaatttgggaaaaagctccaggattctgacagggatgttgcgaagaatcatccagaaccgcatcctgctcgtcatcctagggatcatcgtggtcatcaccatcctgatggcgatcactttttctgtcagaagacactgatgtatctgctctcccttgataaacagcaacaacagcttgttctgagtaatta

SEQ ID NO: 239934 - DNA, 548 bp, Homo Sapiens
tgccacacaaggtgcacaggctggaagtcttttgtgaaattcccagttaaatatatacaactatgtgacttagtgcacaacacatttgtgaaataacctactcctatatactgacctgcctgtccacgaataattgtaaagggtttttgcatgtacagtttttacaagaattacagttttgtgaagttgtgtctaaattaaagcatttctttagaacaaatggccttaaattctcacggaattcctggaaatgattgtgaattgccttcaaataatagaaaagtgtatttatttgtgtgtgtgtgtgtgtcaaaaatgtaactgctttataatattttttccttacctatatattctatttaatacttggtttatttctactgtacattgttttctttgtcccaagttgacctagggtgacttttataagcatgaaactattttactggaaagaaaaatatatacatccacatatctaacagtatcaatgttatataactatgtaataattgttgatttttaattatgtattaaaatctttaaatcat

SEQ ID NO: 239935 - DNA, 462 bp, Homo Sapiens
agagggagtggaaggacagtggctgaggggcttcctgttgcagccttcagctggactcagggttggggtcactggaggaggaggtggcttcctgccccattgttctggactgcagtgtttcttgggaatacttactgtatgtggattttcagtaaccaacttggaaagctgtatttgttcccatgattcagcaaacaatgagtacctactgtgtgtagaagcagcaggacagcctgtcatcactgggaaagaggccagaagagccgtttggccagggtctccaatttaggctttcaacattatctctaaagaaggttatacattatgtcggctccactggctgatgggatcaaagaccctccttgtatatccttaaacctgtactctattaccaggccactgtgcctgtggagcactgtaagttcctaccttttaataaattttataattatcttgtgagca

SEQ ID NO: 239936 - DNA, 644 bp, Homo Sapiens
  misc_feature (46)..(46): n is a, c, g, or t
  misc_feature (116)..(116): n is a, c, g, or t
aaaagagacccatctcacccagagccatgtcatacaagcactaganagtttgggatttggctcttacatcagtgaagtaaaagaagtcttgcaagagtgtaaaacagtagcattanaaagaagaaaggccagttctcgtttggaaaaccttggcattcctgaagaagagttattgagacagcaacaagaattatttgcaaaagctagacagcaacaagcagaattggcccaacaggaatggcttcaaatgcagcaagctgcccaacaagcccagcttgctgctgcctcagccagtgcatctaatcaggcgggatcttctcaggatgaagaagatgatgatgatatctgaaattcaccagctgagtttctatttcttctataaatgtttttccctgcacaacaaaaacagtgaaagaaatgcttatctgtaattttgtatgcatcttggtggacttgtcattggtattctagagatgtctgctattaagtttcatctattgtgtgctatacatgtaaaaactgtctctttgaactattgaaaatttaaggttcagtataatatcaattttgaatttttaatggtgtttatgaaattttagatagcagcaagtccttcgtttgatcaataaacagtgttacagata

SEQ ID NO: 239937 - DNA, 512 bp, Homo Sapiens
ctcgctaccatacttggaccacgctcccagtgccaaagcccaggtgtcttcaggggttgtcatgatggctattaacttatgtgttgcttgccgcatcccaaaacgatttaaggtgactcacatcaaggtataagtgtttcatgagaacttctcaaggagagggaatagaatagatgatgtcaacaaagcagcccaatatcatctacctttatctgttcgcaaaatctacacccatgaggtcgctcatgcctgtaaccccagcactttgggaggccaaagtgggtggatcacctgaggccaagagttcgagaccagcctggccaacatggcaaaacctcatctgtactaaaaatataaaaattatccgggcacgatgacgcgtgcctgtaatgccagttgctcgggaggctgaggcacaagaactgcttgaacctgggaggtagaggttgtggcgaactgagatcgcaccactgcactccagcctgggcaagagagtgagactatttctcaaa

SEQ ID NO: 239938 - DNA, 387 bp, Homo Sapiens
ctacacttggcatgaggtcgcctgactctcacccctcatgggcagaggcagggcagctgcagggtgggagggacagttctggccctgaaaggggccttcaatggaaagttgtcttccctgctcagccccattcctgctgctctcttcagagctgtaagaactgggccaaatggtgcccacaccttccaagccaacctcagatgaactcagggtcaacagggaagctacttcccatgctaagctgagggttctgtctctggcaacctgaatcatccactcacacagaggctgagttaaattaaccccgcattcaatgagggccggccacctgcacagtcttgtgggggctgcaaaaatgcatgagacttggcctccaccctcactcat

SEQ ID NO: 239939 - DNA, 1000 bp, Homo Sapiens
ttttttttttttttttttttttttttttttttttgagactgagttttgctcttgttgctcaggctagagtgcagtggcacaatctcagcttactgcaacctccacctcccaagttcaagtgattctcctgcctcagcctcccgagcagctaggattacaggcacgtgacaccacgcccgactaatttacatatttttagtagtgatggggtttcaccatgttggccaggctggtctcgaactcctgacctcgggtgatccacccacctcggcctcccaaagtgctgggattacaggtgtaagccaccacgcccggccatgcattgtggttttcttaatgcccagctttgtatgaagtcctctaaagtcccctttgaggagtcgtcgaattacatttccattttctttcattaggaagctatgtctggcctgaaaaataaaaacaattttatggtttctcataaaggtgtaattttgcttcactcttattcacttattttcacgatggagagaatgaaattgtttccccacaggaatcatagtccattttttgcctttcatgttagtgatttttccccctcatagctccctaagaaaaactaaagcaatttgaaaagaaaaaaatgcaatcttataacaaagttggctttgtcttgataaatacaatgatggatgaccacaaccacttaagtccttttgggcaaatgaataattctctgactatatctgagaagtggaaacacatgaatttacattctggttcttcaaatatcttctccctttcccttcttacattgacctcacttgcctgaaattaatgaagcaaatccccaagggcagaggctagaaggtttgtgaggcttgaagcttatacgaggttcctctttaagaaaaacaatacaaacatatcttactttcacaattttttacaaaaacatatgaccacatgaacatactgcccaagtccctcctgggccttggcaaggcccgtgcaagagaga

SEQ ID NO: 239940 - DNA, 1000 bp, Homo Sapiens
ggtgtgccatatatttttattaaatcatagaaaacatttgtatacaaatcttttcactttgggaagactggaatattaaacagctgggtaactaaacagttgaaagatacatttcactttaaatagaaacaagttttaagttgtcacacttattaaaacaaaaaaagctgaaataattggtaacaggttgttggctttttaacctttagaccacagaaataatctctcttataaccctcaactttaagaatgttttttattacttacatcaaccacgaatttaaaagatagttaacttgaattctgaatacaaaatcaatgtccttgtacctacacaggcttttagaatgctgcaaatgctgaattttaggagatggtttcattccacaggactgactgaacttcctttctaccatggaaaatgtatgtaacagtgtggaatatatttccgaataagttaaatattaagacatacaatatggcaataatgtcctactttttttcctaccaagtaaattcaaaagttcatcctaatcttatacgtttataaaacggtgaagactgagggatccagtgatactgaaaatacacaacaaccatcagaaccacattatctacggcagaatatgtacaaatgttcctgccaaaatcatgcttgcattcattccacaggtgaccaaaaagaacagagtttgaagttcaccaaatgaaaacgagcagtgattttgacatttaggtcatcacttgttctgcttctgagcagagatccagaggtgacacagtgcaatatctgcactcacaccaaacaccacataagcacaaattaaatattgtcaaaatatttttaaattaaattgaagaccattatttaagtgcatgagatatttttcccctagcttcttgaatgcatgttacagaacaagaattaacaaggaacatgttagaggccaacccaatcctctgagaactccctggggtaacatatgagacctctggtgca

SEQ ID NO: 239941 - DNA, 1000 bp, Homo Sapiens
aatttataaagcagtttaattggctcacagttccttatagctggggaggcctcaggaagcttacaatcatggaggcagttcacgtgaagggggaagaaaggcacctttctcacagggtggtgagagagaggaagggggacggggaaagccctttataaaagcatcagatcggctgggcacagtggctcacgcgtgtaatcccagcactttgggaggccgaggcaggcagatcacaaggtcaggagttccagaccagcctaaccaacatggtgaaaccctttctctactaaaaatacacattagccgggcgtgatggcgcgcacctgtaatcccagctactcgggaggctgaggcaggagaatctcttgaacccgggaggcagaggttgcagtgaaccaagatcgcgccactgcactccagcctgagtgacagagtgatactccgttaaaaaaaaaaatcttgtgaactcactgtcacgagagcagcgttcaggaaaccacctccatgattcaattacctccacctggtcccgcccatgacacgtggggattattaaaattcaaggtgagatttgggtggggaaacagagccaaaccatatcagggggccaggccttcagcaggtggataagatgggaggagttctgaaatacacacccgggatgctccagaggccaaatcatagggcaggtcatcccaaggacagcagttaattcactgacatgccagcaaagggcaaaccgaatcggccccgcggagcccaggtaggggcgccgctcacctcctaaaatgccctcaaagaccccttagggcacagccatatgctgagacatgttggggtggacaagcaggtctcaagaagcttagaatgtcccctaggtggacgctaagggacaaggcccaccgaggaaggcagctgcagatgatggaatgccctcccaatggcgggaacaagcaaggcttccgcagctcaaaaggagaaacatgctttgcgctggagt

SEQ ID NO: 239942 - DNA, 891 bp, Homo Sapiens
ctttaaaaaagccaactttgtacaaaaaagttggggcagtggcagcaggcagtggcccaggcagaaatagctcccgcgcgattcactggagccttccccgggccctggtcccggctaccgggactcgcgcgtccggatctcaaaagcggcagaggccaccgaagggacaggaagcactttggtccagaccacactcccggcacagtgcggaaagagccggcgggagccactctgatcccggacgcctcagcgcccccttgggcttgggcttgccctcgggccggggaaggctgaccgcgatgccaggacgcgctcccctccgcaccgtcccgggcgccctgggtgcctggctgctgggcggcctctgggcctggaccctgtgcggcctgtgcagcctgggggcggtgggagccccgcgcccgtgccaggcgccgcagcagtgggaggggcgccaggttatgtaccagcaaagtagcgggcgcaacagccgcgccctgctctcctacgacgggctcaaccagcgcgtgcgggtgctggacgagaggaaggcgctgatcccctgcaagagattatttgaatatattttgctgtataaggatggagtgatgtttcagattgaccaagccaccaagcagtgctcaaagatgaccctgacacagccctgggatcctcttgacattcctcaaaactccacctttgaagaccagtactccattggggggcctcaggagcagatcaccgtccaggagtggtcggacagaaagtcagctagatcctatgaaacctggattggcatctatacagtcaaggattgctatcctgtccaggaaacctttaccataaactacagtgtgatattgtctacgcggttttttgacatccagctgggta

SEQ ID NO: 239943 - DNA, 1313 bp, Homo Sapiens
  misc_feature (266)..(330): n is a, c, g, or t
  misc_feature (568)..(576): n is a, c, g, or t
  misc_feature (912)..(925): n is a, c, g, or t
gtttgggctcctactcccactctcccaggcgcagggagaggacaaaaagcataagggactctgttcaacccagcaaaagtcagtttcccagtggagaggcaaagccccacccagaacataaacatgcatgggaccaaggttagtgcccagacaggacagacttgcacagaacaagagggcacagtgggatccatgcggcaattacaggagcttccagcactaacagaggagccttatcccaccttcatcacacagacttagatggnnnnnnnnnnnnnnnnnnnnnnnnnnnnnnnnnnnnnnnnnnnnnnnnnnnnnnnnnnnnnnnnngcagccacactcaaatctgctaaactcctacaacctcccccagcaggtcatttgacaattctgcatcttccgctctctggtgctggggctctggtcagaggcgagccaatgtcttatcattagagagatgtgggattaggtaaggggcagagtcatggcactgctcacacaccttcccgaaactggggtctattcagttttttgacaagatcaaaagcaattcttaactggtcattannnnnnnnnaaggtaattagaacactattgtttatacaatattgaaaaaatacaattttttattgtttgaactcaaatcaccacccagcactttaagcctaccctaaatagcacctacaataaatgtcatagcacaagcaaactgcaaagtcagcaggtaagcaagttagacagtgccagcagagagaccctccctcccccaaagcaatgagaagacagcgtgctaggtaagagtgaagtacaccattacatgttaaatagttaatactacccttccagcaagccacagatgctagatggataactcagtacggttaactaaccacagccctacatcactgcacnnnnnnnnnnnnnnaaagaaaaccttttgcttcatgcccgtaattaacataaagtaagtaaattctttgtctttttatttaggaaaataatcatgctaaaagcaagttgtactttatatagattttcaaacaaaagattgattgtgctttttgaataaaaaagatagggtatcttccaacctcactgacttaaaccttgtggaatacagcacttctaaactaaaaacacacgtcaaaaagaaaaattaaataatcccagtgggatgctcaaaaatcgtctttagaaggttttaggattggctaattctgctattatcttattggctgcggcaaaaaaagaacacagagctgctgtctaaaatttctccaaactcccctccgagttcagcaggcaacacccaa

SEQ ID NO: 239944 - DNA, 1645 bp, Homo Sapiens
  misc_feature (190)..(203): n is a, c, g, or t
  misc_feature (540)..(548): n is a, c, g, or t
  misc_feature (786)..(850): n is a, c, g, or t
ttggcaaggtttaagtcagtgaggttggaagataccctatcttttttattcaaaaagcacaatcaatcttttgtttgaaaatctatataaagtacaacttgcttttagcatgattattttcctaaataaaaagacaaagaatttacttactttatgttaattacgggcatgaagcaaaaggttttctttnnnnnnnnnnnnnngtgcagtgatgtagggctgtggttagttaaccgtactgagttatccatctagcatctgtggcttgctggaagggtagtattaactatttaacatgtaatggtgtacttcactcttacctagcacgctgtcttctcattgctttgggggagggagggtctctctgctggcactgtctaacttgcttacctgctgaccttgcagtttgcttgtgctatgacatttattgtaggtgctatttagggtaggcttaaagtgctgggtggtgatttgagttcaaacaataaaaaattgtatttttttcaatattgtataaacaatagtgttctaattaccttnnnnnnnnntaatgaccagttaagaattgcttttgatcttgtcaaaaaactgaatagaccccagtttcgggaaggtgtgtgagcagtgccatgactctgccccttacctaatcccacatctctctaatgataagacattggctcgcctctgaccagagccccagcaccagagagcggaagatgcagaattgtcaaatgacctgctgggggaggttgtaggagtttagcagatttgagtgtggctgcnnnnnnnnnnnnnnnnnnnnnnnnnnnnnnnnnnnnnnnnnnnnnnnnnnnnnnnnnnnnnnnnnccatctaagtctgtgtgatgaaggtgggataaggctcctctgttagtgctggaagctcctgtaattgccgcatggatcccactgtgccctcttgttctgtgcaagtctgtcctgtctgggcactaaccttggtcccatgcatgtttatgttctgggtggggctttgcctctccactgggaaactgacttttgctgggttgaacagagtcccttatgctttttgtcctctccctgcgcctgggagaggtgggagtaggagcccaaacacacaggtacagaaagatctggaagaaggcctggcagtgaatccaaggactctgggcccccaacaatagatggtagcgtaagtctggagcagcggtgtttcaccaccaaatgcctttccaggctgcccttccaacactcaggagagcatccagatccctgggcagaggctctacattcttggctttagaggtggtggcagcggcagcaggtcagagccacttctggcggtttccctcccctttttagtgcccatagtttttggatcctcccttgagttttaccagcacaagccattctttgcccctgttcacataactgagctcaagctcttgccaaacaccaacaagcaagatggttgcaacctggcaacattgaatccaccacccttgggctccctctggaagccccagcaccggggggcttttgggcacagggtcagtggtagccatcttagacactgacatttggctttgtcgtcaatttcatcaccctccttgaggttactgtgcagtttcaccagcattttat

SEQ ID NO: 239945 - DNA, 1417 bp, Homo Sapiens
  misc_feature (90)..(103): n is a, c, g, or t
  misc_feature (439)..(447): n is a, c, g, or t
  misc_feature (671)..(749): n is a, c, g, or t
actttgtacaaaaaagttggctaaataaaaacgacaaagaatttacttactttatgttaattacgggcatgaagcaaaaggttttctttnnnnnnnnnnnnnngtgcagtgatgtagggctgtggttagttaaccgtactgagttatccatctagcatctgtggcttgctggaagggtagtattaactatttaacatgtaatggtgtacttcactcttacctagcacgctgtcttctcattgctttgggggagggagggtctctctgctggcactgtctaacttgcttacctgctgactttgcagtttgcttgtgctatgacatttattgtaggtgctatttagggtaggcttaaagtgctgggtggtgatttgagttcaaacaataaaaaattgtattttttcaatattgtataaacaatagtgttctaattaccttnnnnnnnnntaatgaccagttaagaattgcttttgatcttgtcaaaaaactgaatagaccccagtttcgggaaggtgtgtgagcagtgccatgactctgccccttacctaatcccacatctctctaatgataagacattggctcgcctctgaccagagccccagcaccagagagcggaagatgcagaattgtcaaatgacctgctgggggaggttgtaggagtttagcagatnnnnnnnnnnnnnnnnnnnnnnnnnnnnnnnnnnnnnnnnnnnnnnnnnnnnnnnnnnnnnnnnnnnnnnnnnnnnnnnccatctaagtctgtgtgatgaaggtgggataaggctcctctgttagtgctggaagctcctgtaattgccgcatggatcccactgtgccctcttgttctgtgcaagtctgtcctgtctgggcactaaccttggtcccatgcatgtttatgttctgggtggggctttgcctctccactgggaaactgacttttgctgggttgaacagagtcccttatgctttttgtcctctccctgcgcctgggagaggtgggagtaggagcccaaacacacaggtacagaaagatctggaagaaggcctggcagtgaatccaaggactctgggcccccaacaatagatggtagcgtaagtctggagcagcggtgtttcaccaccaaatgcctttccaggctgcccttccaacactcaggagagcatccagatccctgggcagaactctacattcttggctttagaggtggtggcagcggcagcagtcagagccacttctggcggtttccctcccctttttagtgcccatagttttggatcctccctttgagttttaccagcacaagccattctttgcccctgttcacataactgagctcaagctccttgccaacaccaacaagcaagatggttgcaacctgccaccattgaatccaccacccttgggctccctctggaa

SEQ ID NO: 239946 - DNA, 1169 bp, Homo Sapiens
ttgcgctaaaacaccagtgggcgtggcacaggcacagagttccgagtggccttgaggtgacccaagagccttagggtctgcgctgtcacatcgtgcatctccacgacatcgggccgagccaccagctgcttgagttcagccacagtgaagcggttcattcggcgcaacttcttcttggacagcttgggggcttctggcttcttttcctgctcgtcatcactgctgtcatcatcactgtccttgtgctcctcttcaaatcccttcttcttgggggctgcagagttctccagtttgtcaagtttctctggctctttctctttctccttcttaaaagcctcaaagatcctcttaaagaagataaagttgggctcgtaaatttcaggttcttcagtcacatactcaatctcaacatcagctgctggggaatcagagccacgggaccgggttgagtctttctcccggtccccagagctctcagaggacacccctcgcacccgctggggctttttcttcttctttcggttcctacgcttccggtttttctgtcaagaggaggaaaaccagctgggtcagggaatccaagcactgtgccagcaccccaacccctaaactcctcccccattctcccccacagttcaacagtcaggcttttcccaaggaggccatctcatgaagtagctgcgaaggggccttggagtcagactccaaagttctgccactcacaagctgtatgcctttgggtaaattactgtgcgtctcagaacctctgctttttcagctgtaaaatgtaggcacgtatagtacttggaactcaaagcaattaaatgaaaaatatctataagatgctgagggcggaaattggcacaaaatagaagctattacttactgaactcttacaaattgtgttatttccgtacccaagtcccatctcctggctttccttccacactcagctccaatccctacctcctttttagatacggacactgtgtcctcctcagtctctgacgctgactggcccagggacgagcgagcatctgtttccatttcctcttcctcctgctgagaattcatctcttcctggcggctctccttcagctgcaggatcttctccaaagcctgggggatcttggggcccacgggaggggtcccaacttttttgtacaaag

SEQ ID NO: 239947 - DNA, 1104 bp, Homo Sapiens
  misc_feature (244)..(264): n is a, c, g, or t
  misc_feature (883)..(891): n is a, c, g, or t
ttgggtaaggatgagggaagcgaagcaagaggaacctctcgccatgatcagacatacagctgcctacctaatgaggacttcaagccccaccacatagcatgcttcctttctctcctggctcggggtaaaaagtggctgcggtgtttggcaatgctaattcaatgccgcaacatatagttgaggccgaggataaagaaaagacattttaagtttgtagtaaaagtggtctctgctggggaagggnnnnnnnnnnnnnnnnnnnnnaataacaaggagatttcttagttcatatatcaagaagtcttgaagttgggtgtttccagagttggtaaaaacagcagctcatggaattttgagtattccatgagctgctcattacagttctttcctctttctgctctgccatcttcaggatattggttcttcccctcatagtaataagatggctgtggcatttccaaacatccaaaaaaagggaaggatttaaggaggtgaagtcgggtcaaaaataaaatatatatacatatatacattgcttagaacgttaaactattagagtatttcccttccaaagagggatgtttggaaaaaactctgaaggagaggaggaattagttgggatgccaatttcctctccactgctggacatgagatggagaggctgagggacaggatctataggcagcttctaagagcgaacttcacataggaagggatctgagaacacgttgccaggggcttgagaaggttactgagtgagttattgggagtcttaataaaataaactagatattaggtccattcattaattagttccagtttctccttgaaatgagtaaaaactagaaggcttctctccacagtgttgtgccccttcactcannnnnnnnngaggagaagggggtctctgttaacatctagcctaaagtatacaactgcctggggggcagggttaggaatctcttcactaccctgattcttgattcctggctctaccctgtctgtcccttttctttgaccagatctttctcttccctgaacgttttcttctttccctgggacaggcagcctcctttgtgtgtattcagaggcagtgatgacttg

SEQ ID NO: 239948 - DNA, 1298 bp, Homo Sapiens
  misc_feature (429)..(449): n is a, c, g, or t
  misc_feature (1068)..(1076): n is a, c, g, or t
ttggcttgagctgttgtgagctttgaagtaggtggcttgagctagagataaaacagaatcttctgggtagtcccctgttgattatcttcagcccaggcttttgctagatggaatggaaaagcaacttcatttgacacaaagcttctaaagcaggtaaattgtcgggggagagagttagcatgtatgaatgtaaggatgagggaagcgaagcaagaggaacctctcgccatgatcagacatacagctgcctacctaatgaggacttcaagccccaccacatagcatgcttcctttctctcctggctcggggtaaaaagtggctgcggtgtttggcaatgctaattcaatgccgcaacatatagttgaggccgaggataaagaaaagacattttaagtttgtagtaaaagtggtctctgctggggaagggnnnnnnnnnnnnnnnnnnnnnaataacaaggagatttcttagttcatatatcaagaagtcttgaagttgggtgtttccagagttggtaaaaacagcagctcatagaattttgagtattccatgagctgctcattacagttctttcctctttctgctctgccatcttcaggatattggttcttcccctcatagtaataagatggctgtggcatttccaaacatccaaaaaaagggaaggatttaaggaggtgaagtcgggtcaaaaataaaatatatatacatatatacattgcttagaacgttaaactattagagtatttcccttccaaagagggatgtttggaaaaaactctgaaggagaggaggaattagttgggatgccaatttcctctccactgctggacatgagatggagaggctgagggacaggatctataggcagcttctaagagcgaacttcacataggaagggatctgagaacacgttgccaggggcttgagaaggttactgagtgagttattgggagtcttaataaaataaactagatattaggtccattcattaattagttccagtttctccttgaaatgagtaaaaactagaaggcttctctccacagtgttgtgccccttcactcannnnnnnnngaggagaagggggtctctgttaacatctagcctaaagtatacaactgcctggggggcagggttaggaatctcttcactaccctgattcttgattcctggctctaccctgtctgtcccttttctttgaccagatctttctcttccctgaacgttttcttctttccctggacaggcagcctcctttgtgtgtattcagaggcagtgatgacttgctgtccaggc

SEQ ID NO: 239949 - DNA, 1277 bp, Homo Sapiens
  misc_feature (348)..(368): n is a, c, g, or t
  misc_feature (988)..(996): n is a, c, g, or t
ttggcttcagcccaggcttttgctagatggaatggaaaagcaacttcatttgacacaaagcttctaaagcaggtaaattgtcgggggagagagttagcatgtatgaatgtaaggatgagggaagcgaagcaagaggaacctctcgccatgatcagacatacagctgcctacctaatgaggacttcaagccccaccacatagcatgcttcctttctctcctggctcggggtaaaaagtggctgcggtgtttggcaatgctaattcaatgccgcaacatatagttgaggccgaggataaagaaaagacattttaagtttgtagtaaaagtggtctctgctggggaagggnnnnnnnnnnnnnnnnnnnnnaataacaaggagatttcttagttcatatatcaagaagtcttgaagttgggtgtttccagagttggtaaaaacagcagctcatggaattttgagtattccatgagctgctcattacagttctttcctctttctgctctgccatcttcaggatattggttcttcccctcatagtaataagatggctgtggcatttccaaacatccaaaaaaagggaaggatttaaggaggtgaagtcgggtcaaaaataaaatatatatacatatatacattgcttagaacgttaaactattagagtatttcccttccaaagagggatgtttggaaaaaaactctgaaggagaggaggaattagttgggatgccaatttcctctccactgctggacatgagatggagaggctgagggacaggatctataggcagcttctaagagcgaacttcacataggaagggatctgagaacacgttgccaggggcttgagaaggttactgagtgagttattgggagtcttaataaaataaactagatattaggtccattcattaattagttccagtttctccttgaaatgagtaaaaactagaaggcttctctccacagtgttgtgccccttcactcannnnnnnnngaggagaagggggtctctgttaacatctagcctaaagtatacaactgcctggggggcagggttaggaatctcttcactaccctgattcttgattcctggctctaccctgtctgtcccttttctttgaccagatctttctcttccctgaacgttttcttctttccctggacaggcagcctcctttgtgtgtattcagaggcagtgatgacttgctgtccaggcagctccctcctgcacacagaatgctcagggtcactgaaccactgcgttctcttttgaaa

SEQ ID NO: 239950 - DNA, 1507 bp, Homo Sapiens
  misc_feature (344)..(352): n is a, c, g, or t
  misc_feature (1186)..(1198): n is a, c, g, or t
ttgggttaaactattagagtatttcccttccaaagagggatgtttggaaaaaactctgaaggagaggaggaattagttgggatgccaatttcctctccactgctggacatgagatggagaggctgagggacaggatctataggcagcttctaagagcgaacttcacataggaagggatctgagaacacgttgccaggggcttgagaaggttactgagtgagttattgggagtcttaataaaataaactagatattaggtccattcattaattagttccagtttctccttgaaatgagtaaaaactagaaggcttctctccacagtgttgtgccccttcactcannnnnnnnngaggagaagggggtctctgttaacatctagcctaaagtatacaactgcctggggggcagggttaggaatctcttcactaccctgattcttgattcctggctctaccctgtctgtcccttttctttgaccagatctttctcttccctgaacgttttcttctttccctggacaggcagcctcctttgtgtgtattcagaggcagtgatgacttgctgtccaggcagctccctcctgcacacagaatgctcagggtcactgaaccactgcttctcttttgaaagtagagctagctgccactttcacgtggcctccgcagtgtctccacctacacccctgtgctcccctgccacactgatggctcaagacaaggctggcaaaccctcccagaaacatctctggcccagaaagcctctctctccctccctctctcatgaggcacagccaagccaagcgctcatgttgagccagtgggccagccacagagcaaaagagggtttattttcagtcccctctctctgggtcagaaccagagggcatgctgaatgccccctgcttacttggtgagggtgccccgcctgagtcagtgctctcagctggcagtgcaatgcttgtagaagtaggaggaaacagttctcactgggaagaagcaagggcaagaacccaagtgcctcacctcgaaaggaggccctgttccctggagtcagggtgaactgcaaagctttggctgagacctgggatttgagataccacaaaccctgctgaacacagtgtctgttcagcaaactaaccagcattccctacagcctagggcagacaatagtatagaagtctggnnnnnnnnnnnnncagaatttgagaaccttggaccactcctgtccctgtagctcagtcatcaaagcagaagtctggctttgctctattaagattggaaatgtacactaccaaacactcagtccactgttgagccccagtgctggaagggaggaaggcctttcttctgtgttaattgcgtagaggctacaggggttagcctggactaaaggcatccttgtcttttgagctattcacctcagtagaaaaggatctaaggaagatcactgtagtttagttctgttgacctgtgcacctacccttggaaatgtctgctggtatttc

SEQ ID NO: 239951 - DNA, 1137 bp, Homo Sapiens
  misc_feature (151)..(159): n is a, c, g, or t
  misc_feature (993)..(1005): n is a, c, g, or t
cttttttatctatagaacaactttgtacaaaaaagttggcttaataaaataaactagatattaggtccattcattaattagttccagtttctccttgaaatgagtaaaaactagaaggcttctctccacagtgttgtgccccttcactcannnnnnnnngaggagaagggggtctctgttaacatctagcctaaagtatacaactgcctggggggcagggttaggaatctcttcactaccctgattcttgattcctggctctaccctgtctgtcccttttctttgaccagatctttctcttccctgaacgttttcttctttccctggacaggcagcctcctttgtgtgtattcagaggcagtgatgacttgctgtccaggcagctccctcctgcacacagaatgctcagggtcactgaaccactgcttctcttttgaaagtagagctagctgccactttcacgtggcctccgcagtgtctccacctacacccctgtgctcccctgccacactgatggctcaagacaaggctggcaaaccctcccagaaacatctctggcccagaaagcctctctctccctccctctctcatgaggcacagccaagccaagcgctcatgttgagccagtgggccagccacagagcaaaagagggtttattttcagtcccctctctctgggtcagaaccagagggcatgctgaatgccccctgcttacttggtgagggtgccccgcctgagtcagtgctctcagctggcagtgcaatgcttgtagaagtaggaggaaacagttctcactgggaagaagcaagggcaagaacccaagtgcctcacctcgaaaggaggccctgttccctggagtcagggtgaactgcaaagctttggctgagacctgggatttgagataccacaaaccctgctgaacacagtgtctgttcagcaaactaaccagcattccctacagcctagggcagacaatagtatagaagtctggnnnnnnnnnnnnncagaatttgagaaccttggaccactcctgtccctgtagctcagtcatcaaagcagaagtctggctttgctctattaggattggaaatgtacactaccaaacactcagtccactgtttgagccccagtgctgg

SEQ ID NO: 239952 - DNA, 3247 bp, Homo Sapiens
  misc_feature (2313)..(2327): n is a, c, g, or t
  misc_feature (2716)..(2839): n is a, c, g, or t
caacatagttaaatcctacaatgtctgagcaatggttacaattccttaggtagtaagggaaatacctgttgaatggcagtttgtgttacatgggcgcttttcttatctttatcatttaatcattacccctcgggtacacaggacacacaaatttcatttttcagatttcactttaagaaaattaataaatacagcaaacattaacaacactgtgatgggacgatcatcagaactgtggtaactaatcagcaatagctctcaacctttgcacagcaaagttaggaaatttgactcgttaatcaatatgccatatgcctatctttaaaatacaaaaaaaactaagatttatacatcttagttcattagttttaaaaagcatcttcattttaaaagttggcccaattaattatagatttagtcttttcttgatgtcaacaaagtctttaaaccccacagcactgtaactatcttggcattaaaatagtttctatacactttctaaaaaaaatcatcttcagttacaaggctttacacttatctaaattgcctcccacttccatttacttgagttttagacatccaacttctaggggatactgttagaacaccaaaccatactaatcttcagattgaagaggggttttgtccattttcttaagatctgtggtcaagaataaaccctaaaaaaactgttcccattctcaacatcttaaaaaaatggtagttgtcatgacgtacctactaaagttacaaattctccttgagccagaattcattttaaatggatcagaattattaatgttggtgattaatggtgatttctatacagtagaaacttccatctaaatcagattgagtcatttgctcctcttaacaaaaaatctgatgttcgacacaattgcagcctatcactaaccctgctgttcgcttgcatgtatcttgtttttaaaaatcttgtttaaatcattctgaaagtaaaactagtttttcctcctttatatatagcaccgaatacttgcaatgtttgacaaaaccttttatcagcccattaacctatttataagcataaagtgagtatttttaaagggaaaaactttgccatcccttatacttatttaaaaggtactgctaagaggtattattagaaacaagatttaaaaatatgtaacaaaatcttaagttcttaagtgaaagccatttaactagtatttaaaacctctgcaattattagtttattagtatcatccaggactcagatgttcagtattcctcctgaaattacataaacaaatgcaaatggaaagaatccaagtctaaattatataacaaaacagcactccatcacaaaagcgtgtaaaattacaagaacgctattttaaaatactggcactttaagaaaacgataatctcgaaaaccacaaaattgccaaattgttccctaaactcctaagcagataaacatgactaatgaatgagtttgttttgtaaagaaaaatcattcaaataaattgaataattcatactgagatgcaaagtttgtcttctttcttcctatctacttggatttataaaggggcaaaccgtaatataggaaaatataccctattttgaatgtggcatctttgtttgaaaagctggcccaattaattaaaaatacttgtaatggaaagtctcgtttcctgagcagtccatatttagataaatgggaaaagacatctatagccagcattttcatagtcttcactgagactaatgtcaacaaaaaatttaatatggcagtcttgtattttaagctcacgcttttggggatacattctcaggtcttctttaatgtgggaactgcaaaatataactgccattacatggtaatgggagttaaagaatagagtcctcatgtaaaggttagaacatacttttctattagtccttcaaggacagactttcaaaatgtttgattctaataatcccatgctttgagtagattgattactcttcagtttgtaaatgtaagtgggctatgtgaaatttcttaactgatcaagattttggatgttcagttatggatgaaaactatctcaacttaactttacccccattatgatatgcagggtgtgtagacaaaagctttttattagctaactatatgaaaggataaacactgtaataattcatgtgattcaaaatgggcaaaagcaaaagactagcttcccctcaagaagaaaaatttcagacctatgaaaaggacaacaatactaataaaaaaaattgtatttacttagaagcattcagaatgtcaacaaaacagctgcaacnnnnnnnnnnnnnnngcaattacagagtggtattcagttaacagaacaacaattatttcgtataagctgcatcagagacaactgaagatgaaaaaactaccatccccatatataactaatttgtgctgcgcaccaacaagaacctgctttaaatttccatgccaatttacaacccccatactctaccaggcaaggttagtgactattgaaaataccaccaggacagggccatctaaagacacatttggtagtgtattaaccatacaaaaaacgacactgtacagtttaaaaacaaatcttacacagccttacatttcaatttttttctttaaaaggagtgagttgtgtacaggggcgttaaatgctttaagacaagaaaaaaaactgcgctagagccaacttannnnnnnnnnnnnnnnnnnnnnnnnnnnnnnnnnnnnnnnnnnnnnnnnnnnnnnnnnnnnnnnnnnnnnnnnnnnnnnnnnnnnnnnnnnnnnnnnnnnnnnnnnnnnnnnnnnnnnnnnnnngcctcaggctttcctttagcttgatatgcagcaatatccttttcgtatttttccttcagcttcgcagccttcttttcaccaggctgcttgtcatctgcagcagtgttattccacatctctcccagtttcttcgcaacatcaccaatggacaggccaggatgttctcctttgatttttgggtgatactcagagcagaacaggaagaaggccgaaggaggcctcttgggtgcattgggatccttgaacttcttttttgtctcccctttgggagggatataggttttcatttgtctttcataatgggtcttgtccgcctttgccatatcctcaaattttcctttctctttagcagacatggtcttccacctctctgagcacttcttagaaaactctgagaagttgacccaa

SEQ ID NO: 239953 - DNA, 1014 bp, Homo Sapiens
  misc_feature (848)..(865): n is a, c, g, or t
atatatagcatatgattagggaaatgtggagagatatatcccaacttcgctgataaaaacagagaggagccaagtagtctgctctcagagtacaaagactgatcctttgcccaggacttccccgccaggcagacaacagccctgggaagtaggacactgccagggctgcactggcagggaagccagaggctcagatgacacgcatgggctccatcacagagcagctcttcccccagagagaaaccagcatccttgggaatgactctggcttacgctgaaagactggaaagcgtgcacaagagcaaagtgacccaggggattggagaaccgaattactcacacaggtatctccggttaagcatatcaaacacacggccaggggtacccacgatgatgtggggagcttccatctgcagtttctgcacctcagcacgcacgttggtgcccccgatacaggcgtgacaggaggcgcccatgtagtctcctagtgccatgaccaccttctgtatctgagcagagagaggcaggtgctcatatgtcagttaccactgtgcccggcaccattcttaaatgtttttcatgtattgattcctaaccaacaactttggggcatgcactattattaaactcacattcagctgagaaacaggcagaggctaaaatccacttaagatcgtgctgtcaataggtggcaaagacaggatttcaactcagtctggttcctgagtgtacagtgattcacaatgaggccgctcagataattaattcagtttctttactctagatatttagaacccttaaccttctgaaaactaatttgaccaactgcctcatcacgcagcaaccannnnnnnnnnnnnnnnnngagacagagctttgctcgttgcccaggctggagtgctcatacttcgctgggggaatgcaaaatggcacagccactttaggaaacaatgcagcagtttcttatgaagttaaatatacattaatcatatgacccagaaatctcattcccaa

SEQ ID NO: 239954 - DNA, 850 bp, Homo Sapiens
ttggggcaccgcggccgcagtgaggagactcggccatgctacgcgcgctgagccgcctgggcgcggggaccccgtgcaggccccgggcccctctggtgctgccagcgcgcggccgcaagacccgccacgacccgctggccaaatccaagatcgagcgagtgaacatgccgcccgcggtggaccctgcggagttcttcgtgctgatggagcgttaccagcactaccgccagaccgtgcgcgccctcaggatggagttcgtgtccgaggtgcagaggaaggtgcacgaggcccgagccggggttctggcggagcgcaaggccctgaaggacgccgccgagcaccgcgagctgatggcctggaaccaggcggagaaccggcggctgcacgagctgcggatagcgaggctgcggcaggaggagcgggagcaggagcagcggcaggcgttggagcaggcccgcaaggccgaagaggtgcaggcctgggcgcagcgcaaggagcgggaagtgctgcagctgcaggaagaggtgaaaaacttcatcacccgagagaacctggaggcacgggtggaagcagcattggactcccggaagaactacaactgggccatcaccagagaggggctggtggtcaggccacaacgcagggactcctaggggctcagtaaggacagtgcccgccagggaccatgtatgtatcatggcggaagagttggccctgacctggaataaagcagttggtgttgcttatgaggaaggttcagccttatccagcacagccttcacgttttgccctctgctgtcaccacttggtcagaaacttccaaacgcagtgccctgttctgccggtgtgt

SEQ ID NO: 239955 - DNA, 1481 bp, Homo Sapiens
  misc_feature (413)..(430): n is a, c, g, or t
caacttaaaaggttatttattaaacaagttaaacacaactaaaagtatatttagaggtccaagattcaagtatttttgtcaaactttctaatgataaaggggaatgataaaaattgaacagatataaaaaatattcttaaacaaatattaaagcacatggaaaattcagaaataaaaacacaccaccatataaagaaatcaaaatatttcatatgtttttaaatgcttatggtatgagagccaaattgtctatttccaggttaataaacaatatataagctcacctttttaaaggtatcatactttgtgtcatatagaaataattttggaaacagtatgtgttgggtgtgtaaattgtccacattaagcaaaacatattttacatatgaatattttcatttatacttactggnnnnnnnnnnnnnnnnnnttataatttaaacatcttgatttgaaaataattttggatttgatagttctgctaaattccaacatcgtaaccgccgaatgtgttatcaaaagatagttattcaaaatttttttaaaaaagaattgcttccccaaatctcagtattttagagcaaaaggaaaaataacatattctttgttcataaattctgatgcttagtttctacgttaatacaaaaatggtgcaataaggaagagtactgtagaaaagccactgtcttttcagtagttccaaatggtgttatacaatatttcactggagatagtggttgcaccacagatttggcagttgcttctgtgtaaatcataactttgccccataacatccaccaaaggctttcaaacataattgactttggcggtacacatggagaccatgatgcgaacggggactgccagtggatatgagggcttttatgaaagggagtttgctctgtgtgtgtgttttggggaggaaacagcggatgaaatagtttatccagaactacaaaacacattttcctaattagatcccaactgtataaataacataaatcaaatgcttagaacttaaatgaattcagaatttctgtaggagaggcgaatcctttcccccctcccttttataattcttcacagaggacaaagctttagttacatacattcttctggacatgaaaggaaaggtctttttgtccccttctcagtctgaaagggaaggagaacgaatagacctgccactggcagggctggagaaagtgaaaggctccttgtccttttctttactgtcatgcttatgcttgtgtttgtgcttatgtttatgcttcttcttctttttcttgtgctcatggtgatggtggtgatggtggtcactgtgtttggaggctgtagattccttagtaaagactgagagtggagcgcttgccgctggatgcatactcatctccaaaggtgcttgttctttaccttcaagattaaaaatacccaaatgaattcctgctgatgatacggaaagccagactaaagaaagccaa

SEQ ID NO: 239956 - DNA, 1048 bp, Homo Sapiens
tacaaaaaagttggtttgtggttcaccctgggtcgcacgctggatcccaggccccttccttgaaaagcagaggccttgtaccccccagggttgccgggcgggacagtgattccagcccttcaggtcttctccactggcccctgagattgccatcacctccagctcctcctctcctgaagttggcagcccctcctgggttccagcctcctgagatgccagacccactggggcagtacccacaggccctgagcctacatcaaccaccccagtgacaccccaagcctgcagcattttccacccccagccccctggtcccaccttgccttccgcccaccttcccacctgctgcagggagggccctcggctgagccttcagacacacttgcaccccatccgctcccctcctgaatttcttctgaccctcccttggcttcacagcacctgaaggccaggctgaggccccctgctctcatggccagccctggaaagcctggggctgatgaggcccaggaggaggagggggaactcgaggggggctctgcagggccgcgggctgcaatactggagcaggctgaggagctgtttctgctgtgtgacaaggaggctaagggcttcatcaccaagcacgacctgcagggtctccagagcgacctgcccctcacgccagagcagctggaggctgtgtttgaaagtctggaccgggctcacactggcttcctcaccgccagggagttctgcctgggcctgggtgagcctgtggcctgcctatcccccactgcccagagctggaggcctgatcaggaggcctggcacttgtggcgccctgagggctgccggtgcctctcgtcctcctccctccagggcccgtgctttgtctgcacgcactcgcgcctgggggctcctagctgcggtggagtgtgtggagctgaccttcctggcccccagctcctctcctgtgctaagctccgggatgtttgtgggggtggcgtcagcacatggagcgaacccctgcaggactcccgaggagaactttgagtcgggcgggctc

SEQ ID NO: 239957 - DNA, 1546 bp, Homo Sapiens
  misc_feature (317)..(426): n is a, c, g, or t
  misc_feature (1294)..(1334): n is a, c, g, or t
ttggcgcggacactgctaggcagacggcgagtaccgagcgcgggtggccgcggtgtccgtgggccacgctcagctgcggtcagaggcgacatgagtgccgcggggctgctggccccggccccggcccaggctggagcgccgccggcccccgagtactaccccgaggaggatgaagagctggagagcgccgaggacgacgagcgcagctgtcggggccgcgagtcggacgaagacactgaggatgctagtgaaactgacctggcaaagcatgatgaagaagactatgtagaaatgaaggaacaagccttgctctttcnnnnnnnnnnnnnnnnnnnnnnnnnnnnnnnnnnnnnnnnnnnnnnnnnnnnnnnnnnnnnnnnnnnnnnnnnnnnnnnnnnnnnnnnnnnnnnnnnnnnnnnnnnnnnnacagccgaacagattcagagaaacgaaaacctcactcacttttagcgtacacccagatggaaaacggatgtatcaggacaaactggcttctctcaagaggcagttgcaacaactgcaagaaggtacattacaggaatatcagaagagaatgaaaaaactagatcagcagtacaaagagaggatacggaatgcagaactcttcctccagctggaaactgaacaagtggaacgaaattacattaaagaaaagaaggcagcagtgaaagaatttgaagacaagaaggttgagctgaaagagaacctgattgctgagctagaagaaaagaagaaaatgattgaaaatgaaaagctgacaatggaactgactggagattctatggaggtgaaacctatcatgaccagaaagttgcggaggcgaccaaatgatcccgtccccatcccagacaagaggaggaaacctgctccagcccagctaaactatttgttaacagatgaacagatcatggaggatctgagaacattaaataagcttaagtcacccaagagaccagcatctccatcctctcctgagcacttgcctgcaacacccgcggaatctccagcccagaggttcgaagctcggatagaagatggcaaactgtactatgacaaaagatggtaccacaagagccaggccatctatctggagtcaaaggacaaccagaaactgagctgcgtgatcagttctgtaggagccaatgagatctgggtgaggaagacaagtgacagcaccaagatgaggatctacctgggccagcttcagcgcgggctcttcgtgatccgccggcgctcagctgcttgactttctacagtgctcttctcttgaccnnnnnnnnnnnnnnnnnnnnnnnnnnnnnnnnnnnnnnnnnctccttaatagaaaaatgttaacttactgggaatagctactcagccttggaaatggagagcactgcagtgaattctttagggcacttttgtggccggatgcttccaactttgtcagtcttttctgcctcaacttcttccagacatcagtcaccatgagactgttttactttcaggcgtattgggggggtttgatttactttccttttatttc

SEQ ID NO: 239958 - DNA, 255 bp, Homo Sapiens
atacaaaaatcattaacccatacccccataggaacaactttatcaacaaaattataatgtctatgtacagttacttctgcctttagtttcacagcctctactcatttacaaaattacttaggttgccacgttttcttccaatcccttaagtaaggctgcattatacttttgtactaggcatattattttatcacattttacatctcatcctgggattcccccatacctcctgaaaatagtgtttttttaaattgt

SEQ ID NO: 239959 - DNA, 1288 bp, Homo Sapiens
  misc_feature (336)..(366): n is a, c, g, or t
  misc_feature (835)..(843): n is a, c, g, or t
ttggatgattagtaatgtaaaaattaacacagaaattaacctaaggaatgaagggtgggtttgtcaaaatatcaagtaaatttttgtttctaaagtacatttaatgtagatgacctaaagaatgcgttatccatcctatataaaagaaagataaaacacaggtcaccaattttctcatttcaccccatttaccttgtatagaggattgttcattcctttgggactaagttatagttatggtgagtgtgtatttactgtagttttgcctgatctcactcattgcacttcctggagttaaattttccaacagccatgttgaggaatagcactctgcannnnnnnnnnnnnnnnnnnnnnnnnnnnnnnaattgaagccctaaaccaggaattatttgtgttctaacaggaggatgaacttgctgaaaataaaactttgctatgtatttactcttttttaaaagacaaaagcaaaaccagactttctacgtactactccaaagactgtgattgtgactataatacatttttggtaatttttttatacctaatttgtataggaagtgctatttctcataggctgtttcttgaaattttaagtttattgttttaaaatggcagtgtttctcccactttgatatgctaacatttagtaagcactggctttatgaaagcggctttttataagtatactgcattttttgagcctatcattaattagcttagtatgaaagataagaaaatctccatgttgtatccatttggctcaggaagattctttgccttacctttcttagaactctttattgcttatcaaaagtttgagtacccgcttggnnnnnnnnnggtaattaaatattgtatgatttatctggttcaaggaagatgcactattcagttatctattgagaaattattttgcagtggttttagtgggtgaaaatgtcccatctgcaccagtacacaggcaggcattatcattcttcacctactttttaaatagtggcaacttgggattcattctggtgattctgaaccttgcctcatagcttaaagtataaaaaagattcaagagcagtgaggtttgttctttccagtgaatggtggactgagtggtgcgaggtggagggctaacaagaggaaagaactacattcttcagaatacagtgatgaaaattcattttgaaactcaaatattttcattttggatattctcctgtttttattaaaccagtgattacacctggccatccctctaaatgttctaggaaggcatgtctgttgtgatttt

SEQ ID NO: 239960 - DNA, 932 bp, Homo Sapiens
  misc_feature (69)..(78): n is a, c, g, or t
  misc_feature (264)..(277): n is a, c, g, or t
gacagatcatacaaaaaaatacttgttcccaaggaaggcaatctgtaaattataaatgcaaccctaagnnnnnnnnnntcctggtcacaaatcactcgctttcaaatattgatggagaaataaaaagtgtacgttgtgggtggagaaatgttggcatggaagagaggagaaaaggtatgaaatgaggaaagtgttatttgccacaggaaatattggattcagttgatttttaaaaatgaggtataacagtatgccagtaaatgnnnnnnnnnnnnnnttagaaaccaaaatgcacatttccaatggaaaaatctctaaacctcttatagttttattagacatttcatgtacagaagttaatctagaaaaatacattttaaaaatcttcaacagaccatgctccctgtaacaaaaccttccaaaccctgtgttttattatacaaagcaatctacattagtaggtaaaaagaaattctcaaatttagcaatgtcattttccatccaacatccatctaatttacagatgggtttccactattcatactggaattagaattctgtaataaattttttctaatgttttctgtacatattaaataacccaaaaggttcctcttgtagtgcatgtgccatttagcaagtctattcagtatttttccagtaccattctcattacagtgatttgcctgtaaatgtagttaatatctaaaagtgcacacagttaactttcccaaataacggactatttctggaggaaacctaatattcacagaaaagattaccaataacaatgattagaaatgtagggttagaatgtactctgagactatacaacacaattatatacacaagctaaaggacattaagtctttagcctatatttacataaaataatgtgtgtttccacagggtcataccaataactcagccaa

SEQ ID NO: 239961 - DNA, 1369 bp, Homo Sapiens
  misc_feature (1209)..(1257): n is a, c, g, or t
ttggcgtagcccgagtcggtcagcgccggaggacctcagcagccatgtcgaagccccatagtgaagccgggactgccttcattcagacccagcagctgcacgcagccatggctgacacattcctggagcacatgtgccgcctggacattgattcaccacccatcacagcccggaacactggcatcatctgtaccattggcccagcttcccgatcagtggagacgttgaaggagatgattaagtctggaatgaatgtggacttgcctgctgtgtcggagaaggacatccaggatctgaagtttggggtcgagcaggatgttgatatggtgtttgcgtcattcatccgcaaggcatctgatgtccatgaagttaggaaggtcctgggagagaagggaaagaacatcaagattatcagcaaaatcgagaatcatgagggggttcggaggtttgatgaaatcctggaggccagtgatgggatcatggtggctcgtggtgatctaggcattgagattcctgcagagaaggtcttccttgctcagaagatgatgattggacggtgcaaccgagctgggaagcctgtcatctgtgctactcagatgctggagagcatgatcaagaagccccgccccactcgggctgaaggcagtgatgtggccaatgcagtcctggatggagccgactgcatcatgctgtctggagaaacagccaaaggggactatcctctggaggctgtgcgcatgcagcacctgattgcccgtgaggcagaggctgccatctaccacttgcaattatttgaggaactccgccgcctggcgcccattaccagcgaccccacagaagccaccgccgtgggtgccgtggaggcctccttcaagtgctgcagtggggccataatcgtcctcaccaagtctggcaggtctgctcaccaggtggccagataccgcccacgtgcccccatcattgctgtgacccggaatccccagacagctcgtcaggcccacctgtaccgtggcatcttccctgtgctgtgcaaggacccagtccaggaggcctgggctgaggacgtggacctccgggtgaactttgccatgaatgttggcaaggcccgaggcttcttcaagaagggagatgtggtcattgtgctgaccggatggcgccctggctccggcttcaccaacaccatgcgtgttgttcctgtgccgtgatggnnnnnnnnnnnnnnnnnnnnnnnnnnnnnnnnnnnnnnnnnnnnnnnnnatccattagccagcaacgcttgtagaactcactctgggctgtaacgtggcactggtagttgggacaccagggaagaagatcaacgcctcactgaaacatggctgtgtttgca

SEQ ID NO: 239962 - DNA, 933 bp, Homo Sapiens
cttataaagccaactttgtacaaaaaagttggtcgtctttgcagcgtagcccgagtcggtcagcgccggaggacctcagcagccatgtcgaagccccatagtgaagccgggactgccttcattcagacccagcagctgcacgcagccatggctgacacattcctggagcacatgtgccgcctggacattgattcaccacccatcacagcccggaacactggcatcatctgtaccattggcccagcttcccgatcagtggagacgttgaaggagatgattaagtctggaatgaatgtggctcgtctgaacttctctcatggaactcatgagtaccatgcggagaccatcaagaatgtgcgcacagccacggaaagctttgcttctgaccccatcctctaccggcccgttgctgtggctctagacactaaaggacctgagatccgaactgggctcatcaagggcagcggcactgcagaggtggagctgaagaagggagccactctcaaaatcacgctggataacgcctacatggaaaagtgtgacgagaacatcctgtggctggactacaagaacatctgcaaggtggtggaagtgggcagcaagatctacgtggatgatgggcttatttctctccaggtgaagcagaaaggtgccgacttcctggtgacggaggtggaaaatggtggctccttgggcagcaagaagggtgtgaaccttcctggggctgctgtggacttgcctgctgtgtcggagaaggacatccaggatctgaagtttggggtcgagcaggatgttgatatggtgtttgcgtcattcatccgcaaggcatctgatgtccatgaagttaggaaggtcctgggagagaaggaaagaacatcaagattatcagcaaaatcgagaatcatgagggggttcggaggtttgatgaaatcc

SEQ ID NO: 239963 - DNA, 1062 bp, Homo Sapiens
ttttatgatctcagagtttacattttttgtaaaggacaagtagacagacagtgttttccatatatcataatgaatgtttcttagttgcaaaacacattgtttcattatggattttggaacccccacctaatgtgccatttttgcagagtaaatgacttacatgattttttcaatctttttgtaaaaaacattgccttatgatgaagggttattaaatgtcatataaagtttaacacaagtatcttcccagagttagccacccatttttgcagtcatacctatgtgcaatgtctgcctctgtaaaattatcactaagatcaatttgtgattcctttattgtacattgacgacaacaaagtagcactgacctaatgattctagaaatgttataataagtaattcagaaagaatatgccatcacccttattccacctcccaacctgattcagtgtcaatcctatgagatccttttaaaaaattaactaataaaagcttttatatttaagaactgcaagtgtttcaaaactatgctgttttgtgttgttatagttgtaacatatttctcaattttcctgtttttcttttagtttattgacaagactacctggtcggcctaaattcacattttcattcagtttttgggcatttgagatcaaagagtaagtatggtttctacagttacttcatttttctacttatctttttaaattttttctccaaattttgacttcttttatatgtatcatctatactcagcatgaagtccagttttttctattatatacatgttttcaattcgctgaaatcatataaaaagtaagcaatgaaactgtcaccatgaatagttttggctatatgacaccaagcaaattttttaaaaaagaaataacattcaaaacaacttatatattctgtttctgtctacttagcacattttcacatttctttccccccagaatataaggcatataatcatttataaaaccacattaatactagagtaaaatatagaactatagaaaaatctcactatgttggataatggggagaagtctgtgccaa

SEQ ID NO: 239964 - DNA, 664 bp, Homo Sapiens
gagaattcttctgtattttattgcactcaacatttaatagaagacatttacattatttttagaaaatccaccgatgttgcacaatggcacatatttgtaaagacaaggctcattaattcagatatttggaattcaaaaatatttaaagttaaccacagcataatgaatcctcaacgtccagagttctacaaaaatccagcaaaacttacttttgctcattcatcagttctatgtcactccttagtttccctaaaaaaatatggctttataaaaagtagcttctataattcacaaaatgaagagttttattataatttgagtatcatctctgtatcaccgacagcacagctttagaaaattattgcttttcttattatcttattatttcaggtttcattacacatcgagtacccatgcaggactcactacattgtataataactatgatctatagtgataaaaatatagaagtatctttgattttaatcctaaaagcagggggaaaaagtcaccttatcttaatgttaacaaaatcaagagctacccctaatatatcgatcaaaccacttcttatggctttgcttatagttgctcatggtcctttcaaaatgatgtggtagctacctttttttaggacaaaggattccaacttttttgtacaaag

SEQ ID NO: 239965 - DNA, 1222 bp, Homo Sapiens
gagcaatcgctttttctatttatagccaactttgtacaaaaaagttggcagcaatgcccacgagtctaagcagatgtactgcgtgttcaaccgcaacgaggatgcctgccgctatggcagtgccatcggggtgctggccttcctggcctcggccttcttcttggtggtcgacgcgtatttcccccagatcagcaacgccactgaccgcaagtacctggtcattggtgacctgctcttctcagggtgtgctggcctccctggcctaccagcgctacaaggctggcgtggacgacttcatccagaattacgttgaccccactccggaccccaacactgcctacgcctcctacccaggtgcatctgtggacaactaccaacagccacccttcacccagaacgcggagaccaccgagggctaccagccgccccctgtgtactgagcggcggttagcgtgggaagggggacagagagggccctcccctctgccctggactttcccatgagcctcctggaactgccagcccctctctttcacctgttccatcctgtgcagctgacacacagctaaggagcctcatagcctggcgggggctggcagagccacaccccaagtgcctgtgcccagagggcttcagtcagccgctcactcctccagggcacttttaggaaagggtttttagctagtgtttttcctcgcttttaatgacctcagccccgcctgcagtggctagaagccagcaggtgcccatgtgctactgacaagtgcctcagcttccccccggcccgggtcaggccgtgggagccgctattatctgcgttctctgccaaagactcgtgggggccatcacacctgccctgtgcagcggagccggaccaggctcttgtgtcctcactcaggtttgcttcccctgtgcccactgctgtatgatctgggggccaccaccctgtgccggtggcctctgggctgcctcccgtggtgtgagggcggggctggtgctcatggcacttcctccttgctcccacccctggcagcagggaagggctttgcctgacaacacccagctttatgtaaatattctgcagttgttacttagaagcctggggagggcaggggtgccccatggctcccagactctgtctgtgccgagtgtattataaaatcgtgggggagatgcccggcctgggatgctgtttggagacggaataaatgttttctcattc

SEQ ID NO: 239966 - DNA, 836 bp, Homo Sapiens
ccttataaaagccaactttgtacaaaaaagttggctctgcgcgtgtgcgttttccctcctccccgccctcagggtccacggccaccatggcgtattaggggcagcagtgcctgcggcagcattggcctttgcagcggcggcagcagcaccaggctctgcagcggcaacccccagcggcttaagccatggcgcttctcacggcattcagcagcagcgttgctgtaaccgacaaagacaccttcgaattaagcacattcctcgattccagcaaagcaccgcaacatgaccgaaatgagcttcctgagcagcgaggtgttggtgggggacttgatgtcccccttcgaccagtcgggtttgggggctgaagaaagcctaggtctcttagatgattacctggaggtggccaagcacttcaaacctcatgggttctccagcgacaaggctaaggcgggctcctccgaatggctggctgtggatgggttggtcagtccctccaacaacagcaaggaggatgccttctccgggacagattggatgttggagaaaatggatttgaaggagttcgacttggatgccctgttgggtatagatgacctggaaaccatgccagatgaccttctgaccacgttggatgacacttgtgatctctttgccccccctagtccaggagactaataagcagcccccccagacggtgaacccaattggccatctcccagaaagtttaacaaaacccgaccagggttgcccccttcaccttcttacaacctcttccccctttccccaggggtcctgtcctccactccagatcattccctttagtttaatagctgggg

SEQ ID NO: 239967 - DNA, 1243 bp, Homo Sapiens
actttgtacaaaaaagttggttcttcactgcgcacatagttgatgaccagtctttcccatatcagagcatcacttttcctgagttaagcaataaaggaagctattctttgtctcatgtttatacaccaaatgatgtccgtatggtgattgaatatgccagattacgaggaattcgagtcctgccagaatttgatacccctgggcatacactatcttggggaaaaggtcagaaagacctcctgactccatgttacagtagacaaaacaagttggactcttttggacctataaaccctactctgaatacaacatacagcttccttactacatttttcaaagaaattagtgaggtgtttccagatcaattcattcatttgggaggagatgaagtggaatttaaatgttgggaatcaaatccaaaaattcaagatttcatgaggcaaaaaggctttggcacagattttaagaaactagaatctttctacattcaaaaggttttggatattattgcaaccataaacaagggatccattgtctggcaggaggtttttgatgataaagcaaagcttgcgccgggcacaatagttgaagtatggaaagacagcgcatatcctgaggaactcagtagagtcacagcatctggcttccctgtaatcctttctgctccttggtacttagatttgattagctatggacaagattggaggaaatactataaagtggaacctcttgattttggcggtactcagaaacagaaacaacttttcattggtggagaagcttgtctatggggagaatatgtggatgcaactaacctcactccaagattatggcctcgggcaagtgctgttggtgagagactctggagttccaaagatgtcagagatatggatgacgcctatgacagactgacaaggcaccgctgcaggatggtcgagtaagaaatctattaagtccagtgtgatttttaaccttcttattcagtgttagtttcttttgctataaatagaaatgtatgttacttaacaaatagtaattagaagaaaccaggaattatttttttgtaagtaataatacctgtaaagatatattcagacttgtgactgttttatagatacaaaaaatgttggtgtaacttagaactccatcttgagttgctttaattttcttcccttattttcagtaatgctgtgatttagtgattctaatttaagtttctaagatgacatgaatatcaatctaa

SEQ ID NO: 239968 - DNA, 1074 bp, Homo Sapiens
tccagttagtctagtggggggcttaggcatcaaaggaattattacagtgccctgtggaaaatgctgaaaaaagaggaataaacgaccaactctcttgactgggcagggaggaggaaaaggaggaacacagtggatgtggcaacggggagaggccttcccggtggaggattccatgtgggaggggcctggcctgcacccagtgggctggctgctgggtggtggggcaggagtgggaggggaggcttgacctaagggaccaggtcacaaagggccttgcatgtcacgtggagtagggcttagccagattttaagcaaggcagcaatatcctagtttcctcggaggagaccagaaaaaaacatggcaagcaaatagtaacagcgccaaactcagtgcttaactgaggataagggctcacccttttgtggagctagataccagcgccatcttttttacaatttagacttcgctaagtgcctcaatacagggacttcttttaatcttaccaaccctgtgaagcaagcaagacaggtaacacctccctatcagcttcagagatggagaaacagagctttgagaagttaaatgcctcaaatttggaaccaaatgtagaaccccgccctctgaatccctgcctggtcctccctggtgaccacatcatcccttaaacgcaataggagagggcaactggctatggaactatggccaagtcccctccccattctgggccccctgtgctgcagctcagtgattttacagagattggctgggacgtgggccacaaattaagccagtcttctctgaggaatccatgagtgtggagggaggggtgtgctgctgccaggcgtgactctgcagccacgggcttctcaccttgacagacatgttgtggatatctaggcagaaggagatgcgctggtggaaggctagctggggctctcgggtggaatagatgtcaatcatctccttggattggacatagcccttctcgtggttgatgctggcctcaatgacaccatcccggatggcctgcaggcccccaaagaggaaagttcaccagcacacccagcttcttc

SEQ ID NO: 239969 - DNA, 1911 bp, Homo Sapiens
ggaaaatttaaaagttcggcggttatggttgaaaagcaatcaggccctaccatgtatggagtatgacttggtggggtgcatgaagtccttctcacatcacaggaatagtggtgttatttcgagcatgctgattattgttaacttgttgatttgcactgtgttcatattcttcgtagtctctccaataaataagaatgaagatccagcaagtatccggcggtcacagtccacgctcgcaccagcccattcagccactgcctcttgtgtccctgttcgagtaatgctggcaagacaacaggaagcagaagcagctcgagggacagttcactcactggagcatcactgtagagcatgacattgtatggaagaaaattaggcagcacactcttaattatacagtataggaagccaaagcatcaggaggacaatggagccaaagacaatcactgacaaaataaatcttcggagatgcatatatattggcaaatggatcatttcctgtactggattgaaatctggatcattcaaattccttagaaaccacaggacaccaggtcgaagtacctctctcagtagtagaatgaaggaggcaaagtagaagacatataccattcccactagccaatgcagaaacatggtagtacctggagccgactgaaagctcagttctcgatctttcagagtagcatcaaacatttccaaggaacagatatccagccaccaaccacaaatgagagggaatactccaatttctaccaccattaacaaagagaccttaacaacaatatagcagactcccagtaagcgacgagatctatgaaatttcacaagagttgccaagccatgacaaattatcagtgttattgctaaaagtatatacccaactatggttgtgattaggccttcaaaatgagatgcttggacctggaaataagaaaaaagtaaataaaatttaattttacaacatgttctacaccccggttttcccatattaaacaatctaaatgactaaaagagaattgttgagacaatttataaccaggaaacaactgtaaaatctgctttggatgacatctctgaaaaccaaattctctcactgactgttatatattactaaaaaatgaagaaaaattaaataacactttacccaaggagacaaaataacagtagagtgaattaaattttacaaaaacaagagcactgtaatacaacagcctgccctctactctcactctaaagcagatttgttaaaggctaaccactgaaagcaggaacacactgcccaagtcacccaccagctgggtaatatcctagccacctcatttcctaccactagaagtaactgttcaagtttcccttgctctgcaaatctgtcccattctcaacttatagaaagaattttgaaagtaacagtgcctgtcggtattttttgattcctgagtttcagatagcaagtggcaaaagtttggaaagtcaaaatttttcaaaacacttacctgaacctttcaagttcttgcattcaactagtgagaatcagaggtgtactaaatatgagaagacttcagaacgtgatctctcagatctcaaatatacaaactgagcatatgatcccagatagtcagcttttccataaaagactaaattgttctagggccccaacagagaagtaataatccttccaaaatttatttacctctggaaaatactgataaaatgtcaaaactaaagcactttagaaaacaatacaacccgtcattccaaaatattctaccctttttaaattgattgatatattgttacttttctaaattcagcagggggcacctggggaaagggaaagaagagaacatacaggttcttgagatggacagaaaatcagcctgtgggaaactttcccacggtatgccccaa

SEQ ID NO: 239970 - DNA, 338 bp, Homo Sapiens
  misc_feature (91)..(114): n is a, c, g, or t
tgacctgttccttgcacaaattgatgagcatgctcctaaaaaggacaactttgtacaaaaaagttgggtctatttttattaacaaagatannnnnnnnnnnnnnnnnnnnnnnngtggatggggacttgtgaatttttctaaaggtgctatttaacatgggaggaaagcgtgtgcggctccagcccagcccgctgctcactttccaccctctctccacctgcctctggcttctcaggcctctgctctccaacctctctcctctgaaaccctcctccacagctgcagcccatcctcccggctccctcctaatctgtcctgcttcctctggccccgggtt

SEQ ID NO: 239971 - DNA, 1070 bp, Homo Sapiens
ttggctccctgctgtccccactgctgctttcgtgcctcccatccttagggtcccgccggtcaagatggtcgccccggacccccaggcccacctggtgcccgtggtcaggctggtgtgatgggattccctggacctaaaggtgctgctggagagcccggcaaggctggagagcgaggtgttcccggaccccctggcgctgtcggtcctgctggcaaagatggagaggctggagctcagggaccccctggccctgctggtcccgctggcgagagaggtgaacaaggccctgctggctcccccggattccagggtctccctggtcctgctggtcctccaggtgaagcaggcaaacctggtgaacagggtgttcctggagaccttggcgcccctggcccctctggagcaagaggcgagagaggtttccctggcgagcgtggtgtgcaaggtccccctggtcctgctggtccccgaggggccaacggtgctcccggcaacgatggtgctaagggtgatgctggtgcccctggagctcccggtagccagggcgcccctggccttcagggaatgcctggtgaacgtggtgcagctggtcttccagggcctaagggtgacagaggtgatgctggtcccaaaggtgctgatggctctcctggcaaagatggcgtccgtggtctgaccggccccattggtcctcctggccctgctggtgcccctggtgacaagggtgaaagtggtcccagcggccctgctggtcccactggagctcgtggtgcccccggagaccgtggtgagcctggtccccccggccctgctggctttgctggcccccctggtgctgacggccaacctggtgctaaaggcgaacctggtgatgctggtgctaaaggcgatgctggtccccctggccctgccggacccgctggaccccctggccccattggtaatgttggtgctcctggagccaaaggtgctcgcggcagcgctggtccccctggtgctactggtttccctggtgctgctgggccgagtcggtcctcctggcccctctggaaatgctggaccccctggcc

SEQ ID NO: 239972 - DNA, 775 bp, Homo Sapiens
  misc_feature (536)..(573): n is a, c, g, or t
ttgtggagtttctcctcggggtcggagcaggaggcacgcggagtgtgaggccacgcatgagcggacgctaaccccctccccagccacaaagagtctacatgtctagggtctagacatgttcagctttgtggacctccggctcctgctcctcttagcggccaccgccctcctgacgcacggccaagaggaaggccaagtcgagggccaagacgaagacatcccaccaatcacctgcgtacagaacggcctcaggtaccatgaccgagacgtgtggaaacccgagccctgccggatctgcgtctgcgacaacggcaaggtgttgtgcgatgacgtgatctgtgacgagaccaagaactgccccggcgccgaagtccccgagggcgagtgctgtcccgtctgccccgacggctcagagtcacccaccgaccaagaaaccaccggcgtcgagggacccaagggagacactggcccccgaggcccaaggggacccgcaggcccccctggccgagatggcatccctggacagcctggacttnnnnnnnnnnnnnnnnnnnnnnnnnnnnnnnnnnnnnntggcctcggaggaaactttgctccccagctgtcttatggctatgatgagaaatcaaccggaggaatttccgtgcctggccccatgggtccctctggtcctcgtggtctcactggcccccctggtgcacctggtccccaaaggcttccaaggtccccctggtgagcctggcgagccctggagcttcaggtcccatggggtccc

SEQ ID NO: 239973 - DNA, 1340 bp, Homo Sapiens
  misc_feature (1107)..(1153): n is a, c, g, or t
ctttgtacaaaaaagttgggggcgtgatggtgggcatgggtcagaaggattcctatgtgggcgacgaggcccagagcaagagaggcatcctcaccctgaagtaccccatcgagcacggcatcgtcaccaactgggacgacatggagaaaatctggcaccacaccttctacaatgagctgcgtgttggctcccgaggagcaccccgtgctgctgaccgaggcccccctgaaccccaaggccaaccgcgagaagatgacccagatcatgtttgagaccttcaacaccccagccatgtacgttgctatccaggctgtgctatccctgtacgcctctggccgtaccactggcatcgtgatggactccggtgacggggtcacccacactgtgcccatctacgaggggtatgccctcccccatgccatcctgcgtctggacctggctggccgggacctgactgactacctcatgaagatcctcaccgagcgcggctacagcttcaccaccacggccgagcgggaaatcgtgcgtgacattaaggagaagctgtgctacgtcgccctggacttcgagcaagagatggccacggctgcttccagctcctccctggagaagagctacgagctgcctgacggccaggtcatcaccattggcaatgagcggttccgctgccctgaggcactcttccagccttccttcctgggcatggagtcctgtggcatccacgaaactaccttcaactccatcatgaagtgtgacgtggacatccgcaaagacctgtacgccaacacagtgctgtctggcggcaccaccatgtaccctggcattgccgacaggatgcagaaggagatcactgccctggcacccagcacaatgaagatcaagatcattgctcctcctgagcgcaagtactccgtgtggatcggcggctccatcctggcctcgctgtccaccttccagcagatgtggatcagcaagcaggagtatgacgagtccggcccctccatcgtccaccgcaaatgcttctaggcggactatgacttagttgcgttacaccctttcttgacaaaacctaacttgcgcagaaaacaagatgagattggcatggcnnnnnnnnnnnnnnnnnnnnnnnnnnnnnnnnnnnnnnnnnnnnnnnggcttgactcaggatttaaaaactggaacggtgaaagtgacagcagtcggttggagcgagcatcccccaaagttcacaatgtggccgaagactttgattgcacattgttgtttttttaatagtcattccaatatgagatgcgttgttacaggaagtcccttgccatcctaaaagcaccccacttctc

SEQ ID NO: 239974 - DNA, 1788 bp, Homo Sapiens
  misc_feature (1281)..(1320): n is a, c, g, or t
  misc_feature (1592)..(1638): n is a, c, g, or t
  misc_feature (1657)..(1683): n is a, c, g, or t
actttgtacaaaaaagttggctcgcctttcccgatccgccgcccgtccacacccgccgccagctcaccatggatgatgatatcgccgcgctcgtcgtcgacaacggctccggcatgtgcaaggccggcttcgcgggcgacgatgccccccgggccgtcttcccctccatcgtggggcgccccaggcaccagggcgtgatggtgggcatgggtcagaaggattcctatgtgggcgacgaggcccagagcaagagaggcatcctcaccctgaagtaccccatcgagcacggcatcgtcaccaactgggacgacatggagaaaatctggcaccacaccttctacaatgagctgcgtgtggctcccgaggagcaccccgtgctgctgaccgaggcccccctgaaccccaaggccaaccgcgagaagatgacccagatcatgtttgagaccttcaacaccccagccatgtacgttgctatccaggctgtgctatccctgtacgcctctggccgtaccactggcatcgtgatggactccggtgacggggtcacccacactgtgcccatctacgaggggtatgccctcccccatgccatcctgcgtctggacctggctggccgggacctgactgactacctcatgaagatcctcaccgagcgcggctacagcttcaccaccacggccgagcgggaaatcgtgcgtgacattaaggagaagctgtgctacgtcgccctggacttcgagcaagagatggccacggctgcttccagctcctccctggagaagagctacgagctgcctgacggccaggtcatcaccattggcaatgagcggttccgctgccctgaggcactcttccagccttccttcctgggcatggagtcctgtggcatccacgaaactaccttcaactccatcatgaagtgtgacgtggacatccgcaaagacctgtacgccaacacagtgctgtctggcggcaccaccatgtaccctggcattgccgacaggatgcagaaggagatcactgccctggcacccagcacaatgaagatcaagatcattgctcctcctgagcgcaagtactccgtgtggatcggcggctccatcctggcctcgctgtccaccttccagcagatgtggatcagcaagcaggagtatgacgagtccggcccctccatcgtccaccgcaaatgcttctaggcggactatgacttagttgcgttacaccctttcttgacaaaacctaacttgcgcagaaaacaagatgagattggcatggctttannnnnnnnnnnnnnnnnnnnnnnnnnnnnnnnnnnnnnnnggcttgactcaggatttaaaaactggaacggtgaaggtgacagcagtcggttggagcgagcatcccccaaagttcacaatgtggccgaggactttgattgcacattgttgtttttttaatagtcattccaaatatgagatgcgttgttacaggaagtcccttgccatcctaaaagccaccccacttctctctaaggagaatggcccagtcctctcccaagtccacacaggggaggtgatagcattgctttcgtgtaaattatgtaatgcaannnnnnnnnnnnnnnnnnnnnnnnnnnnnnnnnnnnnnnnnnnnnnngaatgatgagccttcgtgnnnnnnnnnnnnnnnnnnnnnnnnnnnaacttgaaatgtatgaaggcttttggtctccctgggagtgggtggaggcagccagggcttacctgtacactgacttgagaccagttgaataaaagtgcacacctt

SEQ ID NO: 239975 - DNA, 480 bp, Homo Sapiens
  misc_feature (283)..(329): n is a, c, g, or t
  misc_feature (348)..(374): n is a, c, g, or t
actttgtacaaaaaagttggcaggatttaaaaactggaacggtgaaggtgacagcagtcggttggagcgagcatcccccaaagttcacaatgtggccgaggactttgattgcacattgttgtttttttaatagtcattccaaatatgagatgcgttgttacaggaagtcccttgccatcctaaaagccaccccacttctctctaaggagaatggcccagtcctctcccaagtccacacaggggaggtgatagcattgctttcgtgtaaattatgtaatgcaannnnnnnnnnnnnnnnnnnnnnnnnnnnnnnnnnnnnnnnnnnnnnngaatgatgagccttcgtgnnnnnnnnnnnnnnnnnnnnnnnnnnnaacttgagatgtatgaaggcttttggtctccctgggagtgggtggaggcagccagggcttacctgtacactgacttgagaccagttgaataaaagtgcacacctta

SEQ ID NO: 239976 - DNA, 1364 bp, Homo Sapiens
  misc_feature (1041)..(1081): n is a, c, g, or t
ctttgtacaaaaaagttggctgaccctgaagtaccccattgagcatggcatcgtcaccaactgggacgacatggagaagatctggcaccacaccttctacaacgagctgcgcgtggccccggaggagcacccaatgctgctgaccgaggcccccctgaaccccgaggcccacagagagaatatgactcacattatgtttgagaccttcaacaccccggccatgtacgtggccatccaggccgtgctgtccctctacgcctctgggcgcaccactggcattgtcatggactctggagacggggtcacccacacggtgcccatctacgagggctacgccctcccccacgccatcctgcgtctggacctggctggccgggacctgaccgactacctcatgaagatcctcactgagcgaggctacagcttcaccaccacggccgagcgggaaatcgtgcgcgacatcaaggagaagctgtgctacgtcgccctggacttcgagcaggagatggccaccgccgcatcctcctcttctctggataagagctacgcagctgcccgatggccaggtcatcaccattggcaatgagcggttccggtgccctgaggcactcttccagccttccttcctgggcatggaatcctgtggcatccacgaaactaccttcaactccatcatgaagtgtgacgtggacatccgcaaagacctgtacgccaacacagtgctgtctggcggcaccaccatgtaccctggcattgccgacaggatgcagaaggagatcactgccctggcacccagcacaatgaagatcaagatcattgctcctcctgagcgcaagtactccgtgtggatcggcggctccatcctggcctcgctgtccaccttccagcagatgtggatcagcaagcaggagtatgacgagtccggcccctccatcgtccaccgcaaatgcttctaggcggactatgacttagttgcgttacaccctttcttgacaaaacctaacttgcgcagaaaacaagatgagattggcatggctttannnnnnnnnnnnnnnnnnnnnnnnnnnnnnnnnnnnnnnnnggcttgactcaggatttaaaaactggaacggtgaaggtgacagcagtcggttggagcgagcatcccccaaagttcacaatgtggcccaggactttgattgcacattgttgtttttttaatagtcattccaaatatgaaatgcgttgttacaggaagtcccttgccatcctaaaagccaccccacttctctctaaggagaatggcccagtcctctcccaagtccacacaggggaggtgatagcattgctttcgtgtaattatgtaatgcaaaattttttaaatc

SEQ ID NO: 239977 - DNA, 1394 bp, Homo Sapiens
  misc_feature (1081)..(1124): n is a, c, g, or t
agcaatgctttccttataaagccaactttgtacaaaaaagttgggacagagcaaaagaggaatcctgaccctgaagtacccgatagaacatggcatcatcaccaactgggacgacatggaaaagatctggccccactctttctacaatgagcttcgtgttgcccctgaagagcatcccaccctgctcacggaggcacccctgaaccccaaggccaaccgggagaaaatgactcaaattatgtttgagactttcaatgtcccagccatgtatgtggctatccaggcggtgctgtctctctatgcctctggacgcacaactggcatcgtgctggactctggagatggtgtcacccacaatgtccccatctatgagggctatgccttgccccatgccatcatgcgtctggatctggctggccgagatctcactgactacctcatgaagatcctgactgagcgtggctattccttcgttactactgctgagcgtgagattgtccgggacatcaaggagaaactgtgttatgtagctctggactttgaaaatgagatggccactgccgcatcctcatcctcccttgagaagagttactagttgcctgatgggcaagtgatcaccatcggaaatgaacgtttccgctgccctgaggcactcttccagccttccttcctgggcatggagtcctgtggcatccacgaaactaccttcaactccatcatgaagtgtgacgtggacatccgcaaagacctgtacgccaacacagtgctgtctggcggcaccaccatgtaccctggcattgccgacaggatgcagaaggagatcactgccctggcacccagcacaatgaagatcaagatcattgctcctcctgagcgcaagtactccgtgtggatcggcggctccatcctggcctcgctgtccaccttccagcagatgtggatcagcaagcaggagtatgacgagtccggcccctccatcgtccaccgcaaatgcttctaggcggactatgacttagttgcgttacaccctttcttgacaaaacctaacttgcgcagaaaacaagatgagattggcatggcnnnnnnnnnnnnnnnnnnnnnnnnnnnnnnnnnnnnnnnnnnnnggcttgactcaggatttaaaaactggaacggtgaaggtgacagcagtcggttggagcgagcatcccccaaagttcacaatgtggccgaagactttgattgcacattgttgtttttttaatagtcattccaaatatgagatgcgttgttacaggaagtcccttgccatcctaaaagccaccccacttctctctaaggagaatggcccagtcctctcccaagtccacacaggggaggtgatagcattgctttcgtgtaaattatgtaatgca

SEQ ID NO: 239978 - DNA, 616 bp, Homo Sapiens
  misc_feature (237)..(276): n is a, c, g, or t
ttggcaagatcattgctcctcctgagcgcaagtactccgtgtggatcggcggctccatcctggcctcgctgtccaccttccagcagatgtggatcagcaagcaggagtatgacgagtccggcccctccatcgtccaccgcaaatgcttctaggcggactatgacttagttgcgttacaccctttcttgacaaaacctaacttgcgcagaaaacaagatgagattggcatggctttannnnnnnnnnnnnnnnnnnnnnnnnnnnnnnnnnnnnnnnggcttgactcaggatttaaaaactggaacggtgaaggtgacagcagtcggttggagcgagcatcccccaaagttcacaatgtggccgaggactttgattgcacattgttgtttttttaatagtcattccaaatatgagatgcattgttacaggaagtcccttgccatcctaaaagccaccccacttctctctaaggagaatggcccagtcctctcccaagtccacacaggggaggtgatagcattgctttcgtgtaaattatgtaatgcaaaatttttttaatcttttcttatatactttttgaatttgtgttactttgaatgatgaggcctcgcgcccc

SEQ ID NO: 239979 - DNA, 1094 bp, Homo Sapiens
  misc_feature (162)..(223): n is a, c, g, or t
ttggctcgcactctgttcttccgccgctccgccgtcgcgtttctctgccggtgagcgccccgccccggggcctgagctggacgtcgcaggcctgcgccccccgaccccggctggccccgcttccagctgccgaggcctcgtcgcgccttccccgggaacaannnnnnnnnnnnnnnnnnnnnnnnnnnnnnnnnnnnnnnnnnnnnnnnnnnnnnnnnnnnnncccggccgcagtgcagacttccgagccgtggacgttacgtaaaaggcccggccttcggttccaggcggttgcgatcttggaggccacggccgctggggttggggcagggccgaggctgccccgcgggagggcattaggtggctgtggggaggggaccgtgttacagacgcgcccgcctgagtccatccttttccgggcaggtcgcaatggaagaagagatcgccgcgctggtcattgacaatggctccggcatgtgcaaagctggttttgctggggacgacgctccccgagccgtgtttccttccatcgtcgggcgccccagacaccagggcgtcatggtgggcatgggccagaaggactcctacgtgggcgacgaggcccagagcaagcgtggcatcctgaccctgaagtaccccattgagcatggcatcgtcaccaactgggacgacatggagaagatctggcaccacaccttctacaacgagctgcgcgtggccccggaggagcacccagtgctgctgaccgaggcccccctgaaccccaaggccaacagagagaagatgactcaggtgaggctcggccgacgcccgtgctcctcccgtcctttccccagtcattttctgcccggcttgatttctgacatttaagtgtttctttcgctgttccaggctctgttcctctcccggcatttcctccctgaagcctccaggtttctcatttggtttctgcctgcgttcttttcttttctccacacatcacactggcatgcagcatgttgtggcgtgtgagcatggggtggccgtgggtctctgtccctgactaagccgccccttgtcccttctcagattatgtttgagaccttcaacacccc

SEQ ID NO: 239980 - DNA, 897 bp, Homo Sapiens
ttggcaactctcgcactctgttcttccgccgctccgccgtcgcgtttctctgccggtgagcgccccgccccggggcctgagctggacgtcgcaggcctgcgccccccgaccccggctggccccgcttccagctgccgaggcctcgtcgcgccttccccgggaacaaaaggcggggtcgcaatggaagaagagatcgccgcgctggtcattgacaatggctccggcatgtgcaaagctggttttgctggggacgacgctccccgagccgtgtttccttccatcgtcgggcgccccagacaccagggcgtcatggtgggcatgggccagaaggactcctacgtgggcgacgaggcccagagcaagcgtggcatcctgaccctgaagtaccccattgagcatggcatcgtcaccaactgggacgacatggagaagatctggcaccacaccttctacaacgagctgcgcgtggccccggaggagcacccagtgctgctgaccgaggcccccctgaaccccaaggccaacagagagaagatgactcagattatgtttgagaccttcaacaccccggccatgtacgtggccatccaggccgtgctgtccctctacgcctctgggcgcaccactggcattgtcatggactctggagacggggtcacccacacggtgcccatctacgagggctacgccctcccccacgccatcctgcgtctggacctggctggccgggacctgaccgactacctcatgaagatcctcactgagcgaggctacagcttcaccaccacggccgagcgggaaatcgtgcgcgacatcaaggagaagctgtgctacgtcgccctggacttcgagcaggagatggccaccggccgcatccttcctcttctctggagaaga

SEQ ID NO: 239981 - DNA, 977 bp, Homo Sapiens
  misc_feature (601)..(641): n is a, c, g, or t
aattgatgagcaatgctttccttttaaatgccaactttgtacaaaaaagttggcttcgagcaagagatggccacggctgcttccagctcctccctggagaagagctacgagctgcctgacggccaggtcatcaccattggcaatgagcggttccgctgccctgaggcactcttccagccttccttcctgggcatggagtcctgtggcatccacgaaactaccttcaactccatcatgaagtgtgacgtggacatccgcaaagacctgtacgccaacacagtgctgtctggcggcaccaccatgtaccctggcattgccgacaggatgcagaaggagatcactgccctggcacccagcacaatgaagatcaagatcattgctcctcctgagcgcaagtactccgtgtggatcggcggctccatcctggcctcgctgtccaccttccagcagatgtggatcagcaagcaggagtatgacgagtccggcccctccatcgtccaccgcaaatgcttctaggcggactatgacttagttgcgttacaccctttcttgacaaaacctaacttgcgcagaaaacaagatgagattggcatggctttannnnnnnnnnnnnnnnnnnnnnnnnnnnnnnnnnnnnnnnnggcttgactcaggatttaaaaactggaacggtgaaggtgacagcagtcggttggagcgagcatcccccaaagttcacaatgtggccgaggactttgattgcacattgttgtttttttaatagtcattccaaatatgagatgcattgttacaggaagtcccttggcattctaaaagccaccccacttctctctaaggagaatggcccagtcctctcccaagtccacacaggggaggtgatagcattgctttcgtggaaaatatgtaatgcaaaattttttaatcttcgcccttataccttttttattttgtttattttgaaagatgagaccttcctg

SEQ ID NO: 239982 - DNA, 1274 bp, Homo Sapiens
  misc_feature (1056)..(1098): n is a, c, g, or t
tttgtacaaaaaagttgggcccagagcaagagaggcatcctcaccctgaagtaccccatcgagcacggcatcgtcaccaactgggacgacatggagaaaatctggcaccacaccttctacaatgagctgcgtgtggctcccgaggagcaccccgtgctgctgaccgaggcccccctgaaccccaaggccaaccgcgagaagatgacccagatcatgtttgagaccttcaacaccccagccatgtacgttgctatccaggctgtgctatccctgtacgcctctggccgtaccactggcatcgtgatggactccggtgacggggtcacccacactgtgcccatctacgaggggtatgccctcccccatgccatcctgcgtctggacctggctggccgggacctgactgactacctcatgaagatcctcaccgagcgcggctacagcttcaccaccacggccgagcgggaaatcgtgcgtgacattaaggagaagctgtgctacgtcgccctggacttcgagcaagagatggccacggctgcttccagctcctccctggagaagagctacgagctgcctgacggccaggtcatcaccattggcaatgagcggttccgctgccctgaggcactcttccagccttccttcctgggcatggagtcctgtggcatccacgaaactaccttcaactccatcatgaagtgtgacgtggacatccgcaaagacctgtacgccaacacagtgctgtctggcggcaccaccatgtaccctggcattgccgacaggatgcagaaggagatcactgccctggcacccagcacaatgaagatcaagatcattgctcctcctgagcgcaagtactccgtgtggatcggcggctccatcctggcctcgctgtccaccttccagcagatgtggatcagcaagcaggagtatgacgagtccggcccctccatcgtccaccgcaaatgcttctaggcggactatgacttagttgcgttacaccctttcttgacaaaacctaacttgcgcagaaaacaagatgagattggcatggcnnnnnnnnnnnnnnnnnnnnnnnnnnnnnnnnnnnnnnnnnnnggcttgactcaggatttaaaaactggaacggtgaaggtgacagcagtcggttggagcgagcatcccccaaagttcacaatgtggccgaggactttgattgcacattgttgtttttttaatagtcattccaaatatgagatgcattgttacaggaagtcccttgccatcctaaaagc

SEQ ID NO: 239983 - DNA, 887 bp, Homo Sapiens
  misc_feature (696)..(705): n is a, c, g, or t
actttgtacaaaaaagttggctacatagtaagtacagaacagtaaagttaaaacggatgtctccattgatctgccaaatcgttatagagagcaatttgtctggactagaaaatctgagttttacaccatactgttaagagtccttttgaattaaactagactaaaacaagtgtataactaaactaacaagattaaatatccagccagtacagtattttttaaggcaaataaagatgattagctcaccttgagataacaatcaggtaagatcataacaatgtctcatgatgtaaaaaatattaaagatatcaatactaagtgacagtatcactctaatataatatggatcagagcatttattttggggaggaaaacagtggtgattaccggcattttattaaacttaaaactttgtagaaagcaaacaaaattgttcttgggagaaaatcaacttttagattaaaaaaattttaagtatctaggagtatttaaatccttttcccataaataaaagtacagttttcttggtggcagaatgaaaatcagcaacttctagcatatagactatataatcagattgacagcatatagaatatattatcagacaagatgaggaggtataaaagttactattgctcataatgacttacaggctaaaattagttttaaaatactatattaaattctgaatgcaannnnnnnnnngttcccttgagaccaaaatttaagttaactgttgctggcagtctaagtgtaaatgttaacagcaggagaagttaagaaattgagcagttctgttgcatgatttcccaaatgaaatactgccttggctagagtttgaaaaactaattgagcctgtgcctggctagaaacagcgtttatttgaa

SEQ ID NO: 239984 - DNA, 1354 bp, Homo Sapiens
  misc_feature (307)..(362): n is a, c, g, or t
  misc_feature (552)..(646): n is a, c, g, or t
gctttttaaagtcagttgagtcatccttttctagccttgctgctgtaaggttttctttcttctaagtaactgtatgatccagagcgacccagcacggaatcatatcgatcaccagctgatgtagaactggtttcatatctagaaatggaatccgtctgagtttctttcttattggatccctcttctgtgtctgattgttgttcttgttcattttcatcactatcttgtgtccaaaatgaaactcctgtagatcttcttttctctcttggtcgtcgtcgttctctgattgatttaggttgtgatttannnnnnnnnnnnnnnnnnnnnnnnnnnnnnnnnnnnnnnnnnnnnnnnnnnnnnnngttattcctctggagtaagcagaagttatgcctacaagactatttggcctgtttagttgacttgaagcatacagtgaactgctcatagtagaaagtgaagaggatggagtggttgaacttgaagttgatactggcctataacgctggtaagtctcatcatacgttctggagtacttttgtttatattcannnnnnnnnnnnnnnnnnnnnnnnnnnnnnnnnnnnnnnnnnnnnnnnnnnnnnnnnnnnnnnnnnnnnnnnnnnnnnnnnnnnnnnnnnnnnnntctggttcgggtagaacgacttcttcctattgttttctcagcttcttgaagatcagttaatgtcactccctgtgttgatcttctagattgtcttgcttgtctagatcttgcttttctttgggattcagactcttcatccctaacaggagtgaggtatgatctgcgtctctccctgacctctgttgtggaggagacagtgccagcagtagttgtagtcagggttgtggtagaagctgcagcatttacaacagttggagcaacaggaatggtcactgccgtaggaacactgtccttttctttctcagtactatcctcagcccacaaacgatttgaggtactatagcatcataagcagcaacacaaaaaagagaaaaggaaaacagctaaacaatgaaagcactttctagcagctgaaaacacatgactacagggatggatttttttaaaacgcaaggtgagacatccttaaattatgaaccaaaaagctcacccagagttgtcaaagagagaaatttacattttaagcagtctaattcaaggaaagttcatagttcaggaacttaaaatttcccccagacatgcataattgcctcattttggaaccaatttttgtctgcaaataaatttaacaagataaatgaaaaaatccagagccccacaatcttctaaacaaaaacgcatgcacatacataagcacacagtagccaa

SEQ ID NO: 239985 - DNA, 1025 bp, Homo Sapiens
  misc_feature (807)..(815): n is a, c, g, or t
  misc_feature (818)..(875): n is a, c, g, or t
tattgtcaacagtgtttttatttatacctacaaaaagaaaacaagatgatggtatcaaaaggacaatttacaaactaagaatagtaacatagctttcagcatcctgtgcctgaacatcacacatctacaagtctttcaagtcttaatgcaacaggaatgtgtctggagaccagcaagaacatcaatagagagcactgatcccaagcaaaagccactaaccttttagatgagaagtccacacaacgaattgttagggaggattggggagaagcagcccattgcttaatacattggaaccctttccctaagttgagtttcaaccatgaatgcaataactagcataaaacgattcttctgctcatgttctgaagccaacagcagaacctgaattataagtgacagacatggaggcagaagagttaaactctgctagatttcagctgtgctcaggccataatagtttttgaggtttggaatttactgttattttatgattacaatgtcccaggtggaaaaagggaagcaagcaatccaaataaccacttgcttgcccagagacctttccctcaaacagatgctttcaagagctgcgagagagtagggcatcccttgtggtggtacctctatgtttaaagaaagaagaaaaaaacccagaatttggttgtagaaaacaatgcccacaacagactggccagtgcttagacaaatttggggttggggggaacactttggtttgaaagcacagagcagtttgccatgtttcttctgtgcctaccattctcccttggcctcaacttctgtaagatnnnnnnnnnacnnnnnnnnnnnnnnnnnnnnnnnnnnnnnnnnnnnnnnnnnnnnnnnnnnnnnnnnnntttacatgcatatatttcagcttatgctgaagacctacctgtatgttgcacattgaatcatactttcagaacccctcagaaaccatccctctctccctaaagaattttaaaaggaaaacccaattttttgtacaaagttgttctttaatg

SEQ ID NO: 239986 - DNA, 1477 bp, Homo Sapiens
  misc_feature (493)..(555): n is a, c, g, or t
  misc_feature (1206)..(1234): n is a, c, g, or t
tctatcaattgccaatagagtctaactctttttaggcagtaccaaatgatgacagctacatattttctaaagaaaagcagctacatttccaacctctcatccgaggcagaagttgaatccatcattttaacaagactcttacaatatggtcttagaggaggacattacattagttaataaatagtttataatgaatttaaaacaccagacttgctaaaatttcagcttttggcattcctcatgatcctttattagattaattatgtatacctttgtaatttaattatatggttaaagggagcattggaatttcataaaattttcatcctaatagtgatgtcaccatttttgatatttctgtggcttctcaatactcatttgatttttgtaaattattctcttgtcaaatcagtttcacaaccccattcatccagtcctacaggcttaacaacatttatttcatgtggaactaaaagtatataaaagatgactnnnnnnnnnnnnnnnnnnnnnnnnnnnnnnnnnnnnnnnnnnnnnnnnnnnnnnnnnnnnnnntcattaatctgagctacatataaaatgtctaatttccttttaaaatataaatatggcagtgctttatatcaaagatgtaaaatctatcaattgctttaagataataaacataaatgaaagtaagcaccaactatttacattaacaatttactctatttgttacttttccaaatgtttatataatatttaagcatcatatcaaaataaatattttaaaataaaatcacaggtaacaagctattaaatgtaatctacaaaagtgaaagaataacataaagagaaaatgaaaggtaattcttaataaagtaatactgatcatagacccttctgagagaattctaactcctgattatttacgcctactacttataagagaataatagtcaagaacttgaacctgatggaaactaaagcattttaagacaaagagagacaaggcagagaacagagtgggaatcattggctttaaaagagcataaggattcagaaaaaatattctacaaaggcatcaaaatcaactattgcaaactggcattgtataactttttaaattcagaagttataaatggtatgggtgcttaattatcaaatcacctgcaattttacttgtctgtcacaatggatacctagatatgaaggttttaagatttnnnnnnnnnnnnnnnnnnnnnnnnnnnnnctatcattattaaagtttctattgttctacagtcatctctatggctaagaaaacgccagttagtgaaacacgatggacatctacagaaatgaaacacaaatagagaagccctgaaatgttaccatttttcccacagcactggtatagactccctattcttcccataaagcactaacaaaagtgaaataatatgtgaaaatttcaggaaacacctaaaaattataaacatataaacaaagccaa

SEQ ID NO: 239987 - DNA, 3487 bp, Homo Sapiens
  misc_feature (156)..(169): n is a, c, g, or t
  misc_feature (196)..(252): n is a, c, g, or t
  misc_feature (3241)..(3270): n is a, c, g, or t
aaaatatcatggtaatataaaagccattaaaaattggaactggtattgtgaaattacatcaaggtatcagattttatataaatgaacaataaaattcaaatttttatttatttaaacgtagttaaacattgggagacaatctccccatggggaagnnnnnnnnnnnnnnccttgaataataaagcaacaaaagccnnnnnnnnnnnnnnnnnnnnnnnnnnnnnnnnnnnnnnnnnnnnnnnnnnnnnnnnngggtttaacaattaagtcaaatgttcaatatgtgctaattaaatttcattttaaaaatgatctttggatgattacatttccaactatgttttcctataatgacatttaatgttagtttttgaaaagttagaaaagaaaccaatttatatgaagattgccaaattttgcaatttgaacactattttaaactttgaatgtccttaaagtctttaaacttactttctaaaataaataattgttggaataaaccaaaagacatttcacatatttgcactgcatacgataaaaatgatgtgatctacataaataaatttaaaacattaagttatttcatataaacatttttaattacagcgttatatcaatggcttacacagttgaaatctgagcactttaaaacaggattcacatgttaaactgctgagcacatttatagaactgatgtacatcatataatcctttaaacagcaagctctggtgttatacctcagtttcagaaagcatttttctttcaacagaattttgaacctgcctttgtgaaagaaaaaaattagaaagctatattatacccacacagaaaatttaagtacgtggaagaaataaacttttttggatgaagaaaacaagttaattttgagtggtaaacaaatctggtttacaaatacatgcattagcacataaaatatttcgtcctagacatctttacagaagacttggcaaatatgaacaatgggatgccacagctttttaaaacaacttttaacagatataagatcagtatcattcacattcacacaaacatacacacactttagaaagactgtgtgcttggcttcggcatatttaatatcattaaagaatatatagaatcatccttttatcataaggaatttacatcattgttttctcaaaagctgctattttagattgaaacagcattcagaaaaaaagtacatttcagatggtcagcatcaggatttactacagactttgtaaacagatatctataaataaataaactagggtggagaaaagaatatcctgaggtggctctgtggccagggtattcagtagcactaagctccattctggaaatcaaggcatctaaagaaagtgcagggctgaatttattttgtaaatggaatatgtacaggtttaattattttgcaccttgaggtaaatcagtacatagcaactactactgcttacatacacttatttaaggcaactttatttaaaaatcaatatatgtagtaaattatatctgtcactgtctctcaatgaatgctatctttgattatttttcaaaaacagtggaagaaatataatcacttaaaacaagcagttaattacctaaacatgagttacctttgctcttaaatggagtagtcagatcattttgtcagtcaagtagtcaaaagaaagcagaaaccagtaacatttagaagcattgtaaaaacattttgagtgcaaagtattttgcaagtgacggtttttctggcactggataattactatacacaattaaataaaatcacagaaacactatgatcccaggtagttttcagttttaaaatttcttcctgtaaagtaagtacagttgttacccctgatgtccagacacaaggaaatgatgtgaggaaatcctcttgttcaggtacatcaggggagttttaaaaatagcagcaaatactggggtctttggaaataattatgctgctacaaataaaaaggaatcattacaatggaagctcataaacaataataagcaccgtgggtaatactctatcaattgccaatagagtctaactctttttaggcagtaccaaatgatgacagctacatattttctaaagaaaagcagctacatttccaacctctcatccgaggcagaagttgaatccatcattttaacaagactcttacaatatggtcttagaggaggacattacattagttaataaatagtttataatgaatttaaaacaccagacttgctaaaatttcagcttttggcattcctcatgatcctttattagattaattatgtatacctttgtaatttaattatatggttaaagggagcattggaatttcataaaattttcatcctaatagtgatgtcaccatttttgatatttctgtggcttctcaatactcatttgatttttgtaaattattctcttgtcaaatcagtttcacaaccccattcatccagtcctacaggcttaacaacatttatttcatgtggaactaaaagtatataaaagatgactaaaaagatttgttagactttaaaaagctcagaaaagcaaaaactaatacacaaaataaaaatgtcattaatctgagctacatataaaatgtctaatttccttttaaaatataaatatggcagtgctttatatcaaagatgtaaaatctatcaattgctttaagataataaacataaatgaaagtaagcaccaactatttacattaacaatttactctatttgttacttttccaaatgtttatataatatttaagcatcatatcaaaataaatattttaaaataaaatcacaggtaacaagctattaaatgtaatctacaaaagtgaaagaataacataaagagaaaatgaaaggtaattcttaataaagtaatactgatcatagacccttctgagagaattctaactcctgattatttacgcctactacttataagagaataatagtcaagaacttgaacctgatggaaactaaagcattttaagacaaagagagacaaggcagagaacagagtgggaatcattggctttaaaagagcataaggattcagaaaaaatattctacaaaggcatcaaaatcaactattgcaaactggcattgtataactttttaaattcagaagttataaatggtatgggtgcttaattatcaaatcacctgcaattttacttgtctgtcacaatggatacctagatatgaaggttttaagattnnnnnnnnnnnnnnnnnnnnnnnnnnnnnnctatcattattaaagtttctattgttctacagtcatctctatggctaagaaaacgccagttagtgaaacacgatggacatctacagaaatgaaacacaaatagagaagccctgaaatgttaccatttttcccacagcactggtatagactccctattcttcccataaagcactaacaaaagtgaaataatatgtgaaaatttcaggaaacaccccaa

SEQ ID NO: 239988 - DNA, 930 bp, Homo Sapiens
ctttgtacaaaaaagttggagaaataccatgaaatttataggtagataaccagattgttgctttttgtttaaaccaagcagttgaaatggctataaagactgactctaaaccaagattctgcaaataatgattggaattgcacaataaacattgcttgatgttttcttgtatgtctacattaaacttgagaaaaagtaaaaattagaacactgtatgtagtaatgaaatttcagggacccagaacataatgtagtatatgtttttaggtgggagatgctgataacaaaattaataggaagtctgtaggcattaggatactgacatgtacatggaaaattctagggacaggagcatcattttttccttacctgataccacgaaccagtgacaacgtgaatgctgtattttaagtggttgtatgtttattttcttgagtaacaaatgcatgaaaaattaatgcttcacctaggtaagatcattggtctgtgtgaaatcacaaatgttttttccttcttggttgctgcagcctggtggatgttcatggagaagctctgttctctatattatggctgtgtgccgttgcttctccctctgcttttatcttttccacagttgaggctgggtatgttctttcaaagaaatggccatgaatatgtgtaagtatacttttgaaaatgagctttcctaaactattgagagttctttccacctcttgcggaaccaactcttggaggagaggcccatgtatctgcacgagcacttagcttgttcagatctctgcattttataaatgcttcttaccaagaaagcatttttaggtcattgcttgtaccaggtaatttttgccggggatgggtaagggttgggttttctggtgggagtggggtggtgggtattttttgttgatgctttagtgcaggcctgttctg

SEQ ID NO: 239989 - DNA, 1262 bp, Homo Sapiens
  misc_feature (1071)..(1108): n is a, c, g, or t
aagtgtaagtatggactttatttttttaaaaaaaagtcttttgagaactacaaattacaaagtaaaagcagatcactacgtagaaatctagtgaatacattttgcctgtgcatgaaaaactttatcaaagttactcattttaacaaattcaccccattcacaacaatcagttataatgttctttttaaggttactatacctttatttcaaattatattacatgttattccctcaaaatgaacttttaaatgacaaacttttggctcataagaatggcaccttcaaaaggggcgatttccactcagtctctggtggcattattccaggctagtttcaccagttaaaaaccttcaaaatgttcacttttaacacaaagtcttcccataaaaaatgtggctacattttccccccaatgactacatacatagatgggtagcagcaagaaaagatgaaaatgaaaaggcagccattaaaataaatggatcaattgtataccaagaagtatttggctcatggcaattaaaaaacggcaactagggtatgttaatagccagaggcttgagtcattactgagtatattaagagaacgaagccagtccagtatgaccgagtaggaatatataattgtcattgcacttcatttgttatagcaaatactctaagccaataggaaatctaagctatatctagattcccaattagaacatgctgacctttaacattttcaacaatttttactgggtttagtacatcagtcattttctttactcaaactccattacgagttctttcctatcaatctaagtgtattctgtgcataaaataccttaaatgttaagacttttctaaggttcatttgaaaatggttgtatgaaaagaatacccatttgttttgcctggaaagatagaaactaaatgcagaagtttctcaaggggaaaaagctcaactttcttcttcccaccacctctgccacattatgatttcctaaacttttcaagtctgttctccatggcttctctaaggatgaaaaccagagaccaaacaattgagctttaggatatctggagttnnnnnnnnnnnnnnnnnnnnnnnnnnnnnnnnnnnnnngttaacatgcaagcaatggtccacgtactcaagattcatgttaaatgaattcgattattacatatgggtttttcattgatgagcagggctccgggcatgccatattatctcacaaatcattgccttttgagactctggatacttttccagccaa

SEQ ID NO: 239990 - DNA, 929 bp, Homo Sapiens
  misc_feature (356)..(393): n is a, c, g, or t
ttaacattttcaacaatttttactgggtttagtacatcagtcattttctttactcaaactccattacgagttctttcctatcaatctaagtgtattctgtgcataaaataccttaaatgttaagacttttctaaggttcatttgaaaatggttgtatgaaaagaatacccatttgttttgcctggaaagatagaaactaaatgcagaagtttctcaaggggaaaaagctcaactttcttcttcccaccacctctgccacattatgatttcctaaacttttcaagtctgttctccatggcttctctaaggatgaaaaccagagaccaaacaattgagctttaggatatctggagttnnnnnnnnnnnnnnnnnnnnnnnnnnnnnnnnnnnnnngttaacatgcaagcaatggtccacgtactcaagattcatgttaaatgaattcgattattacatatgggtttttcattgatgagcagggctccgggcatgccatattatctcacaaatcattgccttttgagactctggatacttttccagtttaatttgcaaacagaatttttataacaaattattttttaaccaaatcatatccttaaaactgtttatagaaaacccagggaataaagtgaactgttcattgtggaaggccttaaattacattattacagtagaaaatacaggaggtagaagataactgaaaagactaatgcaacattagattcaaatctatagctcctgtagctacttaaaacatggttttagaaactaaacccaacatttccagcaaccatagaaacagttaaaataaaatttgccatgaaagcccttatatcatgcttgatacagggaggtaggaagatgtaagaaccaggacacatgagacatgacaatggttatctacaacccaacttttttgtacaaag

SEQ ID NO: 239991 - DNA, 926 bp, Homo Sapiens
gaaaaaatccaaaccaacacacctgggatagataaacagatgtacaggaaaatgtttcctaattctcacttccctttagaaaatgcagttgttgaagtcagaataataatcatgataactgtctgataaaagatttagactaagtatctgtaaaaacaccaaaaatctcagaattacaaagaaagctttggctgtgtatcccttatctttaaaacagttcaagtcttacaaattagggggtgctaaggttttccaaacctaggcctacaatagaaagttgattgaaataaaaaatccctatctggcctttggtttaactgtacaggatcacattaagtctaatttctcttcaacagtcaggacatatcatcatcttctgtctatgaaggataagtagaaccctgagagttacaaggggaaaggctcagacagcatttagttcctgtttcatgaagctatgaatagtttgagtacgagccctgacaaagtaaaaagcaggaagtgcatgactgtagagggcaggttaagaaatgatgaatgcttagctttaagtatttaatctggtagcttgcaggcctccaaaggtggtagaagttaacctcctgtgctgcagttctggagaggcatttaattcttccagggggaaaaagtgctaactccttgattttccaaagaaagtcttaggaaagtaaaaaggtgaaggggttggtgtttagaagagtcactagccttcaacagagtaagagttttttctgagtgcaaagacacagctctgctcaacttttttttcccatggggaaaacaactattttaataattgtaatatttcaagtatttatctcattttttaacttttaattttggaacagcgtcttgctttgtcatccctctctcacaggcagtctcctgcccctgtctcaacccaa

SEQ ID NO: 239992 - DNA, 1223 bp, Homo Sapiens
ttgggtgaacaattcctctccggcactgggaggcaccttcccgccagccccctggtggccgcctggcccacctcccaccaacttcagcagcttggagctggagcccagaggccagcagcccgtggccaaggccgaggggagcccgaccgccatcctcatcggctgcctggtggccatcatcctgctcctgctgctcatcattgccctcatgctctggcggctgcactggcgcaggctcctcagcaaggctgaacggagggtgttggaagaggagctgacggttcacctctctgtccctggggacactatcctcatcaacaaccgcccaggtcctagagagccacccccgtaccaggagccccggcctcgtgggaatccgccccactccgctccctgtgtccccaatggctctgcgttgctgctctccaatccagcctaccgcctccttctggccacttacgcccgtccccctcgaggcccgggcccccccacacccgcctgggccaaacccaccaacacccaggggcgtcaccgggggcaacacctatgctgtgcctgcactgcccccaggggcagtcggggatgggccccccagagtggatttccctcgatctcgactccgcttcaaggagaagcttggcgagggccagtttggggaggtgcacctgtgtgaggtcgacagccctcaagatctggttagtcttgatttcccccttaatgtgcgtaagggacaccctttgctggtagctgtcaagatcttacggccagatgccaccaagaatgccaggaatgatttcctgaaagaggtgaagatcatgtcgaggctcaaggacccaaacatcattcggctgctgggcgtgtgtgtgcaggacgaccccctctgcatgattactgactacatggagaacggcgacctcaaccagttcctcagtgcccaccagctggaggacaaggcagccgagggggcccctgggggacgggcaggctgcgcaggggcccaccatcagctacccaatgctgctgcatgtggcagcccagatcgcctccggcatgcgctatctggccacactcaactttgtacatcgggacctggccacgcggaactgcctagttggggaaaatttcaccatcaaaatcgcagactttggcatgagccggaacctctatgctggggactattaccgtgtgcagggccggggcagtgctgcccatccgctggatgg

SEQ ID NO: 239993 - DNA, 1018 bp, Homo Sapiens
ctttgtacaaaaaagttggctttaatcttgtctcacttactatagttatatggaccctaagatattttattacagagtttttaattagtgaaaaattcatgaataccatagagaaaatattttagaatttaatgtttcttatatttatgtaaacttatgactcttcatttatatagttacttactttttcatgtatatccaggctataaatatcctttcaaatcatgttcttatacctaattttagtctttcaaatgaatgtactgtaatgcttgtatgtataaatcctatgaatagagggcttttgtaaattatgcatttattgtaattatcattaattttttaatgataaaccatgacaaaggattttacgtttataaaattatgacagaagccatgtgcattatcctttacggacgcagcctagctctacagcaatcatcctgaaataagcatacctaatttcaagcaattgttgtattttcatgactgaccttaactgtactttttctagcaagagatgctttattctgcagcatgaacagatttaaaatggctggtgttaaatatcagctcctaataagatgtggactgaaaacactatcacaacactatgagaagcccctagcactggttaacgctttcctagcctagtctctggatttggggagcttgtcttcagtggctgagactgtgagctgggagcagttctctcagctggagagactcgggatggggtaacctggggaccagtctagcccctgcaccctcttccctgcctctgctccttgggagcgggtggagagacacccatgtggctccccttagggccagcaccaagcaccacgctctcatcctgcaagtcggcgcacacagtggatgaaggcaggagacccagaaagcagtgcagtgcagctctaataaaggccttatttttcttatgtaaatcatctttttacatttgtttgtaaacatgtttaaagaacgaacctagtgggacatttttagactttgccaa

SEQ ID NO: 239994 - DNA, 617 bp, Homo Sapiens
gtattatttcaattatttttatgtacagaaaactcaacagtgtacatttaacccagtttagtggcaagttctttagcctttgccttttcgagcttggcgatacgagccacagacttaggacccaggacattgccaccccagtgacggcggatctcatcgtatctgtcattgtaattggtcctgatagcttccaccagcttagccaaagcgcctttgtcttccgagttcacctgtgtgaaggcgacagtggtgcaggtcttcctgtggactagacgtcccagtcttgcctttcccttgataatgcagtaagggacccccattttacgacacagggcaggcaagaagacaaccagctcgatgggatccacgtcgtgtgcaatcaccaccagctgagctttcttgttctccaccaaggtggtgacggtgttaactcctgctcgaaggacaggtggtctcttcgttgggacgtcccctttgccagcagccttcttctcggcccgggccaacagtctctgcttcttctcttgctttgtctctggtctgtacttgtgggccagcttaagcagctgagtagctgtttggcggtccagggcctgggccaacttttttgtacaaag

SEQ ID NO: 239995 - DNA, 880 bp, Homo Sapiens
gaaggaaaatttgtattatttcaattatttttatgtacagaaaactcaacagtgtacatttaacccagtttagtggcaagttctttagcctttgccttttcgagcttggcgatacgagccacagacttaggacccaggacattgccaccccagtgacggcggatctcatcgtatctgtcattgtaattggtcctgatagcttccaccagcttagccaaagcgcctttgtcttccgagttcacctgtgtgaaggcgacagtggtgcaggtcttcctgtggactagacgtcccagtcttgcctttcccttgataatgcagtaagggacccccattttacgacacagggcaggcaagaagacaaccagctcgatgggatccacgtcgtgtgcaatcaccaccagctgagctttcttgttctccaccaaggtggtgacggtgttaactcctgctcgaaggacaggtggtctcttcgttgggacgtcccctttgccagcagccttcttctcggcccgggccaacagtctctgcttcttctcttgctttgtctctggtctgtacttgtgggccagcttaagcagctgagtagctgtttggcggtccagggcctgggtgaactggttaatcgcaggaggcactttcagccgcttatagaggatggctctctgccgctgcaacctgatatagcggggccatttcacaaagcgggtgaggtctcttttgggctggatgtcctgtccaatgccaaaattcttaggccttttctcaaacaggggattcaccactttcttagcctcctgcttcttcacgacagctggggccggagccaccttctttcccttggccttctttcctttgttcggccccaacttttttgtacaaa

SEQ ID NO: 239996 - DNA, 1318 bp, Homo Sapiens
  misc_feature (107)..(140): n is a, c, g, or t
  misc_feature (924)..(940): n is a, c, g, or t
ttggcacaattcccctctcctcttccaaacaaaacatacattgatctctcacatccagctgccaaaagaaaaccccatcaaacacagttacaccccacatatctctnnnnnnnnnnnnnnnnnnnnnnnnnnnnnnnnnngatctgacgtaatcaaactccagcccttgcccgtgatggctccttggggtctgcctgcccacccacatgagcccgcgagtatggcagcaggacaagccagcggtggaagtcattctgatatggagttggcattggaagcttattctttttgttcactggagagagagagaactgtttacagttaatctgtgtctaattatctgattttttttattggtcttgtggtctttttaccccccctttcccctccctccttgaaggctaccccttgggaaggctggtgccccatgccccattacaggctcacacccagtctgatcaggctgagttttgtatgtatctatctgttaatgcttgttacttttaactaatcagatctttttacagtatccatttattatgtaatgcttcttagaaaagaatcttatagtacatgttaatatatgcaaccaattaaaatgtataaattagtgtaagaaattcttggattatgtgtttaagtcctgtaatgcaggcctgtaaggtggagggttgaaccctgtttggattgcagagtgttactcagaattgggaaatccagctagcggcagtattctgtacagtagacacaagaattatgtacgccttttatcaaagacttaagagccaaaaagcttttcatctctccagggggaaaactgtctagttcccttctgtgtctaaattttccaaaacgttgatttgcataatacagtggtatgtgcaatggataaattgccgttatttcaaaaattaaaattctcannnnnnnnnnnnnnnnncccccctgctccacacttcaaaactcccgttagatcagcattctactacaagagtgaaaggaaaaccctaacagatctgtcctagtgattttacctttgttctagaaggcgctcctttcagggttgtggtattcttaggttagcggagctttttcctcttttccccacccatctccccaatattgcccattattaattaacctctttctttggttggaaccctggcagttctgctcccttcctaggatctgcccctgcattgtagcttgcttaacggagcacttctcctttttccaaaggtctacattctaggggtgtggggctgagttcttctgtaaagagatgaacgcaatgcccaataaaattgacagaccaatg

SEQ ID NO: 239997 - DNA, 1523 bp, Homo Sapiens
acaaaaaagttgggtctgtctgtccgcccacctgcccaggtggcgcctcatgttggtttcctgctggaaatgcttgggacagggtggaactgggtttcctgggctttggggctggaggtgtctctattgcggtccctggcttcccactgagctgtgggcaaggctgctgcgctgggggatggctggggcacggagcgaggttccctgctaagctgcgcgctttcccccaggtgatccgcaggggctggctgaccatcaacaacatcagcctgatgaaaggcggctccaaggagtactggtttgtgctgactgccgagtcactgtcctggtacaaggatgaggaggagaaagagaagaagtacatgctgcctctggacaacctcaagatccgtgatgtggagaagggcttcatgtccaacaagcacgtcttcgccatcttcaacacggagcagagaaacgtctacaaggacctgcggcagatcgagctggcctgtgactcccaggaagacgtggacagctggaaggcctcgttcctccgagctggcgtctaccccgagaaggaccaggcagaaaacgaggatggggcccaggagaacaccttctccatggacccccaactggagcggcaggtggagaccattcgcaacctggtggactcatacgtggccatcatcaacaagtccatccgcgacctcatgccaaagaccatcatgcacctcatgatcaacaatacgaaggccttcatccaccacgagctgctggcctacctatactcctcggcagaccagagcagcctcatggaggagtcggccgaccaggcacagcggcgggacgacatgctgcgcatgtaccatgccctcaaggaggcgctcaacatcatcggtgacatcagcaccagcactgtgtccacgcctgtacccccgcctgtcgatgacacctggctccagagcgccagcagccacagccccactccacagcgccgaccggtgtccagcatacacccccctggccggcccccagcagtgaggggccccactccagggccccccctgattcctgttcccgtgggggcagcagcctccttctcggcgcccccaatcccatcccggcctggaccccagagcgtgtttgccaacagtgacctcttcccagccccgcctcagatcccatctcggccagttcggatccccccagggattcccccaggagtgcccagcagaagaccccctgctgcgcccagccggcccaccattatccgcccagccgagccatccctgctcgactaggcctcgaggggggcgtgctctcgggggggcctcacgcacccgcggcgcaggagcttcagtggtctggggccctccgccgcccctatgctgggaccaggctcccagtgggcagccctggcctcttccctaacgctggccccggtccagggccggcccctgtgcctggctggacaccgcactgcgcaaaggggccctggagctccaggcacggggcgctggggtgttgcactttggggg

SEQ ID NO: 239998 - DNA, 1650 bp, Homo Sapiens
ttggcttctttctgtctccttcccttgctctgcgtctcttagaggtctcatgtcctgtgcttgtccattttgcttccgttgtctcttctagactgctggagttaataccaccgacaaagagatggaggtgcttcacttaagaaatgtctcctttgaggacgcaggggagtatacgtgcttggcgggtaactctatcggactctcccatcactctgcatggttgaccgttctggaagccctggaagagaggccggcagtgatgacctcgcccctgtacctggagatcatcatctattgcacaggggccttcctcatctcctgcatggtggggtcggtcatcgtctacaagatgaagagtggtaccaagaagagtgacttccacagccagatggctgtgcacaagctggccaagagcatccctctgcgcagacaggtaacagtgtctgctgactccagtgcatccatgaactctggggttcttctggttcggccatcacggctctcctccagtgggactcccatgctagcaggggtctctgagtatgagcttcccgaagaccctcgctgggagctgcctcgggacagactggtcttaggcaaacccctgggagagggctgctttgggcaggtggtgttggcagaggctatcgggctggacaaggacaaacccaaccgtgtgaccaaagtggctgtgaagatgttgaagtcggacgcaacagagaaagacttgtcagacctgatctcagaaatggagatgatgaagatgatcgggaagcataagaatatcatcaacctgctgggggcctgcacgcaggatggtcccttgtatgtcatcgtggagtatgcctccaagggcaacctgcgggagtacctgcaggcccggaggcccccagggctggaatactgctacaaccccagccacaacccagaggagcagctctcctccaaggacctggtgtcctgcgcctaccaggtggcccgaggcatggagtatctggcctccaagaagtgcatacaccgagacctggcagccaggaatgtcctggtgacagaggacaatgtgatgaagatagcagactttggcctcgcacgggacattcaccacatcgactactataaaaagacaaccaacggccgactgcctgtgaagtggatggcacccgaggcattatttgaccggatctacacccaccagagtgatgtgtggtctttcggggtgctcctgtgggagatcttcactctgggcggctccccataccccggtgtgcctgtggaggaacttttcaagctgctgaaggagggtcaccgcatggacaagcccagtaactgcaccaacgagctgtacatgatgatgcgggactgctggcatgcagtgccctcacagagacccaccttcaagcagctggtggaagacctggaccgcatcgtggccttgacctccaaccaggtcctgcacccagacctcacgacgcacctcctgcctctccgctgcttttggaaagtcagaaaaagaagatgtctgcttcgagggcaggaaccccatccatgcagtagaggcgctgggcagagagtcaaggcccagcagccatcgaccatggatggtttcctccaagaaaccggtgggttgggctggggagggggcacctacct

SEQ ID NO: 239999 - DNA, 1500 bp, Homo Sapiens
  misc_feature (906)..(954): n is a, c, g, or t
actttgtacaaaaaagttggctgggggacatgcgtcgagtatagcttgtccaaaggcaaaggcaacaaagtcagtgcagaaaaagtgaacaaaacacactcagtgaatggcattactgaggaagctgatcccaccatttactctggcaaagtaattcgccccctgaggagtgttgatccaacacagactgagtaccaaggaatgattgagattgtggaggagggcgatatgaaaggtgaggtctatccatttggcatcgttgggatggccaacaaaggggattgcctgcagaaaggggagagcgtcaagttccaattgtgtgtcctgggccaaaatgcacaaactatggcttacaacatcacacccctgcgcagggccacagtggaatgtgtgaaagatcagtttggcttcattaactatgaagtaggagatagcaagaagctctttttccatgtgaaagaagttcaggatggcattgagctacaggcaggagatgaggtggagttctcagtgattcttaatcagcgcactggcaagtgcagcgcctgtaatgtttggcgagtctgtgagggccccaaggctgttgcagctcctcgacctgatcggttggtcaatcgcttgaagaatatcactctggatgatgccagtgctcctcgcctaatggttcttcgtcagccaaggggaccagataactcaatggggtttggtgcagaaagaaagatccgtcaagctggtgtcattgactaaccacatccacaaagcacatcattaatccactatgatcaagttggggggaatctggtgaagggttctgaatatctccctcttcatccctcccgaaatctggaatacttagttcttttgagctattacaccagttttaacagcttcctcgtgttatgtttnnnnnnnnnnnnnnnnnnnnnnnnnnnnnnnnnnnnnnnnnnnnnnnnngtccagttgtcctataccaactctggacttgtctatttatttccatactgtgtaattcaacttgttcctctattcctgtatttctttaaacaggaagataagtctagacaaaagatttaattaaatttgaggtaaacattttcggcagtacatcaaggatgatcacacatgcttcataccgcatcccatcaagagccacataatgctggcttattccagaagtagtgaaatgcagtttgatagccaaatctcactgtaaaggcaattcttttgcaatagatatctgtgatgttctgacaccttgtaaacaaagttccttaaaattttttccacttaatgggttttaccatcgatttttgccagatttaattacattaagggttgtaaaatggtaatttttccaaatctatcattccatgtacatttaaaagaagacattcttcaaataattgtatagagttttcttttttctctactttcatcattatgaacttcttttccttcttagtattatcaccagtaagagtgattattctaagttgccaa

SEQ ID NO: 240000 - DNA, 984 bp, Homo Sapiens
caactttgtacaaaaaagttggtggggatgaagccacccccgacctatacataggaaatgattgatgtgcctggtcttatacccagtctgtgtctggtttctctaccctcagtgccctttggcttaggctcaggatgggtgggcctcccttccccagcagctgcctcagccctgatcaagggcagttatttggctcaaggtgagtagtggtttttaaaccctactcccacacactgctgagtctgtgttttcctttcttcctgaccaggtaaactgtcttgagccccaccctcacctgcctgtgctggcaaccagtggcctagaccatgatgtgaagatctgggcacccacagctgaagcttccactgagctgacagggttaaaagatgtgattaagaagaacaagcgggagcgggatgaagatagcttgcaccaaactgacctgtttgatagtcacatgctgtggttccttatgcatcacctgagacagagacgccatcaccggcgctggcgagaacctggggttggggccacagacgcggactctgatgagtctcccagctcctcagacacatcggacgaggaggagggccctgaccgggtgcagtgcatgccatcttgaggcctcatacctaggtggggcaggctggggctgccaacctgatcctgcctgggcaaccctttcctgtcccaggccctacattcagcagaaacgcactttggactttttgctttagataaaagaaagacatcccaggagaaggacaaaccagaggagtgaaccaacaaagagtacctaggaatgggagttgagccctggaatggggctccatggagaggtgcataggactcggcagaaatggcctctccccaaagcctctttttgagaggagagggaagcctattttgttaactggtttgggatagggaatggggtttctttttctttaatctcccttgtttcttgggctgggggaggggtgg

SEQ ID NO: 240001 - DNA, 992 bp, Homo Sapiens
gagttagttccagatctagctgctaaagcattttgagtcttttagtgaaaagaggaacacataggaaaggcaccctgccttgcagctggacctatagtccaagaaaacaacttcttttagttctctctggaccaaccacctccgctgcctcacctgcacaggcagagaacagctgaggagaagtcaagggcaggcatggaaaatagagctgacctacagacttcccacttactttgacttccatcttacaaataaacaaatgctcagaaaagactgaagctaagactgagcttatgaataaaacagaaaccccgttctttatctcctcctcccattccacatatcagcctattgtgaagtttatctttgggctcttttaggcagtgcagttaaagtccaatgcctggaatagtatctatctatagtaatggacaacttacatatacaaacctgcactttttcatctatctcctaataagcccttgttacagacctgtactctgagctagctctgcttgaataagtcaggaaaataaaaaaacacaggggaacaattccttggaacttaagactaaggaaaaagccagtggcaagaggaacaagagaataacatacagtacctgaattggagcctgcggggggagccgacagagaacttctgggccagagtacctggtcacttcaccagacctgtctgaatgccaggacttatcctgtcaataatgcctgagcagagaaaagagctctggccttagatgactgggctgggggaatgtagagaatgggatcaagcatcaaagtgctcttgggagactaaggggctgtcctctgataccacccccaacccttgtccctgtgaagctgaatgggaacaaagaaaagatcctcaaatcagtcaggagatctgggcaaggcagaaaataacttctaagatctttggttctaacattttacagatggtacaattacattcccaacttttttgtacaaag

SEQ ID NO: 240002 - DNA, 360 bp, Homo Sapiens
gagagagaaggtctgatgcagctgtccctcatatggcaggactacatcctttttcaaaatttccaactattatacccctatcatacaaggtccaagctggataactagatgcatatagttatatcaaattattcttcctttgattaatgtgtcgttcctcaagtcgacagaagagacaaatattcctcttcctataggcaaatatagaagaaacaaatttaactttttcctgagctaatgataccaaggggggtgaagtaaaaaatttccccaatcagcaacaagaacacgtaacgggaattatgactccccagtcctccaatttagcttgtggggatgggaaaggggtaggggacccaa

SEQ ID NO: 240003 - DNA, 921 bp, Homo Sapiens
ttggctgtgttaccagccttgtctcggccacctcaaggataatcactaaattctgccgaaaggactgaggaacggtgcctggaaaagggcaagaatatcacggcatgggcatgagtagcttgaaactgctgaagtatgtcctgtttttcttcaacttgctcttttggatctgtggctgctgcattttgggctttgggatctacctgctgatccacaacaacttcggagtgctcttccataacctcccctccctcacgctgggcaatgtgtttgtcatcgtgggctctattatcatggtagttgccttcctgggctgcatgggctctatcaaggaaaacaagtgtctgcttatgtcgttcttcatcctgctgctgattatcctccttgctgaggtgaccttggccatcctgctctttgtatatgaacagaagctgaatgagtatgtggctaagggtctgaccgacagcatccaccgttaccactcagacaatagcaccaaggcagcgtgggactccatccagtcatttctgcagtgttgtggtataaatggcacgagtgattggaccagtggcccaccagcatcttgcccctcagatcgaaaagtggagggttgctatgcgaaagcaagactgtggtttcattccaatttcctgtatatcggaatcatcaccatctgtgtatgtgtgattgaggtgttggggatgtcctttgcactgaccctgaactgccagattgacaaaaccagccagaccatagggctatgatctgcagtagttctgtggtgaagagacttgtttcatctccggaaatgcaaaaccatttatagcatgaagccctacatgatcactgcaaggatgatcctcctcccatcctttccctttttaggtccctgtcttatacaaccagagaagtgggtgttgg

SEQ ID NO: 240004 - DNA, 1571 bp, Homo Sapiens
caataaacatgtagatttatttaagtcagtttggtacatgatacagattggttttgcagtttttaatgaactgaaatagaaatgtctaaatacagcagtatctgcctgtgcaacaaatatctgtaaggtaaaataaggtatttgatagaagaacatctgcaagaacaaatcagatgaaaaatctgaaaaggtttctatataccttctggattttaaaaaaacccaaaaattaatggctcaagatactacattgctaaagttaggggaaaaaagtaaaaaggctgtgagttctgttgcaagagctcatttgtagacttgcaaaatctaactaattttatattatgcttgttgttagagcagtgctcaaaattacagaagcttcaaattgttatgttttcacaaaatttgctacatatgttgacatgaatgtgtgtcagggaattcatacccaggtaaatgacaattacatcagtatagctaatttttgccaccttgggaggaatggaattctgcctattttcgaattaatcctacagcactcactaaaaactaacagccatggcaccataatacattttgtgaggtacctagaatattactaatggaaacaaaaaatgtgaggtaaaccgacctttccccaagaaactttgaagccagagattttaaacaattaaggcacttgaaaacattaagtatatgtacaaatgtgcaagtaaaacaaacagctgtaccaacgagtaacaaagaaacagtaaatcttcatcttaacaacctttaatagttatctaaatgcagagtttgtttatgaaatgaaacaaagcagtttgtcatttcttactataaaatattgaaaatcaagtgcgaaactcagccactattggctaaagaaactaaataaaaaacgttaatgacctagaaaagcaaaagcccattttaaactacttaaagcctctgcactagtccaatgagtcaaaggcaagggagaagtaaacctctaaaactgaagacgaccctctaaaggagaaaactatagaagttaaagtatgcatgcttattatactatgggaaaccaagaaggaagggagagaaaaagaaaaagcacagtctattcatccaggacaatcagtaaaaatctacagtaacctgatcaaccaaaaaatccttaggtgttgtgaaattacattggtcacttctgttatcttaaaacttaaaatgattgtctcatttaaaataaatgattctaaaataatatgattgtctcatttaaatagtaaatgattctaaaataatgtatatccttcttgcctcaccaaagaagtcactactcaagacagtctggtggaaatcctttcaaggtacaatagtgctagcatacttttttttaaagtacaaaggaaagtgtaattaaatcaatttagctctatacttttcaacagccataagaaaaatgttgggaggttcaagatacgaaggctttcaattctgtataacagactttagcttaagtttctccgctctgaaataaattttcaataaaatattaacagtatgccaacttttttgtacaaagt

SEQ ID NO: 240005 - DNA, 701 bp, Homo Sapiens
aattcaataaacatgtagatttattttaagtcagtttggtacatgatacagattggttttgcagtttttaatgaactgaaatagaaatgtctaaatacagcagtatctgcctgtgcaacaaatatctgtaaggtaaaataaggtatttgatagaagaacatctgcaagaacaaatcagatgaaaaatctgaaaaggtttctatataccttctggattttaaaaaaacccaaaaattaatggctcaagatactacattgctaaagttaggggaaaaaagtaaaaaggctgtgagttctgttgcaagagctcatttgtagacttgcaaaatctaactaattttatattatgcttgttgttagagcagtgctcaaaattacagaagcttcaaattgttatgttttcacaaaatttgctacatatgttgacatgaatgtgtgtcagggaattcatacccaggtaaatgacaattacatcagtatagctaatttttgccaccttgggaggaatggaattctgcctattttcgaattaatcctacagcactcactaaaaactaacagccatggcaccataatacattttgtgaggtacctagaatattactaatggaaacaaaaaatgtgaggtaaaccgacctttccccaagaaactttgaagccagagattttaaacaattaaggcccaacttttttgtacaaag

SEQ ID NO: 240006 - DNA, 1273 bp, Homo Sapiens
taggaacctcaatgtaattttaatgacctcagaccagtgacaagggcagactgaccaggggctgtggggggatcccagagcaacctcgagggcgtcctggtgcttaccacctggaaactggtgaggtggtgggagaactcctggtggaccctagtggaagccttccagtaatttcttgaagctgagcgctcaggtgagtagggcgacatctggtggccggttgttgaaggtcattgcagagaggaaggaagccgaggaggggagcctgcagtgagggcgtcctggggttctccggttctcaccacccttgggccacgccgtctagtccacacctgaggagttggtcaggtagaaggggcggatgaccgtgcggaagccgttgaagtgccctgccgggcaggggaaggaggaggtgctcttcgagctgttggtgtccagggcactgggaatcgcagccttccagccctcgaaatcggtgacgtctgccacgaagagcccttcgcagagcatcagggctttgttttcgtaggcaatggtgcgatctgagccgccagacttggtgaggcccaggacagggagctcgtccgaggagcaggagaagccgtagttccagcagctctggatggtggggaggtagaccagggaccaggacaccctcttgtcctggaagaggaagctggggtgttgtggagtctggaagggctggtaggggtagtatctgtagtcagagggggcttggaagtaatcagaagaatatttgaccaaaggcccccgtctggactgatagaccagttgtgacttccgtgcactccaggaactgtctgtcacaaaggcactccaggtgggcgaggtgtaaatccggggcttgtaggtatcctcggtgaggttcaggcctttgtaccgggccagcaactggaagggcacagtgtggaattccagggcctgcagagtcttcttctggaacagggcctcgtggctccagtacagggacaggttgaactgcagctcaaagagctcctcagggagcatcatggggaagcggatcttctccaccaagccctccacctcctcatgggaggcacgctccccccagctccaggtgtccacggccttcagtagggccagctcgctgggcaccgccaggtcgctcctgggcagcagcagttggagcaggtctgtggggacactgggccaggcctcggcctgcgtcaaggcctcgaagttccaggccaggaactgtaggcgggagcttctccaacttttttgtacaaag

SEQ ID NO: 240007 - DNA, 1399 bp, Homo Sapiens
  misc_feature (109)..(124): n is a, c, g, or t
  misc_feature (1320)..(1334): n is a, c, g, or t
cagtcttcaaatattttttattggaaggccatgcattgccttcatttattgtatttcaaatcactgtacatttacttttgtgaaaacactgcctgcattttctagtacnnnnnnnnnnnnnnnnttgtttcaggaatgtaaagaaatatccaacttaaatagcaaaaaagtgcaccataattactgctgcactgcagtcatttctgcaattcccatgtttcttaaataactatcttgtcaaataacacacaatataaaaagcaattatgaaaaacaaacttttacatatacttctaaagtcttattgggaaaatccggttggcattggaaaaccaatcataggtgcacctgcagtaccaggatatgcatatgcctgttggttcataccattgtgcatatttggaacattacttccgtattgctaagtgctatcataaccattcgggtaagtccctgttggattaccagtcctaaaactggtctgtataccagcagacacaaaattacttccaaagctcccattggtgtaatttgcagcactgtaaacaccattctgagtttttgccccaaaatctcttttaagcaggctagagtaacctctgtcataattttccctgtctctaaaggtattaaatccaccccttttgcccgcagagtatctgtcccgacggtcatccttcatgcctcctctacccctggaacgacctgtcaagaaaacaattgcaaattgatcaattatgtctatgacacaaatcattgtggacagaaagaaacagatctattcatggtaggcgtgaaatgtttttacaatttttcagcttaagttttcacattcaaggttttactcaccctccaataccatttaaatggatttgtagacaacgatgtgactcgtaactaccaacatttcctatcagtcatccttacctgaacctctgtcttcgaccaactgaagcaacttgggattaattgcttgattagcttcacgaagcacagagataaggtcgctcacttgctttatgttattaggtgtaaagaaagtgtatgctgtgcctgttttggtactgcgagcagttcttccaattcgatgaatataatcctctgaggagttagggtagtcataattgatgacaaatttcacatcttccacatctgtaaggtgttgcagtgtggcaaaatagcaatgtacggagttttgcacaccacaacagccagaccaaaaataaaaagttagacaattgtattcccaagaaggtacgggctgcaaaaaatacagttaaaatggttatccatttcctgtaggaataccattgaggttgnnnnnnnnnnnnnnngcacatgtcatctgtataattcatcacccacccagtgacagaccctgtcaaaaggaatgtgccaa

SEQ ID NO: 240008 - DNA, 1245 bp, Homo Sapiens
  misc_feature (139)..(153): n is a, c, g, or t
  misc_feature (1099)..(1154): n is a, c, g, or t
caatgtacggagttttgcacaccacaacagccagaccaaaaataaaaagttagacaattgtattcccaagaaggtacgggctgcaaaaaatacagttaaaatggttatccatttcctgtaggaataccattgaggttgnnnnnnnnnnnnnnngcacatgtcatctgtataattcatcacccacccagtgacagaccctgtcaaaaggaatgtgtgttccctaagcacattcccaaatcagcaagttcccttacagatcatcaagtgacatctgaatgcttctgcgcagtagggccacttaaagtttcacagcaacctcttcatgtgctcattttgaggaccttgaaacaaaaaaatgtacaaggtcctttgcattacacattcatcagaagttcaaaattctggccacactgcttgtcttgccaagaccttacaaccgcagctgcaagaaaacatacctgtcccccaaaagttgtttttatgcactgtgtctcgtctaggcaagcgcttccaagaagccaggattcacttgagaatgtgtctctctctggcaggtctcgacatgacgactactgtgtaggtgagggaggaactttcaaagcactttcttttcccacttactatgtgtgagaagttgctcctgctctagatctcatgtgccagtactcaccaatttgtaaaaggcttagtaccttttaaagctgctctctccatttcaaacttgaacaaaaatttcattgaacattgaagtttggaactacttcttcgacatttcagcaaactcactgaaactcaaagacccacagatcacagtgaacagtttgaaacaaggctgtaccatggcagtcatgcaaagcatgggacagaagaaataccacggcagtgaactgtgaggataacttccattttttccctcggagagaacagtttacggggcagaggtgatatgttctgccttttgaagattactggcacacgttcagctttttcacctctctaatcgactggaagcagccagccgatcactagtcctccatccccctcgagtcctccgattgtcatgcctaggccttgccacaaagacagcacctttatgtgnnnnnnnnnnnnnnnnnnnnnnnnnnnnnnnnnnnnnnnnnnnnnnnnnnnnnnnngttaaatggagatcttctgggaaaccaagccatgaatgcgagtttgtactaacctagccctctggaggccacatctgtagcaatcagccaa

SEQ ID NO: 240009 - DNA, 1403 bp, Homo Sapiens
  misc_feature (196)..(257): n is a, c, g, or t
ccatttttccctcggagagaacagtttacggggcagagatgatatgttctgccttttgaagattactggcacacgttcagctttttcacctctctaatcgactggaagcagccagccgatcactagtcctccatccccctcgagtcctccgattgtcatgcgtaggccttgccacaaagacagcacctttatgtgnnnnnnnnnnnnnnnnnnnnnnnnnnnnnnnnnnnnnnnnnnnnnnnnnnnnnnnnnnnnnntggagatcttctgggaaaccaagccatgaatgcgagtttgtactaacctagccctctggaggccacatctgtagcaatcagaataggagcttttccatgtttgaattctacaaaggaaggcatatacatgatcaattatctgagcagaattctagctaggttaagtaagggggaaaaatacttcatttgaaatatttaccatttagaacccagtcacgctcttgttgactcttgtcaccatggatacccatggcaggccacctaagttaaaagacaagttgtgttattaaactcacattgaaaacctcagactccagtgcttgaccacttttggtcacagatctctttaatttcgccagaaatgaaaaagttaaattcactatcagatatgaaaaaaatccactgctcgtgatccaagtttgccctttcctaagctgttttaatcaatctgcttcaatggaggagctcacacatacccatctctcctcatttttctggtaagctcatcacatcttcttttggtttccacaaaaacaatggttttattctccttctcactcatgatctcttccattagacgaataagtctaataataggagagagaaaggaaaaatcctgagttttaaaagaccattgctagggccacacatttatggtcagcaaaacattaagttcaatttacatggctggaagtcaaagaggaaacgcctgctaatccacttatcgagcagttcgacccttggtccttaagtcaaccaggggacacatgaattccttctataggaaagctataaatggtgacagccattatttgaaggattcaagaaattttcaggattagtaggctaactaaatgaaatcacaccaactgaaataacctaaaacaactcaccaaacaatgatccctcaattttacagcaaagttgttaggaagcaaatataacagagttaataaaacttacttttcatccttttctacgtcatgacacacatccacaatctgaagaatgttgtggtttgcactcagttcaagtgcaccaatgtttatatgaatatagtctttcaggaaatcttcagcaagctgtcttacttcttttggccaagtcgcactccacattagagtttgcctatcaggctaatgccaa

SEQ ID NO: 240010 - DNA, 1106 bp, Homo Sapiens
  misc_feature (87)..(102): n is a, c, g, or t
ggaaggccatgcattgccttcatttattgtatttcaaatcactgtacatttacttttgtgaaaacactgcctgcattttctagtacnnnnnnnnnnnnnnnnttgtttcaggaatgtagagaaatatccaacttaaatagcgaaaaagtgcaccataattactgctgcactgcagtcatttctgcaattcccatgtttcttaaataactatcttgtcagataacacacaatataaagagcaattatgaaaaacagacatttacatatacttctaaagtcttattgggaatatcctgttggcattggataaccaatcataggtgcagctgcagtagcaggatatgcatatgcctgttggttcataccattgtgcatatttggaacattacttccgtattgctgagtgctatcataaccattctggtaagtccctgttggattaccagtcctaaaactggtctgtataccagcagacacaaaattacttccaaagctcccattggtgtaatttgcagcactgtaaacaccattctgagtttttgccccaaaatctcttttaagcaggctagagtaacctctgtcataattttccctgtctctaaaggtattaaatccaccccttttgcccgcagagtatctgtcccgacggtcatccttcatgcctcctctacccctggaacgacctgtcaagaaaacaattgcaaattgatcaattatgtctatgacacaaatcattgtggacagaaagaaacagatctattcatggtaggcgtgaaatgtttttacaatttttcagcttaagttttcacattcaaggttttactcaccctccaataccatttaaatggatttgtagacaacgatgtgactcgtaactaccaacatttcctatcagtcatccttacctgaacctctgtcttcgaccaactgaagcaacttgggattaattgcttgattagcttcacgaagcacagagataaggtcgctcacttgctttatgttattaggtgtaaagaaagtgtatgctgtgcctgttttggtactgcgagcagttcttccaattcgatgaatataatcctctgaggagccaacttttttgtacaaag

SEQ ID NO: 240011 - DNA, 917 bp, Homo Sapiens
agcagccgggttcaggggagaaccaggaacccttacaaagagccgcacacggtggcgctgacgggatgtcacaggtttcttggggtcacacagcacacgagcggccccccaggacagcagcaagcagggccaagatgccaccgctacgctggacagggctgcccaccaactggactgtgttcaggccgggccaggggctccttaaagagccgtcctggcggcacctaccagaaggtctccaggaggatgcagagctcctgggcgcggcccagcgcgaacacaggtatcagcacctgagggggacacaaggcaggagccctgggcacatggcccctcgacacagcaggcagcgtccagtgagggcacggccaggtgcccaagagctgcggcctcatagggaccttagcctctcatctgctcccagtcccgtcccagccgctctccagagacagaagggagccgtatgagagacaggagggagccgcatgagagacagaagggagctgcatgagagacagaaggagcctggccagggcttcgtccgcacctgaggtaggagggaaaaggggctccctaggaaagggtctctgagttttcctcctcaatgttgagcaaatcttcttccctccctgcctgaaaatgcagtaccccccaccctgagaccctgacccatgccaagggcagccaagcctgccagaaagaccagcccagcatggccgagggcccatgtccccacccctgctgcagctaccttcccaccacgctccacggtctcgtggactttcttcaggaagtctcgctcccggcagcgcttggagtcacggatggtcgtggcgtacgtggactctgtgatgagcaggttggggcggcacttgtcaatccaggcagctcctaagtgccaacttttttgtacaaag

SEQ ID NO: 240012 - DNA, 1113 bp, Homo Sapiens
ttgtacaaaaaagttggggagcttcggcgtgttcaagaacgagagctggccgcctgtttgtttccaccaatcatactgtgaatcacacgtatgtgctcaatggaaccttcagccttaacctcactgtgaaagctgcagcaccaggaccttgtccgccaccgccaccaccacccagaccttcaaaacccaccccttctttagcaactactctaaaatcttatgattcaaacaccccaggacctgctggtgacaaccccctggagctgagtaggattcctgatgaaaactgccagattaacagatatggccactttcaagccaccatcacaattgtagagggaatcttagaggttaacatcatccagatgacagacgtcctgatgccggtgccatggcctgaaagctccctaatagactttgtcgtgacctgccaagggagcattcccacggaggtctgtaccatcatttctgaccccacctgcgagatcacccagaacacagtctgcagccctgtggatgtggatgagatgtgtctgctgactgtgagacgaaccttcaatgggtctgggacgtactgtgtgaacctcaccctgggggatgacacaagcctggctctcacgagcaccctgatttctgttcctgacagagacccagcctcgcctttaaggatggcaaacagtgccctgatctccgttggctgcttggccatatttgtcactgtgatctccctcttggtgtacaaaaaacacaaggaatacaacccaatagaaaatagtcctgggaatgtggtcagaagcaaaggcctgagtgtctttctcaaccgtgcaaaagccgtgttcttcccgggaaaccaggaaaaggatccgctactcaaaaaccaagaatttaaaggagtttcttaaatttcgaccttgtttctgaagctcacttttcagtgccattgatgtgagatgtgctggagtggctattaacctttttttcctaaagattattgttaaatagatattgtggtttggggaagttgaattttttataggttaaatgtcattttagagatggggagagggattatactgcagcagcttcagccatgttgtgaaactgataaaagca

SEQ ID NO: 240013 - DNA, 955 bp, Homo Sapiens
actttgtacaaaaaagttggcaattgtagagccgaatcttagaggttaacatcatccagatgacagacgtcctgatgccggtgccatggcctgaaagctccctaatagactttgtcgtgacctgccaagggagcattcccacggaggtctgtaccatcatttctgaccccacctgcgagatcacccagaacacagtctgcagccctgtggatgtggatgagatgtgtctgctgactgtgagacgaaccttcaatgggtctgggacgtactgtgtgaacctcaccctgggggatgacacaagcctggctctcacgagcaccctgatttctgttcctgacagagacccagcctcgcctttaaggatggcaaacagtgccctgatctccgttggctgcttggccatatttgtcactgtgatctccctcttggtgtacaaaaaacacaaggaatacaacccaatagaaaatagtcctgggaatgtggtcagaagcaaaggcctgagtgtctttctcaaccgtgcaaaagccgtgttcttcccgggaaaccaggaaaaggatccgctactcaaaaaccaagaatttaaaggagtttcttaaatttcgaccttgtttctgaagctcacttttcagtgccattgatgtgagatgtgctggagtggctattaacctttttttcctaaagattattgttaaatagatattgtggtttggggaagttgaattttttataggttaaatgtcattttagagatggggagagggattatactgcagcagcttcagccatgttgtgaaactgataaaagcaacttatcaaggcttctttcattattttttatgtttcacttataaagtcttaggtaactagtagatagaaacactgtgtcccgagagtaaggagagaagctactattgattagagctaacccaggttaactgcaagaagaggcgggata

SEQ ID NO: 240014 - DNA, 1051 bp, Homo Sapiens
  misc_feature (219)..(230): n is a, c, g, or t
  misc_feature (390)..(404): n is a, c, g, or t
gaagtttatttaaacaacaagacgcttgacttgaagggaaaactatctaggattcttttttgttttagagtaatttatccctacttaaagacagattgccctacatgtaacagctacgtacaaaaaagttataaaattgtccttggttttacaatgataaatgaaaaacattaaaattctccaattgaacaaggtatgcaaggatttttatgttgttgnnnnnnnnnnnngttaaaacagtgagagcaaaataacttactggaatataaagataagagctgaatgagcatgccactaatggagaaagggggtattttcacagaatcagtatttttccccatcccgtctccacttgatgtcaatcaaaacataccattggctgtttagttnnnnnnnnnnnnnnntgcaatatgcttgtgcacatataccagttactttatgtacaataaaggaatggggaagggggaaatgaaagaatagagaaaactatacggtagtagtcaggatgtggtggaaccaaattgcagttttctaattgagaatgtaatcttggtctttaaagaacagagttctggagtaaagaagcaggttcccttttcagtagacacctcccgtctgctgttggaacacatcaattgtatcttcatcctccatttccaactgtgcaggtgtgtctgtttcattgattggttgcccgtcaaatcggaatctgatctgcctcattgacaatccctgtcgttcacaataggctttcattagtttactaagtggtgtatgcctcttaatcttaaactgcaccacagaaccatcctgccccgccaccttcaaattaatatgatcgttgttctcagtcttgactccttcccgagaggtgaagcccgagcccagaggactcctcgccgcctcggagactgcaacacccgacgcggggtcgacagaaggtggagaccccgcgcgccctaacgcccctcctcacgcgcgccggccggctgggccaagaatccccgttcggggctggtgggtccgcgggcgtccgctttctgcccgccaa

SEQ ID NO: 240015 - DNA, 1355 bp, Homo Sapiens
ttggcagactcagcctcctcagagcctgttgggatatatcagggtttcgagaagaagaccggagttgctggggaggacatgcaagacaacagtgggacctacggcaagatctgggagggcagcagcaagtgcaacatcaacaacttcatcttccacaaggtcctgggcaaaggcagcttcgggaaggtgctgcttggagagctgaagggcagaggagagtactttgccatcaaggccctcaagaaggatgtggtcctgatcgacgacgacgtggagtgcaccatggttgagaagcgggtgctgacacttgccgcagagaatccctttctcacccacctcatctgcaccttccagaccaaggaccacctgttctttgtgatggagttcctcaacgggggggacctgatgtaccacatccaggacaaaggccgctttgaactctaccgtgccacgttttatgccgctgagataatgtgtggactgcagtttctacacagcaagggcatcatttacagggacctcaaactggacaatgtgctgttggaccgggatggccacatcaagattgccgactttgggatgtgcaaagagaacatattcggggagagccgggccagcaccttctgcggcacccctgactatatcgcccctgagatcctacagggcctgaagtacacattctctgtggactggtggtctttcggggtccttctgtacgagatgctcattggccagtcccccttccatggtgatgatgaggatgaactcttcgagtccatccgtgtggacacgccacattatccccgctggatcaccaaggagtccaaggacatcctggagaagctctttgaaagggaaccaaccaagaggctgggagtgacgggaaacatcaaaatccaccccttcttcaagaccataaactggactctgctggaaaagcggaggttggagccacccttcaggcccaaagtgaagtcacccagagactacagtaactttgaccaggagttcctgaacgagaaggcgcgcctctcctacagcgacaagaacctcatcgactccatggaccagtctgcattcgctggcttctcctttgtgaaccccaaattcgagcacctcctggaagattgaggttcctggacagatcaggctagccctgccctccacccacacctgcccgctccccacgataagcaccagtgggactgtggtgacttctgctgctggccccgcccctgcccccagagcgtccttggctgccgtctggccgggctctcatggtacttcctctgtgaactgtgtgtgaatctgcttttcctctgccttcggagggaaattgtaaattcctgtgtttc

SEQ ID NO: 240016 - DNA, 1734 bp, Homo Sapiens
aatttttaagactcattcaacagcttaattatttctactatatctgaggtttgatagaattttctgtactgttgccattgtgactaaggcagaggagatgtgaatgaaaagatattcagtgcaaagttagattctgtgccacttcataaatcaaagcccagaaggtgtaatgttcagtttaaatgatccaaaataatggactgatttaccttcatatgacaaaaatgttttctatagtctatcaattagaacagtttataaatactacaaaaatactgtatcttcaatgtgaccaaatcttccctgaatttcttaaaagtggaattttatttaaaataaaaattgctgctccaaaatcatagaagaaaataaatatttaacatgatgtagtcatactacttcacaggtattccaaaatatagaatcttaaagcatttttgatgttactcatagttttgattaaaactgtttaaagtttcttatacaaattatgtaagtgatggtttttgtattactcagaaaaaactctgacttcttttctgagtgtggaatatataaacgaagtgagtgaccatttatatataccaggacacctagactacatcctctgccaagtcttggcctcctacacaggtgtgtcaccatgcaagaccatacagttcattacaactaaaaggtcagttggtctctaataggcttcaaattcagttttgaaatatatataaagaggtgagtttacttttagtaaagaactagatattggtcaaccatgtagtactctaaacgttcatatagaattacatggttatatgtccaagggctgagtttttttgcattaaatgaatgcttatactaataaacttctcttcaaaatatttttttaaaataattttaacctcaaaaatagagaaaacagtagtatcataaaataatttaagtgaaggacttcagacatctcccttagacccaatgagtgcatacagtgataagtatacgagtactctgttactaaaaaaaagaaatgagcatttcggtttgctgacactgcattttaaataaaaacagtgacaggactaatcaaaacacgtaactacaaaagatccatgcatggaatgtgtcgtaattttccaaatacaataaaatcttcctaaaatatgtccaactatctcaaggcactggagtattaagtaggccaataattattgtgttaaagcaaaatggtgagaaatctcctaaaagggggcatacatagggaaagatagctgggggaaaaaaactactttaaaatactctttagaacaattgtagacattagcaatatgaataaaacctcaaattattcatggaattgtccagtttctttaaaactcaagtgactttccaaaaaacttccccatccctatgagacgtgctcatacagaacacttacaaggaataccatcctcatagacgaccacggagctggggtctattttgttcactgaacaatcactgttagtgatgaatacattagtttaaaagtcttcaacgttctttatggattatgctaaacaaatattaacaatgtctttgggaaaggcatgttatttctgatgtggacaacagctgtgtctagtatttatcatcagtactcaaggtaatcacataaagcaggtaggtccttcataaattcatagaagatgtacaattgaagtacaaatcgcagcactttttccccaacttttttgtacaaag

SEQ ID NO: 240017 - DNA, 1137 bp, Homo Sapiens
ctttgtacaaaaaagttggcaacactcttgtggtcaagaaatctgatgtggaggcaatcttttcgaagtatggcaaaattgtgggctgctctgttcataagggctttgccttcgttcagtatgttaatgagagaaatgcccgggctgctgtagcaggagaggatggcagaatgattgctggccaggttttagatattaacctggctgcagagccaaaagtgaaccgaggaaaagcaggtgtgaaacgatctgcagcggagatgtacgggtcagtaacagaacacccttctccgtcccctctactcagctcctcttttgacttggactatgactttcaacgggactattatgataggatgtacagttacccagcacgtgtacctcctcctcctcctattgctcgggctgtagtgccctcgaaacgtcagcgtgtatcaggaaacacttcacgaaggggcaaaagtggcttcaattctaagagtggacagcggggatcttccaagtctggaaagttgaaaggagatgaccttcaggccattaagaaggagctgacccagataaaacaaaaagtggattctctcctggaaaacctggaaaaaattgaaaaggaacagagcaaacaagcagtagagatgaagaatgataagtcagaagaggagcagagcacagctccgtgaagaaaaaatgagattaatgtgaagatggatctgaggggggtgcagatgactctgctgaggagggggatctactggatgatgatgataatgaaggtcggggggatgaccagctggagttgaccaaggatgaaaaaagaggctgaggaaggagaggatgacagagacagcgccaatggcaaaaatgactcttaagcacatagtgggggttagaaatcttatcccaatatttgtttacctaggtgcttctctaagatcaaattttttaccagatcttcttctctagtatcttcagcacatgctcattgtccttgtctttcccatgttaattcatattgccctgcacctaggtcccatttcacctcctttgacactcctagtagttttgttaagtcttaccctgtagtttttgcttttaattttgaaacctctttatgacttaacaataaaaaggacgtatttc

SEQ ID NO: 240018 - DNA, 3700 bp, Homo Sapiens
  misc_feature (2147)..(2160): n is a, c, g, or t
  misc_feature (2263)..(2293): n is a, c, g, or t
gagtttcctctgggtagtcaggatttgtccagaactacatccttttcagatgttcagagttttgcttgccattagggaggcaagggaaggatgagcaataaatcaggtttctcgttcgtatcttacttcttacctaattttctccctgttgcttatttggtacattcccttctctgaattccttaaacactttataaggttatttctgccatacaagtgtagacaattgtattaattctagtcttgactaaagattttaacatttttctgggtgccatttttatctattctctctccccccaaattctctgggctaaacaggcatgatagtctacctagtgttacttgaccattactttcccactgcaattataaaatgaattccttaataagcaattttaaactagaagatatatccaaaactttttaaaggcacaaaggacaactttaggacacaacactgattagcatcaaaacctgaaactgttcctctagtaagtctatgcaatcctaataatgtatactgaagagtagtagctcaggccagtggttcttagcattacttgctaaaaaagataaaaatccatgacactatcttcaactgttaaatatcttatgttaactaaggatttgcctgttccaaaaatgtctcaactgaacctatacatcacctaaactccagcttatagcaagaaaattccttagaagtatgaattcatatttatgatctgattttaaagggctaaaacaaaattctaagcaatcagaaatatagcaaacctaaacttaccaaagcaacctaaaaacaccaaggaaacgctagactgaagtcaaattttagttctacagtttgactcctgattcctcacttcacattggtgaggggaagattaaagtgttctgtgccaacccaatataattacaattaggggatctaatgttattacatagctacagtcaagttagcagtgttgtgtagcagtgacatcaatgactggcttgcatgatggcttctaaaagcatctgatcccagagtttcatgtatcatatatatgtatataaaataatcagttgaggacagcattagcattctgtaaagatgataaactcagtgttaacttctcccagccagtaccttttcccctcattaaatatgttaaaagttgtctgggggggaggggaagggaagaattcaactttacttcataattatgtatcaattgtcagtatacatttaagtttttaaaacctaaatgttctatgcagagtaaagaataagctgtccagaaagcacacacttaataaatttctcctcttgggagttatataaagggattttgaaccttgatggcgagaatcccaaaacaagagtaaaatgaattctttttattgcaaacaaacgtctaaattaatttctccacccactttctttagaaagaaaaagaaatcagcaggctaaggagatacccattcaagaactgacatgattaaaaattaagatataaatgggtgactcacaatttcattagcttacaaagatggtggagttaactactacaagcacactagttatacagtattttgtgggagaagggcatacagacatggctaacttcatatagatcccattagacaactggatttacaacaagtttttttaataagaaatgggcaaagccagctttcttttcagaatcaaaatgcagaacaaatggaaaaattatggtattaaccttcacaagtttgagcctccacaaataatgcaaccaagttttacatttttaacagcccttctacatacactccatcttctctatcttagttccaagttttagttttcaatcccaattataccaattccattgttattttaagaaaaaaccttcccagttattgtcagaaactatgatttagcttaccccctccactacccagcaaactacagagaggatggagtgtaatatgagcagtacagagtcttaatgcaattcatgaggaccacttagtccttacatgaatctggttgctaacatttctattatattgtgacaatgactcccgactgttattctctgtgagaaatggggggagtaaattcttaataaaagacaccaggtacaaagcaacattttacttctgttgtgatnnnnnnnnnnnnnngtcacattttacagataaaatgtagaaccctgaaatactgacacattctcttatcgtgcacaatgctgaggttctcttacgattcacttttaaactgcaattnnnnnnnnnnnnnnnnnnnnnnnnnnnnnnntcaacccacaaagcttctaaaaaaggaacccgcaggcacttcctcttgtggaatgtttaaaaagttagcctactaaagaaaacagtcgacttcttgtgaaggttttggagaaatatgtatcagttcgttttatttgggtattcaataatatccttggtgataatgctgactccatggcttctgaccccagaattgaccctgctgccactggttgtagccctgagattgatttttgtagccacgattgtttcctcgtcctctgaagttctggttgtagttccctctgttgggcattccacctctgttgtagttccctctgtttgagtaactaccacggccaggaaaaacaggggcacgagggtatggatagccgattccaccacttcctccaccgccaccacctctctgtggcatgttgcccctcctattatatccgccacgattcccaggggctcctcctctgaaatttccaccacgcatattgaatcctccacgtcctctatggccaccacctctgttaaactggttcttgccactcttatttttattgcttttctttgagccagtgttctgtttcttttctggtggaagagcctttttgctttcttccttatattgctccaagagtttttgggcttcttccttctgaagttcaacataggttatttcatcaaagcactcagctacctctgggagggtaaagtttcctttcattttgaggaccgcatgttctggtaggtctttcccctctacttctgctttcttctgtgttctttgcttatagtcttcatcttttgggcaaactacaacagcttttcgctggaagcctgcaaacaggcacatttttctcctctgggcagcagcagacacatttgtctgatccagaataaaatttcgcttctttcgggcagcaatctcaataaatttcccaagacactggggggctctctgcaacagtgtgttcagttttccagtatctgccatttgcttcttaaaacctgccaccatcatcttatccataatagtatttgtgccaagaatgttatatttccctggattttctgctgcatgtttagtaacccaggtagtttttccagctcctggcaagccaatcatcatcacaacttcacaatctttcttctcttcaggcccctttggtcctctaactcgatcctctaaggggacgttctggatgaaagtatactcttcaggtattggaaaatatggcttttccttctgaccaaaattaaattcaactgcacagttgtggcagagaacatgcgggaacagtggccgtccagcaagaacttccttactgattttgaaggcaacgccaagatcttgtccattcttagcatacgagagttctacttcatcactttcaaagccaacttttttgtacaaagt

SEQ ID NO: 240019 - DNA, 1959 bp, Homo Sapiens
  misc_feature (1640)..(1660): n is a, c, g, or t
ttcatcactttcaaagttagcaaaacatgtaatcacatcattttcatcaaacttttctccataatcttcagtctcacagttgcatgtttttattccttttagagaatacccataagaaaattcttcttcaccaagtaacattccacttgtagttagtgaccagccaatacgaacttcatgtatgtcaatatcttttgtatataaatgccttactgggatcttctctgtaaccttcatctcaaaacacactttgccttttgacacaccataggatgctcttcctccagcccaaagaaaagcaaaactctccattgtaagggaagaagcactgagacgatctcttgatattttaaaatgtagatcacaattatctgtaattatatcaaatactgtgttacttttgacatccaatgtaaacatatctgctatgtagacaaaacttggttacttaatttttgcatgtacttcttaatgctgcacaacttttctccacatcatgctgttgttccaattttcagtttaaagccccactcccaccaagtcactcctgttaaattatgtactgaaaagtaaactgcctgtgaaactaataccaaggtttaacatgtatattttaagtatttaaaataatcaagacaatgtgacattaatacatacctgctctgctctttaccttgatttagaggcaagcagtagaggatagcaggaaatcaaagtgaagcatgccagaaccaggtagatttaccagtgccacattaaaactgaagggaggccacgaccaaattattttaaaataggagtatgagctgctgttgatcctgcaccagggctctagctcctaaattctttttctaaaacttgtgaagaagacagcctaaaactatgaagtacaaacctggccgtctaatgctgttaatagtgcagcattttaggtcctctttacccaggactgcctgttcaacaattagggattaattgcttcccggattatccaaatccaaagtgtctttaacccagctacctatgggtcactggctcattaacatgcacttcctcagacttctcacttgaacagctaaagtcaagctggaactcattttctttttactgatcagagaaaaataaatctacagtttggaatttttcttaaattagagttattctaatcaacagaatttaattcaacagattgtttgaattcaacattgtacttatattgacatattcctgatttgctaaaaaatctaacaattacattacctgtgtgagtcaccacttcactaccttgccaattcctagcaacttatttatacaacccagaatttcactaaaactttcacatcaactaactcctttttcacctgcagttttttcttttaaaaaggctcagatgactatctcaaccttctgtaaaggatattccagtaagaaagagttttacattgacactcttacaaatctgaataaagccaatttgtacaagaaaacatgagaagctaagctccaatgccttccatctaacacagcaggctgacaccatagctgatacttttgaaacagttatttttatcctttggtctatttatcacacccagagttgtacattttcatcactaaaccaactacgtttttttgtaacnnnnnnnnnnnnnnnnnnnnncaagtctgacagtcaaagcccacttagaggtttgcaatactttctcactcaattgcaacccaactgggtaaagtagcagtatttacagtgctgcactgccattgataccattcgctgctgaagaaagctagtggcccagtgatagcccactgctgctgcctcaggtctttggaagaaatcaacttatgtttaaagcagcagctactgaactggaattgagaacaaaagagcagttattgaaaaagtaatattacaatcttttaaaatagggaatatacttgtgtgctaatgggagccaa

SEQ ID NO: 240020 - DNA, 927 bp, Homo Sapiens
  misc_feature (689)..(713): n is a, c, g, or t
ttggggattggtggtagggcggggcgggccacagtctccagcctgaagcggaagtggaggaaagatggaggaccatcagcacgtgcccatcgacatccagaccagcaagctgctcgattggctggtggacagaaggcactgcagcctgaaatggcagagtctggtgctgacgatccgcgagaagatcaatgctgccatccaggacatgccagagagcgaagagatcgcccagctgctgtctgggtcctacattcactactttcactgcctaagaatcctggaccttctcaaaggcacagaggcctccacgaagaatatttttggccgatactcttcacagcggatgaaggattggcaggagattatagctctgtatgagaaggacaacacctacttaggtaaagtggcccggcctgggagccctggtatccatggggaagcccactctcagagttctgagataccaggcttataggaggcacagtctgtgagtgggaagagactggagtgtagatgttgcccatttgtaggtggtaaaatcaattgtttttgatggaattgattttccctgagtggagtgctgggggaaggaggaggtccaggccggtagtggccattcgccgtgcctcagcgagcaggtgtgtgtgggtcctccaccactcacctcttggttagcgggagtgtgctgnnnnnnnnnnnnnnnnnnnnnnnnnattctacacaaggcagaagaggcacgggttttcctgggagcgaatatcaagtgcctgagagcaactacaggactaactgtgtttgggttgggtgtagtataaataataataatggctaatattttctgagcatctactaaatgcaaggaattgtgcttggtgtgtcatgtggatctcctctgcatcttcatgataaatgtattgtcgctgtttt

SEQ ID NO: 240021 - DNA, 1085 bp, Homo Sapiens
  misc_feature (844)..(868): n is a, c, g, or t
ttggggaaagatggaggtgtggggacaggagctgggtgtgctggggactggccgcggacccctaacctgtgtctccggtctccctccgggagcggctcaacccagcccatcgctctggccccgttctggccctgcagggtggtggttgggacgttgaaatgagcgcgcgagtggtacgtcctctctccgcgctcacgcccccctcctcaccgtgtttcccgccaggaccatcagcacgtgcccatcgacatccagaccagcaagctgctcgattggctggtggacagaaggcactgcagcctgaaatggcagagtctggtgctgacgatccgcgagaagatcaatgctgccatccaggacatgccagagagcgaagagatcgcccagctgctgtctgggtcctacattcactactttcactgcctaagaatcctggaccttctcaaaggcacagaggcctccacgaagaatatttttggccgatactcttcacagcggatgaaggattggcaggagattatagctctgtatgagaaggacaacacctacttaggtaaagtggcccggcctgggagccctggtatccatggggaagcccactctcagagttctgagataccaggcttataggaggcacagtctgtgagtgggaagagactggagtgtagatgttgcccatttgtaggtggtaaaatcaattgtttttgatggaattgattttccctgagtggagtgctgggggaaggaggaggtccaggccggtagtggccattcgccgtgcctcagcgagcaggtgtgtgtgggtcctccaccactcacctcttggttagcgggagtgtgctgnnnnnnnnnnnnnnnnnnnnnnnnnattctacacaaggcagaagaggcacgggctttcctgggagcgaatatcaagtgcctgagagcaactacaggactaactgtgtttgggttgggtgtagtataaataataataatggctaatatttcctgagcatctactaaatgcaagaaattgtgcttggtgtgtcatgtggattctctcttgcatctttcatgataaatgttattgtcgctgtttt

SEQ ID NO: 240022 - DNA, 1079 bp, Homo Sapiens
ttgggtcaaagctgggggcgagccgcgcgcgggaccgcgcttccgggttcggggcgtccgcaaccacagcgcgcagggcaggcgcgagctggcctctgagccccggcctcggaccgcccactccactcccggcacgcccggtgccgccttccggctccagtccccgggctcggcctcggcgaggtgtaattcgcagcgcgggccggccccggaggctctcggcgagcgcggcgcggtaacaagtgggcgaggatgccgtacgagatcaagaaggtgttcgccagcctcccgcaggtggagaggggcgtctccaagatcatcggcggcgaccctaagggcaacaattttctgtacaccaatggaaagtgcgtcatcctaaggaacatcgacaacccagcccttgctgacatctacacagagcacgcccatcaggtggtggtggccaagtatgcgcccagcggattctacattgcctccggagatgtgtctgggaagctgaggatctgggataccacgcagaaggagcacctgttgaagtatgagtaccagcctttcgctgggaagatcaaagacattgcttggactgaagacagtaagaggatcgccgtggtcggggaaggaagggagaagtttggagcagtcttcctctgggatagtggctcttctgtgggcgagattacaggacacaacaaagtcatcaacagcgtggacatcaagcagagccggccataccggctggccacgggaagcgatgataactgcgcggcattctttgagggacccccattcaagttcaagttcacagttggcgaccacagccgctttgtcaactgtgtgcgattctctcctgatgggaacagatttgccacagccagtgctgacggccagatatacatctatgacgggaagactggggagaaggtgtgcgcgctgggcggaagcaaggcccacgacggtgggatttacgcaattagttggagtcccgacagcacccatttgctttctgcttctggggacaaaacttccaagatttgggacgtcagcgtgaactccgtggtcagcacatttcccatgggctc

SEQ ID NO: 240023 - DNA, 1512 bp, Homo Sapiens
  misc_feature (279)..(292): n is a, c, g, or t
  misc_feature (1081)..(1158): n is a, c, g, or t
actttgtacaaaaaagttggaccacgttctccaatgcaatgctgtttgccctgaacatcatgaattcccaagaaggaggcccctccagccagcgtcaggtgcagaatggcccctctcctgatgagatggacatccagagaagacaagtgatggagcagcaccagcagcagcgtcaggaatctctagaaagaagaacctcggccacagggcccatcctcccaccaggacatccttcatctgcagccagcgcccccgtctcatgtagtgggcctccaccgnnnnnnnnnnnnnnagtcccacctccacccactggggctaccccacctcccccacccccactgccagccggaggagcccaggggtccagccacgacgagagctccatgtcaggactggccgctgccatagctggggccaagctgagaagagtccaacggccagaagacgcatctggaggctccagtcccagtgggacctcaaagtccgatgccaaccgggcaagcagcgggggtggcggaggaggcctcatggaggaaatgaacaaactgctggccaagaggagaaaagcagcctcccagtcagacaagccagccgagaagaaggaagatgaaagccaaatggaagatcctagtacctccccctctccggggacccgagcagccagccagccacctaactcctcagaggctggccggaagccctgggagcggagcaactcggtggagaagcctgtgtcctcgattctgtccagaaccccgtctgtggcaaagagccccgaagctaagagcccccttcagtcgcagcctcactctaggtaccgaacaaccctcctgctcacatgtcccccagggtttggggctcctctgtcccccgtcccgtgactaacacccttgcacgctgtctcacgtcctggcatttaacaacttgctctgcgaaggtggtctgttctttcagacccaggacctcggggtcctgtcagtcagctgctccgtcttttccctctgagagagagaccaagggcaaggagggcagtgacctgtccacagaggtagtgcaggggggggccaacatggagtcccannnnnnnnnnnnnnnnnnnnnnnnnnnnnnnnnnnnnnnnnnnnnnnnnnnnnnnnnnnnnnnnnnnnnnnnnnnnnntctgttaacccctgctgcacagggtggtggtggggacagctgtgagcaacagctggacatggggtgtggtcactagccagggctgcaccctacagttcaaccagtcctagcactggcgctgagccctacccctttcctccagcccagagtccttcctctgcggccggcacacagaatcagtttccccacagacatactgaccatatttcccaagccaaaagctggcatgacaacatgatagaaatatttggaactgagattgccaaaaatgcagaggcagccagccacatagtatctggaggtacatgtggcctgaattgggaggcctctagaacctgcgtcaagaatgtctcc

SEQ ID NO: 240024 - DNA, 1118 bp, Homo Sapiens
  misc_feature (143)..(220): n is a, c, g, or t
ttggctgttctttcagacccaggacctcggggtcctgtcagtcagctgctccgtcttttccctctgagagagagaccaagggcaaggagggcagtgacctgtccacagaggtagtgcaggggggggccaacatggagtcccannnnnnnnnnnnnnnnnnnnnnnnnnnnnnnnnnnnnnnnnnnnnnnnnnnnnnnnnnnnnnnnnnnnnnnnnnnnnntctgttaacccctgctgcacagggtggtggtggggacagctgtgagcaacagctggacatggggtgtggtcactagccagggctgcaccctacagttcaaccagtcctagcactggcgctgagccctacccctttcctccagcccagagtccttcctctgcggccggcacacagaatcagtttccccacagacatactgaccatatttcccaagccaaaagctggcatgacaacatgatagaatatttggaactgagattgcccaaaaaggcagaggcagccagccacatagtatctggaggtacatgtggcctgaattggaaggcctctagaacctgcgtcaagaatgtctccatcgccaccacaaattgaagggaaaccacccttatcacagagcaggaggcattgaaactggccttgcagagctgaacaggtggtgagagcagagcagtgcaggtggacagagatgaggaagtcttagcagtcagctggggtttgtccaaggcttgtggtcagccaggccgtgtgctggggacagtccctgcctgcaaagagcaccgtgtgaacaaggccactgtggtcctgaggggtgctctggacagggtgcagggccacatggtggaagggacagggtgctttgcggagtggggtggggcaagcctctgtcgggagctggcattttcgttgacccggacgaggaggagtctgctctgcggagatcatggggacagcctcccaagctgaaggaagggtaagtgccagggccctgagcctgcagccacccgccaagctcccccgcacctccacctggaagcagacaggccatggggcaggggaacgggaagggtgaggaagagggtgtgggggagcgcggagttagaagtttgcattgtgccaa

SEQ ID NO: 240025 - DNA, 916 bp, Homo Sapiens
  misc_feature (568)..(579): n is a, c, g, or t
actttgtacaaaaaagttgggttaatattaagctgttttttgtctgttttacctcaatttgaacagataagtttgcctgcatgctggacatgcctcagaaccatgaatagcccgtactagatcttgggaacatggatcttagagtcactttggaataagttcttacataaatacccccagccttttgagaacggggcttgttaaaggacgcgtatgtagggcccgtacctactggcagttgggttcagggaaatgggattgacttggccttcaggctcctttggtcataattttaaaatatgggagtagaaaacaacaaagaatggaatggactcttaaaacaatgaaagagcatttatcgtttgtcccttgaatgtagaatttgtttttgatttcataattctgctggtaaatgtgacagttaaaatggtgcattatgtatatatattataatttagaaataccattttataattttactattccagggtgacataatgcatttaaatttgggatttgggtggagtattatgtttaactggagttgtcaagtatgagtccctcaggnnnnnnnnnnnnttctgttttaaaaagcaatctgattcttagctcttgaaactattgctacttaaatttccaataattaaaaatttaaaatttttaaattagaattgccaatacttctacatttgagaagggtttttttagaaatacatttagtaaagtccccaagacattagtcttacatttaaacttttttctttaaaacatggttttggtggttaacttttacacagttctgagtactgttaatatctggaaagtatcttgagatatcagtggaaagctaaacagtctaaattaacatgaagtacttcattttgattgagaaaataaaatcagattttttcaaagt

SEQ ID NO: 240026 - DNA, 1179 bp, Homo Sapiens
  misc_feature (968)..(980): n is a, c, g, or t
actttgtacaaaaaagttgggttaattctcagccatctttgaagcttgaaagaagagtctttggtattttgtaaacgttagcagactttcctgccagtgtcagaaaatcctatttatgaatcctgtcggtattccttggtatctgaaaaaaataccaaatagtaccatacatgagttatttctaagtttgaaaagtaaaaagaaattgcatcacactaattacaaaatacaagttctggaaaaaatatttttcttcattttaaaacttttttaactaataatggctgttgaaagaagaggcttaatttgggggtggtaactaaaatcaaaagaaatgattgacttgagggtctctgtttggtaagaatacatcattagcttaaataagcagcagaaggttagttttaattatgtagcttctgttaatattaagtgttttttgtctgttttacctcaatttgaacagataagtttgcctgcatgctggacatgcctcagaaccatgaatagcccgtactagatcttgggaacatggatcttagagtcactttggaataagttcttatataaatacccccagccttttgagaacggggcttgttaaaggacgcgtatgtagggcccgtacctactggcagttgggttcagggaaatgggattgacttggccttcaggctcctttggtcataattttaaaatatgggagtagaaaacaacaaagaatggaatggactcttaaaacaatgaaagagcatttatcgtttgtcccttgaatgtagaatttgtttttgatttcataattctgctggtaaatgtgacagttaaaatggtgcattatgtatatatattataatttagaaataccattttataattttactattccagggtgacataatgcatttaaatttgggatttgggtggagtattatgtttaactggagttgtcaagtatgagtccctcaggnnnnnnnnnnnnnttctgttttaaaaagcaatctgattcttagctcttgaaactattgctacttaaatttccaataattaaaaatttaaaatttttaaattagaattgccaatacttctacatttgagaagggtttttttagaaatacatttagtaaagtccccaagacattagtcttacatttaaacttttttctttaaacatggttttgg

SEQ ID NO: 240027 - DNA, 914 bp, Homo Sapiens
  misc_feature (724)..(735): n is a, c, g, or t
actttgtacaaaaaagttggcttttttttaactaataatggctttgaaagaagaggcttaatttgggggtggtaactaaaatcaaaagaaatgattgacttgagggtctctgtttggtaagaatacatcattagcttaaataagcagcagaaggttagttttaattatgtagcttctgttaatattaagtgttttttgtctgttttacctcaatttgaacagataagtttgcctgcatgctggacatgcctcagaaccatgaatagcccgtactagatcttgggaacatggatcttagagtcactttggaataagttcttacataaatacccccagccttttgagaacggggcttgttaaaggacgcgtatgtagggcccgtacctactggcagttgggttcagggaaatgggattgacttggccttcaggctcctttggtcataattttaaaatatgggagtagaaaacaacaaagaatggaatggactcttaaaacaatgaaagagcatttatcgtttgtcccttgaatgtagaatttgtttttgatttcataattctgctggtaaatgtgacagttaaaatggtgcattatgtatatatattataatttagaaataccattttataattttactattccagggtgacataatgcatttaaatttgggatttgggtggagtattatgtttaactggagttgtcaagtatgagtccctcacgnnnnnnnnnnnnttctgttttaaaaagcaatctgattcttagctcttgaaactattgctacttaaatttccaataattaaaaatttaaaatttttaaattagaattgccaatacttctacatttgagaagggttttgtagaaatacatttagtaaagtccccaagacattagtcttacatttaaacttttt

SEQ ID NO: 240028 - DNA, 1510 bp, Homo Sapiens
  misc_feature (219)..(231): n is a, c, g, or t
  misc_feature (1307)..(1333): n is a, c, g, or t
ttggggaaggtttgttaaatttttgttaatgtgggtaaatctgagtttaattcaactgcttccctacatagactagagggctaaggattctgtctgctgctttgtttcttctaagtaggcatttagatcattcctgtaggcttcctattttcactttactgctctaatgctgctagtcatagtctttagcacactaggtggtatgcctttattagcatnnnnnnnnnnnnnctttaacaggatcttttacatattactgggatggggggtggttcgggatgggtgggcagctgctgaaccctttagggcatttcctctgtaatgtggcgctttcaactgtactgctgcagctttaagtaccttaaagcttctcctgtgaacttcttagggaaatgttaggttcagaactaaagtgttttgggtgggttttgttgcgggggggagggtaacaatgggtggtcttctgatttttatttttgaggttttgtcaactggagtacgtagaggaactttatttacagtactttgatttggcaggttttcttctacttgtgctctgcctggagctgtttccatatgatataaaaagcaagtgtagtattccattactatgtggcttagggatttatttgttttttaaaatcaaccatgttagctgggattagactccctacagtccttcaatggaaaagtaacatttaaaaatcctttgggtaattcaaattacagatttaaaagagcttaagatctggtgttttgttaatgcttctgtttattccagaagcattaaggtaacccattgccaagtatcattcttgcaaattattcttttatataactgaccagtgcttaataaaacaagcaggtacttacaaataattactggcagtaggttataattggtggtttaaaaataacattggaatacaggacttgttgccaattgggtaattttcattagttgttttgtttgttttgatttgaaacctggaaatacagtaaaatttgactgtttaaaatgttggccaaaaaaatcaagatttaatttttttatttgtactgaaaaactaatcataactgttaattctcagccatctttgaagcttgaaagaagagtctttggtattttgtaaacgttagcagactttcctgccagtgtcagaaaatcctatttatgaatcctgtcggtattccttggtatctgaaaaaaataccaaatagtaccatacatgagttatttctaagtttgaaaaataaaaagaaattgcatcacactaattacaaaatacaagttctggaaaaaatannnnnnnnnnnnnnnnnnnnnnnnnnnaactaataatggctttgaaagaagaggcttaatttgggggtggtaactaaaatcaaaagaaatgattgacttgagggtctctgtttggtaagaatacatcattagcttaaataagcagcagaaattagttttaattatgtagcttctgttaatattaagtgttttttgtctgtttta

SEQ ID NO: 240029 - DNA, 1902 bp, Homo Sapiens
  misc_feature (338)..(411): n is a, c, g, or t
tcctcgatgtacctagagtaaacagaaaagatggcagtccaaccttgtctccaggtatggagccaagaatgaagtgcaccaaaatatgataccagtagaacaaatacttcatgagagcagtggctgcatcttcttacctgtgtgtctcagtggtgagaacagtgcccgacaagcagtacaaagttactgtttgttgaaaagactaatcatttgaaactttctccccctcataagcattaagcttatccacatgcctgtattgttactaatttagttctaaaagattttcaaatgcatgaatttgtcaacttttccctgtcaccatgacatgtcacaannnnnnnnnnnnnnnnnnnnnnnnnnnnnnnnnnnnnnnnnnnnnnnnnnnnnnnnnnnnn[450 bp omitted]aacgagaagcttggccattaaaacaaagctaactgctcactccaactcagaatctcctaaacctgttctcttctcacctgtactccaacccgttcttaggttttgggttagtgagtggtgtatcagcagcccttactagcaaaagtcctatgtacacctacctacccttcttcattgatggattggagctatacttacctgggcaggcatgacctcggcattagtccccgcaatcttgactccagcatacaagcaggcccggtaatgggcctccacgatgtccctgccataggctctgtctgctcccacaccacagtaatatggacctacagaagcatcaggacaaaacactaagagtcaagaaatccagagaatcccaaagtcagagatcagaaggcccttaagccttgccctcttgaatcactatccttgccttcatctgcaggtgcggggcaggggaggggcaataggggagttcctcttcaccacagcttcagtggggccaaacgttccccctaaaaccttactttatatattcatatccatttttggactttggtgatgtgagggctgtttcgcctttactgtattattttgcttcttgattctgaaagtcattcccatccctgggaaggggcattcctgcacagttagacacttctgggaatttcacctctaacccaaggagacttaccctggggccctgggaagccgttggaaggccaaccaaaggggtgcccatctgtccccatgagggtatactcctgctccatgccaaaccaggggtgctggttgctcaccatgtccattatccgtttacaggtgtgcctcaaattggtctctagaaaaaagagtcaataatacgccatcagggatctaaagacatagatgctgaataccgatgctgatgggagaatagtccttggattctatacaactgaggtgtgcactatggtatgaactgacccagtataggccttcttgggatcaccgagtcagaaaaatgagagaagctgttaattgtacatctgtaggaagactctgaaagacccaa

SEQ ID NO: 240030 - DNA, 753 bp, Homo Sapiens
  misc_feature (672)..(684): n is a, c, g, or t
actttgtacaaaaaagttggcacaaagcagaatactatttttatatttaaatgtaaagacaaaaaactatatgtatggttttgtggattatgtgtgttttgctaaaggaaaaaaccatccaggtcacggggcaccaaatttgagacaaatagtcggattagaaataaagcatctcattttgagtagagagcaagggaagtggttcttagatggtgatctgggattaggccctcaagacccttttgggtttctgccctgcccaccctctggagaaggtgggcactggattagttaacagacaacacgttactagcagtcacttgatctccgtggctttggtttaaaagacacacttgtccacataggtttagagataagagttggctggtcaacttgagcatgttactgacagagggggtattggggttattttctggtaggaatagcatgtcactaaagcaggccttttgatattaaattttttaaaaagcaaaattatagaagtttagattttaatcaaatttgtagggtttctaggtaatttttacagaattgcttgtttgcttcaactgtctcctacctctgctcttggaggagatggggacagggctggagtcaaaacacttgtaattttgtatcttgatgtctttgttaagactgctgaagaattannnnnnnnnnnnnataataaggaataaaccccacctttattccttcatttcatctaccattttctggttcttgtgttggctg

SEQ ID NO: 240031 - DNA, 852 bp, Homo Sapiens
  misc_feature (632)..(644): n is a, c, g, or t
ctttgtacaaaaaagttggaaaaactatatcgccatggttttgtggattatgtgtgttttgctaaaggaaaaaaccatccaggtcacggggcaccaaatttgagacaaatagtcggattagaaataaagcatctcattttgagtagagagcaagggaagtggttcttagatggtgatctgggattaggccctcaagacccttttgggtttctgccctgcccaccctctggagaaggtgggcactggattagttaacagacgacacgttactagcagtcacttgatctccgtggctttggtttaaaagacacacttgtccacataggtttagagataagagttggctggtcaacttgagcatgttactgacagagggggtattggggttattttctggtaggaatagcatgtcactaaagcaggccttttgatattaaattttttaaaaagcaaaattatagaagtttagattttaatcaaatttgtagggtttctaggtaatttttacagaattgcttgtttgcttcaactgtctcctacctctgctcttggaggagatggggacagggctggagtcaaaacacttgtaattttgtatcttgatgtctttgttaagactgctgaagaattannnnnnnnnnnnnataataaggaataaaccccacctttattccttcatttcatctaccattttctggttcttgtgttggctgtggcaggccagctgtggttttcttttgccatgacaacttctaattgccatgtacagtatgttcaaagtcaaataactcctcattgtaaacaaaactgtgtaactgcccaaagcagcacttataaatcagcctatcttaa

SEQ ID NO: 240032 - DNA, 1663 bp, Homo Sapiens
  misc_feature (289)..(297): n is a, c, g, or t
ctttgtacaaaaaagttgggtcgctcccagcctttaatcgccctacactcaaccgcgctccctactttcactcccaccgcgccctcgttcgcctcttctccgggagccagtactcgccaccgccgccgcccgtcccatcaccaccctcttcatccctgtccatgcagtccgtgtcctcgtcctcctaccgcaggatgttcggcggcccgggcaccgataagccggccgagctccagccggagctacctgactacgtccaccggcccctacagcctgggcagctcgctgnnnnnnnnnaccatcggcttcctcttctcctcgtccccgggcggctcgtatgccacgcgctcctctgccgtgcgcctgcggagctgcgtgcccggggtgcggctcctgcatgactcggtggacttctcgctggccgttggttgtctttctagctcgatcagatcaggggcaaaggcaattcccgcctgggggacatctacgaggaggagatgcgggagctgcgccggcaggtggaccatctaaccaattgcaaagcccgcctccaggtggagcgcgacatcctggccgaggacatcatgccccctccgggagaaattgctagaggacatgcttcagagagaggaagcctaaaacaccctgcaatctttcagacaggatgatgacaatgcgtctctggcacgtcttgaccttgaacgcaaagtggaatctttgcaagaagagattgcctttttgaagaaactccacgaagaggaaatccaggagctgcaggctcagattcaggaacagcatgtccaaatcgatgtggatgtttccaagcctgacctcacggctgccctgcgtgacgtacgtcagcaatatgaaagtgtggctgccaagaacctgcaggaggcagaagaatggtacaaatccaagtttgctgacctctctgaggctgccaaccggaacaatgacgccctgcgccaggcaaagcaggagtccactgagtaccggagacaggtgcagtccctcacctgtgaagtggatgcccttaaaggaaccgtgagtaccaaccctgcagtaaaagagggaaaataatgacccattctgctgactaggctcatgatgatacctgaacaaaatgttgagtgagtaaaaatgtatatcataatgcaaagaaaatgagttatcaagacagactcaaaagggacttcatggaactcttgaaggttttagcttgcctatatcattgcttctaatatgaaggacttggtactcgcattctccacctaaaattagagtggtcgccatttgccgctaatggaaattattgcagaaggtctgtaaatggttctgggaacagctgggtttttctgagaaataacaccagacatctttctcaccccctgcagaatgagtccctggaacgccagatgcgtgaaatggaagagaactttgccgttgaagctgctaactaccaagacactattggccgcctgcaggatgagattcagaatatgaaggaggaaatggctcgtcaccttcgtgaataccaagacctgctcaatgttaagatggcccttgacattgagattgccacctacaggaagctgctggaaggcgaggagagcacgtatggaactcagacttggatgcgtgaactaatggtgaccatttg

SEQ ID NO: 240033 - DNA, 954 bp, Homo Sapiens
ttggtttttccttcttcctgctgcaagtactatctcatcctgatgctcaagagtgtcagggcctgggtttccaaacagagactaccctaaaattatttggggagtagtactttacacaattgcctctcccccacaaatcataattgtttcagtaaaatggttacttggtttttccaagaaaaaactcgtttttactcatttttggcctgtttgtttatttagaaactaatctggattcactccctctggttgatacccactcaaaaaggacacttctgattaagacggttgaaactagagatggacaggttggtatcttttaaggaaaaaatagggtaatctcagacaggagttgatatattttaaaatcagtgaatctgaatctcagatacagctggctaatttgagaggttcaggtttcattcatgcctactaaaaaaagaataggcttcttcttccagcagtacacacagccaactaattatttggctcctggatgtgaagttgagatagcagtcttcctgtgctccagaattagtgatttgctttggtgcttaatttgaagtgggagtaagcttccttaaaccacttcctaaagcagctacatgaaacagcttcactagactacctcaatatgaggaatgttttgatcctggacatatggtgtcttcctacctccatactttatagattcctaaacccatctatataatacaagcatgtgccatacgatcatttagtttcttattacctccctatgccaggaaagaaatagttgcaatttattgtagtcatcatgaaatcttcccttgcacataaatttaaaatgtacctgctgcacattttaatatgtcttaattgcttttaaacttggctgtattgtgtacaactattataccatcttttataaacacagttttttaagaaatttctttttgtaagttacaacattcc

SEQ ID NO: 240034 - DNA, 1265 bp, Homo Sapiens
  misc_feature (302)..(314): n is a, c, g, or t
  misc_feature (1005)..(1031): n is a, c, g, or t
ttatcgtagtggcccagagtggtagaagagatacggagtaggaattaaaccacacaatgttatttagggactaagccatgcccctaacaagaaaacaagccaaaaggaaagtattaggcattctctgggaaggcatgcatttttttcccatgtctctggggccaaaaatttataccaagtacctattggcacccgaatatatttgtagaatgaatgaatacatgaaaaaaaataaacagtaacctttctcctatattctactttccaagccaattaataagcaagtgtcttttcgtcatgannnnnnnnnnnnnctgtttaggatttaacaaaatggttgagataacagtcacttctgtttgatgaagagtatcacttcattccatttttgtgtttttgttgcatctccaagtcagaataaatgccttttggagcagatatatttcatttagcatttagtatcatcttcatcaatactcgtatgaacgaaaaaataaaaagccctctcttattcccactctacaacgcatgtcaaaggtgatctgtttagtttttccttagtatcgaacatatcacagctactcaatgaagtttcttctcaactaaagaaacacagtctcttagagaatttgttcctgtgtttccaccataagataaatgagataaagtgcactttggtttacgtctttcaagcacttaagaacagcactttattcagttttaataaatttttactaaattggtaaatgcaaaagaatcttttttttattgctcatatgtcttcctgtctctaagccagaccaatgagcaaatacctttaaaactagttgttacatcttgaaccatttaactgtaataaaagcagaatgtttagttaatgaattaaagaacaaaccctgagcccttttatcagtctcctggctttaaactaagccaatgaggaagtgatttgggggattcctgaaactaggaaaaatgtctctttattttgaaagaaacttgcannnnnnnnnnnnnnnnnnnnnnnnnnnaatctcaaaggcaattgagtgggtcttctgggccagacctatttaatttacgaaacatagtaccttgcagagaataggcattgaaatattatttaaacaatcaaaccaaagatgttcttctatcttcagctgtcagtgatctaatgccctcatctctcttatcctcagggcccagaatggtatatccaactttttttgtacaaactttttcaatgtcaaaaagcattgctcatc

SEQ ID NO: 240035 - DNA, 2732 bp, Homo Sapiens
  misc_feature (2579)..(2587): n is a, c, g, or t
ttttttgcaaaaattttccattcctcaatcaggccaggaagcatgtatcttctggacaggactttatctctctactcagcttagtacactgccttatattagtcccatttgtcccatgttttcatcactgaataaacttgttaaatgacttttggtctggatctcacacctatattacttcatttccttctgtgagcactctataatgataacatcatttttatatcctagggcatgtagttccgagccccacagaaagtaatcaccattcagtaagccaatagttcattcctatctgtatagaactgtaggctttgtaaatctacacatagatctctgttgtaggttcaataatgataataaatgtttgtgcccccagttgttatctctaaggataagagtaatcaatgatcattcagcagatatagcttatatatgggtggcagtttacaaattataaattgattttacacatattttcttctgctacccaagacacaataaagatggtttatctttgcatccccaatgcctagcaatgagattggcacacaatagataactactatagtggcattcttcagacaaccaatcccttgcgtatgcgtattcaaaagataatcattgttattcaaattttcctactttatttgcacaatataataactatcatacaattttataaacctagtacccagcaccaagtgagaaaatcaacagttacatttatatggtgccttagagttcacaaaatgctaacataggtattgccttatttttggctgtggctaaatgaaatatgataaattttcagtgcctttaacagtgagttcacatagtaggcaatcaaaattgatctatttaacaggtatttaaacccttggtttgtataactacttatagaacccttctcactgtggtttaactatacaatgagaattttgtagagacaatacctagcttacagaaagttttattcatacagaaagcatcaaatttttcatttacaagtgctttataatttagaaagcacattcgcaagctgaattaagtgactttcggtctggatctcacatctattacttcatttcctcatactagctctttcctggttacctggaaaaatgtatcagtaataatttaacttaacctcaccagtaaagtcttgattgtttaaaattaagcaatatatcattccttacatctgaatagtatagaggataaactttcctcttattacataggagaattaatcttgtattttacagtacccaaaatagctggtatgtaagaggcacttaatattcattcatccattcattcattcataaatatgtagcccattgacatttgtatcatgctttagtttacaaagcactttaatatgcacctttctgaaattttttgttctatgagaatacttttccccctttggtagctctagcacccagcatggtatctggcacattataggtgaccacaacaagcttagtcccttatgttttcagtatattttaaagtttaaaagcagtttccatgtgttttcgtttctgatacctggaatactgcatttttactcaaaattaccagagcagcaaacacaaattggcctcaaatatacatataatttattcatttatcaaacaattccttgtgtctgcatagtactatatccttttgaaagagcacttttttatgcttgctcctttctttgtatccacaacgcttatcacagtagaatacaagtgctttacagtttacaaagcacattcactattttttttcaggtcacctagatatcaataatcattgcatttttagtgcctagcacagggacaggcacagaaaaggaaactagtagtattcagaaattttctctgaataacaaataatacatcagggggtggtaagctatgaacagcaggccaaatccaattggctcaaaaactaagaatgattttgaccttataaaaacgttgtttaaaaaacaaatatgtaacagaaaccatatggcccacagtctaaagtatttatgatttgaccccttacagaaaaactgtggacccctgatttacataatgcttcacaatttacactgcactttcaaatgttaactgcatgattgccaatacactaattggtttttctcttatgttttacagtgctttcatacacattatcagtcatttaaatcaacttcccacataaacaggaagaaaaaaatcaaggaaagtattaaacatgctcaacagtcccaggttctctcatctttaagcctagagatgggtattaaacccaggagtagcgttggcacagtccaccaaattatttggccactactatgagcagggagttcaggctgtccccttgggacctcgctttgtcccaggcacagtcaccctttccataaccatcactagaaatcccaaaccccagaatcctgctcacctaagctcaaagaaggaagctgttgctggcaggtgcttctcagaagtctggcacatctgtgtatttcttgtctaattcttctcattggcctggagcatctcttcacatttttctctagagagcctggcacnnnnnnnnnccccaacaacctgaccattttatcttctcagtctagggcttctggggtcaaaagaaaggactgaaatacagtatcacctatatgaatgtctgctcctgagggaagttaacaaaagccagattagatactgactggattttgccaa

SEQ ID NO: 240036 - DNA, 1408 bp, Homo Sapiens
  misc_feature (292)..(352): n is a, c, g, or t
gtttagttgataagcacttggacaaaaaataatacttttcaaaaatgtaaagcaaactagtgaggacaaaggattttgtcctcatctcaacaaatgatcagctatgggaactgcatgaaactgaaacaatttaaacctggagctggtaatgttcttaagaccaattcagaacaaaggcaggttgcccttaaaacaggtttgaccttttccttcactcttcctcctgtcccaccctctgtgagtgatttaaaaacggaaaaggtcaaagcccagccaggcctacatttagagnnnnnnnnnnnnnnnnnnnnnnnnnnnnnnnnnnnnnnnnnnnnnnnnnnnnnnnnnnnnnttaaaacttaagcatggtaaaatgttaagctgttttcatccactgatattattctactataaaaagcccttcttgagcagatttgatgataaaaaggagaacatttctaaggtataattagagaagctgttgcatgagaaatcatgtctccatctccattttgctatgcgttatctgaggattgtttctgaaagagatctatttaggcagtgtatgtatgtgtcagcatgtaaaaagtaaagaactgaaaatagacaaaccttgtaaatgcacttcaaaaccaattgtggctcaagtgtaggtggttccccaaggctggtaccaatgagactggggtttgggaattagttggtcatcatccctcctgctgcccagcagtggtcagtcatttttcatgagggatggactaggaaaatgaagtgtctattataaggagagttcctgtaacttaaggagcaagctcactacaaaacccagctacctgcttatcgtagtggccagagtggtagaagagatacggagtaggaattaaaccacacaatgttatttagggactaagccatgctcctaacaagaaaacaagccaaaaggaaagtattaggcattctctgggaaggcatgcttttttttctcatgtgcctccaccaaagccaccaccaccacgtccagcaccgcatccgatagttttgtccagtattggtgctacttgaaaaaaaatgaccattaaccttagttttttcccttacttgatatcagaaaggagagccatttttccagccttcttgattttattcaaggtaggcttaggagtaacaaaattgcaaacgtcgggggcggcgggggtgctggagggggagggacaggtccattgggcagttatgcgttcatctgtaagtctgataaatcgttaaagggtgctgcagggagccatggtccgggacacatgctgatagagggccatcgggacaggagccaagagagaagcccttccttgaaaaaggtatcatattctaatgcaaggggatggtcgttgtttgtcagccgtattggacccaa

SEQ ID NO: 240037 - DNA, 1515 bp, Homo Sapiens
  misc_feature (1269)..(1294): n is a, c, g, or t
ttggctttagaatactgatcccattgaagataccacgctgcatgtgtccttagtagtcatgtctccttaggctcctcttggacattctgagcatgtgagacctgaggactgcaaacagctataagaggctccaaattaatcatatctttccctttgagaatctggccaagctccagctaatctacttggatgggttgccagctatctggagaaaaagatcttcctcagaagaataggcttgttgttttacagtgttagtgatccattccctttgacgatccctaggtggagatggggcatgaggatcctccaggggaaaagctcactaccactgggcaacaaccctaggtcaggaggttctgtcaagatactttcctggtcccagataggaagataaagtctcaaaaacaaccaccacacgtcaagctcttcattgttcctatctgccaaatcattatacttcctacaagcagtgcagagagctgagtcttcagcaggtccaagaaatttgaacacactgaaggaagtcagccttcccacctgaagatcaacatgcctggcactctagcacttgaggatagctgaatgaatgtgtatttctttgtctctttctttcttgtctttgctctttgttctctatctaaagtgtgtcttacccatttccatgtttctcttgctaatttctttcgtgtgtgcctttgcctcattttctctttttgttcacaagagtggtctgtgtcttgtcttagacatatctctcatttttcattttgttgctatttctctttgctctcctagatgtggctcttctttcacgctttatttcatgtctcctttttgggtcacatgctgtgtgctttttgtccttttcttgttctgtctacctctcctttctctgcctacctctcttttctctttgtgaactgtgattatttgttaccccttccccttctcgttcgttttaaatttcaccttttttctgagtctggcctcctttctgctgtttctactttttatctcacatttctcatttctgcatttcctttctgcctctcttgggctattctctctctcctcccctgcgtgcctcagcatctcttgctgtttgtgattttctatttcagtattaatctctgttggcttgtatttgttctctgcttcttccctttctactcacctttgagtatttcagcctcttcatgaatctatctccctctctttgatttcatgtaatctctccttaaatatttctttgcatatgtgggcaannnnnnnnnnnnnnnnnnnnnnnnnngcagaggggcttcctaacctctgcctgataggtgcagaacgtcggctatcagagcaagcattgtggagcggtttctttatgctaggctgccatgtgagatgatccaagaccaaaacaaggctctagactgcagtaaaacccagaactcaagtacggcagacggtggaaggctcatatgggatagaacgctcaaagtataagacagatggtttgagacttga

SEQ ID NO: 240038 - DNA, 2708 bp, Homo Sapiens
ttttcagttatacaaagaactgctgttgtgatgactagtatttgcttgagcagttccatattacataatcctgtgccacaaaacaccctgtacactagtggctgggatattattcatttccactaggcagctatctcactgttgaaatttatatccaaaagaatatttaattttggcttatttttcttataaaatagggaactcgtcttatcatttttaagtcctcacctcagtgtggtacttcaaactacttcaaattattactataattaaatgcttcattttatataataattaataaaaaaggtggcatatgctttttaaaagcacctctgcatatgttccctcatttaatcgttttactgcaatcttcttgaaataagtaggggcaggtgctccagatgaagaaattaaaggattataaaatttaggtagtttttctaaaagtgaatgctggtaaagcccacacaaagatactggtcttaagagttccactctagaatatctttgatattaaaatagcaagagtcagtgttctatccacagacccaccaccctcagttaaaatgagagacactggtcaccaggtacatagtataaatggatattttggcttcaaaaaaataatgaccaggttatcgagtccaccctacaatccagatgtctttcttaaaaaaatttttttaataataataagcaatttttctggctgtatcctggcatttggcactttacaataacaatatacaaaggggacaacaagagattcttaaccaggcaatctgctctggaaagaagaatgcagagaaagtgccaaccttccttcctggggagacaattttatagtgtacactggaaacacaaaataaaggatggcaatccagctccctgggtctgacttgccttcagtattttgcacagtaaagcagtaacacaggtgggcaagaatggttcttgtccccagaatctgacaataattgaaactaggatcattaataaatgaaagaaaatgagtgaaggcttatccacctagttcaggcctgcttttcatagtcaacactgcaccaacacaccaaagtggtagggagatcttggactgatgggctgaaaaatgggacaatcagtactgtgtttattaataacacagaaggggctttgggtagtcagcatactcagaagcaatgcgaaaggaagtaggggggttcatgtataatgggtgggaccaaggaaagtgcaactgagaattgtttaagtccaagagaaagggccttgtctggtcaacattacccagcaaagaggcaaaaggggcagggcagagggaagggaagagggagacagcacaatcttacctaatagctgcaaatatggacacctgagattgtgagcaatagtctgtaaaaaggggccaagggcacacaaggggcagagagagggaagacttcgtatataaagcatgacaccatggctacctgtgattttacacactggcgcaatgcaaaagggttgggagtatggaccactgtttgatagacaagtgcatggaatactccaatgcttatactttattatgccatgggaaactaagggtggggtggggcgcttgcttaacaaggtcagggagggagaaaaccattgataactgccattgtgcctattaacagtcccaggagaagttttgagtagtcagcagcccctgcagtaatgcaaaggggatactagggcataatatcccactctaccagaaggagacatatataattgcaaatattcacattaacagtacaaggggccttagtgggtcagtacccccgatgtaagcaacgaggaagcaggagtcttatctaatgatcagtgcccttgataattgttattaatgctattaattgtccaagagctgagattatgagtagttaacacttctcagcagcaatccaaagggtaatgggaggaacatagggtctttttctcctacacaggtccacaaatacaattatgacattaatattaaaagaaaagggttcattcataattaacatgcccctgatgcaaggggaatatgtggagatcaactcttagtctaaaagaagaggtggacaattgcattaatgcatattaagtccaaaagaaggggcacttagtgaatatcatccccctgctctaaagcaaaggtggtacaggaacatgcttagagaattgagtttgtgcacatgaacattccaagtgacagtcttgagtagtgggcactacctgctaaaaacactaagaaagtaggtaggatccttatctagtgcacagatcaggagcaaatgtaattgcacatattaacagtccaaaacaacaggactttggttgatcaggacaccctgttgtactacaaaggaaaggtgatggggtatgaccttaatctactgacaaagacaaaagaaaatttcaattatatgttgatagtccaccagaaggggccttggagggaaacagtataccccacagtaatgcaaaagaggtataatggtcctagaagtgatagggttgtggacaactgcaattattcacattaactgttcaaatgtaaagatcataaggagtgggcacccactattgaaaagaggtggggcatccttgtctagggcacaagaaccaacataaatgcaattatgcatgtcaacaagccaagaaaaggggacttagggggtcagcaaccctgccaa

SEQ ID NO: 240039 - DNA, 1384 bp, Homo Sapiens
  misc_feature (268)..(323): n is a, c, g, or t
  misc_feature (1113)..(1125): n is a, c, g, or t
aaaaataatacttttcaaaaatgtaaagcaaactagtgaggacaaaggattttgtcctcatctcaacaatgatcagctattggaactgcatgaaactgaacaatttaaacctggagctggtaatgttcttaagaccaattcagaacaaaggcaggttgcccttaaaacaggtttgaccttttccttcactcttcctcctgtcccaccctctgtgagtgatttaaaaacggaaaaggtcaaagcccagccaggcctacatttagagaannnnnnnnnnnnnnnnnnnnnnnnnnnnnnnnnnnnnnnnnnnnnnnnnnnnnnnnttcttaaaacttaagcatggtaaaatgttaagctgttttcatccactgatattattctactataaaaagcccttcttgagcagatttgatgataaaaaggagaacatttctaaggtataattagagaagctgttgcatgagaaatcatgtctccatctccattttgctatgcgttatctgaggattgtttctgaaagagatctatttaggcagtgtatgtatgtgtcagcatgtaaaaagtaaagaactgaaaatagacaaaccttgtaaatgcacttcaaaaccaattgtggctcaagtgtaggtggttccccaaggctggtaccaatgagactggggtttgggaattagttggtcatcatccctcctgctgcccagcagtggtcagtcatttttcatgagggatggactaggaaaatgaagtgtctattataaggagagttcctgtaacttaaggagcaagctcactacaaaacccagctacctgcttatcgtagtggccagagtggtagaagagatacggagtaggaattaaaccacacaatgttatttagggactaagccatgcccctaacaagaaaacaagccaaaaggaaagtattaggcattctctgggaaggcatgcatttttttcccatgtctctggggccaaaaaccttataccaagtacctattggcacccgaatatatttgtagaatgaatgaatacatgaaaaaaaataaacagtaacctttctcctatattctactttccaagccaattaataagcaagtgtcttttcgtcatgannnnnnnnnnnnnctgtttaggatttaacaaaatggttgagataacagtcacttctgtttgatgaagagtatcacttcattccatttttgtgtttttgttgcatctccaagtcagaataaatgccttttggagcagatatatttcatttagcatttagtatcatcttcatcaatactcgtatgaacgaaaaaataaaaagccctctcttattcccactctacaacgcatgtcaaaggtgatctgtttagtttttccttagtatcgaacccaa

SEQ ID NO: 240040 - DNA, 1698 bp, Homo Sapiens
  misc_feature (1536)..(1548): n is a, c, g, or t
ccattttccaataatcccatcccccatccccagctgaagaagggggtgttactgagtcccagctgataccacacattgaaaaggtaaacattaatatttcaaatctgatgtctaactaaaaatgtacagaatgaaaactagaaaatttcaaccccagattatcttcaaccttgctccctccaccaatcatactttgacatttatctatttctttctccacttatggatgtaattggcttgctatagaaactacagttcagatgctttgaatgtatgaactacaatgaacgataaagtcctcttcttttgaagcatattttggcttcagctttaagataatcttatgacaagaagggtcacactgattcacttaataaattccattcttacctaacacaaggtttagttgataagcacttggacaaaaataatacttttcaaaaatgtaaagcaaactagtgaggacaaaggattttgtcctcatctcaacaatgatcagctattggaactgcatgaaactgaacaatttaaacctggagctggtaatgttcttaagaccaattcagaacaaaggcaggttgcccttaaaacaggtttgaccttttccttcactcttcctcctgtcccaccctctgtgagtgatttaaaaacggaaaaggtcaaagcccagccaggcctacatttagagaaattttaaaaaaatttttcctttcaattttggccaattatttccaatttttattttattcttaaaacttaagcatggtaaaatgttaagctgttttcatccactgatattattctactataaaaagcccttcttgagcagatttgatgataaaaaggagaacatttctaaggtataattagagaagctgttgcatgagaaatcatgtctccatctccattttgctatgcgttatctgaggattgtttctgaaagagatctatttaggcagtgtatgtatgtgtcagcatgtaaaaagtaaagaactgaaaatagacaaaccttgtaaatgcacttcaaaaccaattgtggctcaagtgtaggtggttccccaaggctggtaccaatgagactggggtttgggaattagttggtcatcatccctcctgctgcccagcagtggtcagtcatttttcatgagggatggactaggaaaatgaagtgtctattataaggagagttcctgtaacttaaggagcaagctcactacaaaacccagctacctgcttatcgtagtggccagagtggtagaagagatacggagtaggaattaaaccacacaatgttatttagggactaagccatgcccctaacaagaaaacaagccaaaaggaaagtattaggcattctctgggaaggcatgcatttttttcccatgtctctggggccaaaaaccttataccaagtacctattggcacccgaatatatttgtagaatgaatgaatacatgaaaaaaaataaacagtaacctttctcctatattctactttccaagccaattaataagcaagtgtcttttcgtcatgannnnnnnnnnnnnctgtttaggatttaacaaaatggttgagataacagtcacttctgtttgatgaagagtatcacttcattccatttttgtgtttttgttgcatctccaagtcagaataaatgccttttggagcagatatatttcatttagcatttagtccaa

SEQ ID NO: 240041 - DNA, 1242 bp, Homo Sapiens
  misc_feature (1093)..(1153): n is a, c, g, or t
ttcaaaacagtatattttattttacaatagcaaccaactccccagtttgtttcaattgtgacatctagatggcttaagattactttctggtggtcacccatgctgaacaatatttttcaatcttccaaacagcaaagactcaaaagagattctgcatttcacatcagttcacaagttcaagagtcttccatttatcttagcttttggaataaattatctttgaggtagaaggacaatgacgaagccacttaattccttgtgtctgcataaaagcagatttattcatcacaacttcatttatgtgaataaagcagatgatgataaaatgttctcttattcttgtttaatcagtagtggtagtgatgccagaaactgtgaaaggaaggcttttagttactttcttctttccattttccaataatccattccccatccccagctgaagaaaggggtgttactgagtccagctgataccacacattgaaaggtaaacattaatatttcaaatctgatgtctaactaaaaatgtacagaatgaaaactagaaaatttcaaccccagattatcttcaaccttgctccctccaccaatcatactttgacatttatctatttccttctccacttatggatgtaattggcttgctatagaaactacagttcagatgctttgaatgtatgaactacaatgaacaataaagtcctcttcttttgaagcatattttggcttcagctttaagataatcttatgacaagaagggtcacactgattcacttaataaattccattcttacctaacacaaggtttagttgataagcacttggacaaaaataatacttttcaaaaatgtaaagcaaactagtgaggacaaaggattttgtcctcatctcaacaatgatcagctattggaactgcatgaaactgaacaatttaaacctggagctggtaatgttcttaagaccaattcagaacaaaggcaggttgcccttaaaacaggtttgaccttttccttcactcttcctcctgtcccaccctctgtgagtgatttaaaaacggaaaaggtcaaagcccagccaggcctacatttagagnnnnnnnnnnnnnnnnnnnnnnnnnnnnnnnnnnnnnnnnnnnnnnnnnnnnnnnnnnnnnttaaaacttaagcatggtaaaatgttaagctgttttcatccactgatattattctactataaaaagcccttcttgagcagatttgccaa

SEQ ID NO: 240042 - DNA, 1499 bp, Homo Sapiens
  misc_feature (240)..(252): n is a, c, g, or t
  misc_feature (943)..(969): n is a, c, g, or t
ttatttagggactaagccatgcccctaacaagaaacaagccaaaaggaaagtattaggcattctctgggaaggcatgcatttttttcccatgtctctggggccaaaaacttataccaagtactactggcacccgaatatatttgtagaatgaatgaatacatgaaaaaaaataaacagtaacctttctcgatattctactttccaagccaattaataagcaagtgtcttttcgtcatgannnnnnnnnnnnnctgattaggatttaacaaaatggttgagataacagtcacttctgtttgatgaagagtatcacttcattccatttttgtgtttttgttgcatctccaagtcagaataaatgccttttggagcagatatatttcatttagcatttagtatcatcttcatcaatattcgtatgaacgaaaaaataaaaagccctctcttattcccactctacaacgcatgtcaaaggtgatctgtttagtttttccttagtatcgaacatatcacagctactcaatgaagtttcttctcaactaaagaaacacagtctcttagagaatttgttcctgtgtttccaccataagataaatgagataaagtgcactttggtttacgtctttcaagcacttaagaacagcactttattcagttttaataaatttttactaaattggtaaatgcaaaagaatcttttttttattgctcatatgtcttcctgtctctaagccagaccaatgagcaaatacctttaaaactagttgttacatcttgaaccatttaactgtaataaaagcagaatgtttagttaatgaattaaagaacaaaccctgagcccttttatcagtctcctggctttaaactaagccaatgaggaagtgatttgggggattcctgaaactaggaaaaatgtctctttattttgaaagaaacttgcannnnnnnnnnnnnnnnnnnnnnnnnnnaatctcaaaggcaattgagtgggtcttctgggccagacctatttaatttacgaaacatagtaccttgcagagaataggcattgaaatattatttaaacaatcaaaccaaagatgttcttctatcttcagctgtcagtgatctaatgccctcatctctcttatcctcaggacccagaatggtatattccacataaaaaaataaaatgtttatcaaatgaatcaaaaagcacgcctgaggcatttatttttactcctttacttctgtaggccaggtcaaggtgggtctaattcacttttatcatcagcacttaagaaactggatggaagaccacaacaccttgtttttttgcaaaaattttccatctcctcaatcaggccaggaagcatgtatcttctggacaggactttatctctctactcagcttagtacactgccttatattagtccatttgtcccatgttttcatcactgaataaacttgttaaatgacttttggtggggatctcacacccaacttttttgtacaaag

SEQ ID NO: 240043 - DNA, 1240 bp, Homo Sapiens
aatctcaaaaggcaattgagtgggtcttctgggccagacctatttaatttacgaaacatagtaccttgcagagaataggcattgaaatattatttaaacaatcaaaccaaagatgttcttctatcttcagctgtcagtgatctaatgccctcatctctcttatcctcaggacccagaatggtatattccacataaaagatgctttgtttatcaaatgaatcaaaaagcacgcctgaggcatttatttttactcctttacttctgtaggccaggtcaaggtgggtctaattcacttttatcatcagcacttaagaaactggatggaagaccacaacaccttgttttttgcaaaaattttccatctcctcaatcaggccaggaagcatgtatcttctggacaggactttatctctctactcagcttagtacactgccttatattagtccatttgtcccatgttttcatcactgaataaacttgttaaatgacttttggtctggatctcacacctatattacttcatttccttctgtgagcactctataatgataacatcatttttatatcctagggcatgtagttccgagccccacagaaagtaatcaccattcagtaagccaatagttcattcctatctgtatagaactgtaggctttgtaaatctacacatagatctctgttgtaggttcaataatgataataaatgtttgtgcccccagttgttatctctaaggataagagtaatcaatgatcattcagcagatatagcttatatatgggtggcagtttacaaattataaattgattttacacatattttcttctgctacccaagacacaataaagatggtttatctttgcatccccaatgcctagcaatgagattggcacacaatagataactactatagtggcattcttcagacaaccaatcccttgcgtatgcgtattcaaaagataatcattgttattcaaattttcctactttatttgcacaatataataactatcatacaattttataaacctagtacccagcaccaagtgagaaaatcaacagttacatttatatggtgccttagagttcacaaaatgctaacataggtattgccttatttttggctgtggctaaatgaaatatgataaattttcagtgcctttaacagtgagttcacatagtaggcaatcaaaattgatctatttaacaggtatttaaaccccaacttttttgtacaaagt

SEQ ID NO: 240044 - DNA, 2030 bp, Homo Sapiens
  misc_feature (1782)..(1807): n is a, c, g, or t
agggacaggcacagaaaaggaaactagtagtattcagaaatttctctgaataacaaataatacatcagggggtggtaagctatgaacagcaggcccaaatccaattggctcaaaaactaagaatgatttgaccttataaaaacgttgtttaaaaaacaaatatgtaacagaaaccatatggcccacagtctaaagtatttatgatttgacccttacagaaaaactgtggacccgtgatttacataatgcttcacaatttacactgcactttcaaatgttaactgcatgattgccaatacactaattggtttttctcttatgttttacagtgctttcatacacattatcagtcatttaaatcaacttcccacataaacaggaagaaaaaaatcaaggaaagtattaaacatgctcaacagtcccaggttctctcatctttaagcctagagatgggtattaaacccaggagtagcgttggcacagtccaccaaattatttggccactactatgagcagggagttcaggctgtccccttgggacctcgctttgtcccaggcacagtcaccctttccataaccatcactagaaatcccaaaccccagaatcctgctcacctaagctcaaagaaggaagctgttgctggcaggtgcttctcagaagtctggcacatctgtgtatttcttgtctaattcttctcattggcctggagcatctcttcacatttttctctagagagcctggcacttttttttccccaacaacctgaccattttatcttctcagtctagggcttctggggtcaaaagaaaggactgaaatacagtatcacctatatgaatgtctgctcctgagggaagttaacaaaagccagattagatactgactggattttggtgtctctctcaagtggagaagatgtgaatagaaacagaagtttacaaaacactatagcctaacaaataggtaaaagctgtgatttaaagctggctcaagactggcccaggcataatactgtcaatctaaaggtaaccggcaacatcaaaaagtacatctcaaaagaatcaggcttaaagataaacaggagaactggaaatatctaagagtaagaagtgtaaacaatagaaaagaggtagggtttagggttctcatcttgggatttccccaggtcttcaagcttctatccttcctgggttctgggtcatgggcctccagattccggccgttagtcttgagatacctttttcgcttgggtcctctatccatctaggtaggctttgtgacaggggccttccatccttgggttgtaggtcttccagctacaaccctgggctaatcttaggtcgttggccttgtgtcacaagtctcagttcttaggccttccatgtgtcctgtcccaggtcttaagacttctaactcaagccttgagacttccatccaactcaggccttcggtccaattcaggccaccctctgttttcttggctcttgaggcttttgttggtttcaggcctgaggcttctatctatcttggaacatgggctttccatcttagtcctcgggtctcaagtctcaaaccatctgtcttatactttgggccttctatccatatgagccttccaccttctgccctacttgagttctgggttttactgcagtctagggccttgttttggtcttggatcatctcacatggcagcctggcataaggaaccgctccacaatgcttgctctgatagccgacgttctgcacctatcaggcaggggttaggaagcccctctgcnnnnnnnnnnnnnnnnnnnnnnnnnnttgcccacatatgcaaagaaatatttaaggagagattacatgaaatcaaagagagggagatagattcatgaagaggctgaaatactcaaaggtgagtagaaagggaagaagcagagaacaaatacaagccaacagagattaatactgaaatagaaaatcacaaacagcaagagatgctgaggcacgcaggggagccaacttttttgtacaaagttggctttta

SEQ ID NO: 240045 - DNA, 942 bp, Homo Sapiens
  misc_feature (388)..(400): n is a, c, g, or t
  misc_feature (846)..(854): n is a, c, g, or t
gggatggactaggaaaatgaagtgtctattataaggagagttcctgtaacttaaggagcaagctcactacaaaacccagctactgcttatcgtagtggccagagtggtagaagagatacggagtaggaattaaaccacacaatgttatttagggactaagccatgcccctaacaagaaaacaagccaaaaggaaagtattaggcattctctgggaaggcatgcatttttttcccatgtctctggggccaaaaaccttataccaagtacctattggcacccgaatatatttgtagaatgaatgaatacatgaaaaaaaataaacagtaacctttctcctatattctactttccaagccaattaataagcaagtgtcttttcgtcatgannnnnnnnnnnnnctgtttaggatttaacaaaatggttgagataacagtcacttctgtttgatgaagagtatcacttcattccatttttgtgtttttgttgcatctccaagtcagaataaatgccttttggagcagatatatttcatttagcatttagtatcatcttcatcaatactcgtatgaacgaaaaaataaaaagccctctcttattcccactctacaacgcatgtcaaaggtgatctgtttagtttttccttagtatcgaacatatcacagctactcaatgaagtttcttctcaactaaagaaacacagtctcttagagaatttgttcctgtgtttccaccataagataaatgagataaagtgcactttggtttacgtctttcaagcacttaagaacagcactttattcagttttaataaatttttactaaattggtaaatgcaaaagaatcnnnnnnnnnattgctcatatgtcttcctgtctctaagccagaccaatgagcaaatacctttaaaactagttgttacatcttgaaccatttaacccaa

SEQ ID NO: 240046 - DNA, 2259 bp, Homo Sapiens
ataaaagccaactttgtacaaaaaagttggggagtggttggggaggacattgcctggcagtgactggacacccaatgcccagtttatcacccgttcttggcttcgggatggcctcaagccacgctgcataacccgagacctcaaatggggaacccctgtacccttagaaggttttgaagacaaggtattctatgtctggtttgatgccactattggctatctgtccatcacagccaactacacagaccagtgggagagatggtggaagaacccagagcaagtggacctgtatcagttcatggccaaagacaatgttcctttccatagcttagtctttccttgctcagccctaggagctgaggataactataccttggtcagccacctcattgctacagagtacctgaactatgaggatgggaaattctctaagagccgcggtgtgggagtgtttggggacatggcccaggacacggggatccctgctgacatctggcgcttctatctgctgtacattcggcctgagggccaggacagtgctttctcctggacggacctgctgctgaagaataattctgagctgcttaacaacctgggcaacttcatcaacagagctgggatgtttgtgtctaagttctttgggggctatgtgcctgagatggtgctcacccctgatgatcagcgcctgctggcccatgtcaccctggagctccagcactatcaccagctacttgagaaggttcggatccgggatgccttgcgcagtatcctcaccatatctcgacatggcaaccaatatattcaggtgaatgagccctggaagcggattaaaggcagtgaggctgacaggcaacgggcaggaacagtgactggcttggcagtgaatatagctgccttgctctctgtcatgcttcagccttacatgcccacggttagtgccacaatccaggcccagctgcagctcccacctccagcctgcagtatcctgctgacaaacttcctgtgtaccttaccagcaggacaccagattggcacagtcagtcccttgttccaaaaattggaaaatgaccagattgaaagtttaaggcagcgctttggagggggccaggcaaaaacgtccccgaagccagcagttgtagagactgttacaacagccaagccacagcagatacaagcgctgatggatgaagtgacaaaacaaggaaacattgtccgagaactgaaagcacaaaaggcagacaagaacgaggttgctgcggaggtggcgaaactcttggatctaaagaaacagttggctgtagctgaggggaaaccccctgaagcccctaaaggcaagaagaaaaagtaaaagaccttggctcataaaaagtcactttaatagatagggacagtaataaataaatgtacaatctctatatacaagctgagacctttccttttgtctactccaagccttcccctgcgtatgtgggattgagggtcacatcattggcactagtgagagggtagtcagtagccacttctgggaaaggtgggtagtgtggcccaagtgggggactgatgctcccaattgttcatgcttggtgcagattcaccattcggtcaatcagagctcggcgagtcgcctctacttccctggtcaggcgctcgatttcctgcttgagccgttcattctcttcagctagctgtgccactttcctttcattctcctgttctttctccttcatgcgctgctttccagcccgggctggggaatgaccactctgtttccgtttcctggttctcccttggtcttcctcctcttcctcctgagccagggagctctgactggaatctggagagtgagggctctgggaggtgcttgtgacctctgctggttctggctcctcctcagtcagccaagccagagaagcagggtcaagagtggtgaagatttttgattcttcctcttcatttccaggaggtgaaacataggtacccccattttcatctgaagacaggacctcttgcaggtcctcataccaggcttccagctcccagctggacagtgtcccgaaggagaaaggcaatgactcagctgccatctctgcagttggatcagtctggaaaagcacatctgctttcaggtgtggtgatgtatgaagatacacttccttcttgaacactctctcctcaggttccagctctgattttggctctgtcgctgccacccgctcatctttaacatgatacgctcagtgccaacttttttgtacaaag

SEQ ID NO: 240047 - DNA, 2919 bp, Homo Sapiens
  misc_feature (2049)..(2075): n is a, c, g, or t
  misc_feature (2087)..(2126): n is a, c, g, or t
  misc_feature (2502)..(2511): n is a, c, g, or t
gcccgttgcctgtcagcctcactgcctttaatccgcttccagggctcattcacctgaatatattggttgccatgtcgagatatggtgagggatactgcgcaaggcatcccggatccgaaccttctcaagtagctggtgatagtgctggagctccagggtgacatgggccagcaggcgctgatcatcaggggtgagcaccatctcaggcacatagcccccaaagaacttagacacaaacatcccagctctgttgatgaagttgcccaggttgttaagcagctcagaattattcttcagcagcaggtccgtccaggagaaagcactgtcctggccctcaggccgaatgtacagcagatagaagcgccagatgtcagcagggatccccgtgtcctgggccatgtccccaaacactcccacaccgcggctcttagagaatttcccatcctcatagttcaggtactctggacagaggagaatgagtgagaaccatctgctcacatcacatccttcccctctctagcccactaactcttccttctttcctctttctaacctcaactatgggtgtctagcaacatttctccttaaggggctggtatgctcagattttgggagtcccttcctatccattctggcccttttttctctttgcttatatctactaaagagttttagctttagacttttgctttcttcaggttcttgttcgtttctctaggttgagttctcattttaattatttcctatttcagctcaactcctaactcaagatagcagctctccaagatctttttccaagtactgcctcacccctcatttcctatgaacaccccatcagtagtcttccagggtacttacctgtagcaatgaggtggctgaccaaggtatagttatcctcagctcctagggctgagcaaggaaagactaagctatggaaaggaacattgtctttggccatgaactgatacaggtccacctaggggaatgtggttaggagagatttcctgagacctccttcaaaggcccaaggaagaccagacacccaaccctaacacccacaccctaccgcctaccctccccatgcacagcctaaccaagaactgctcacttgctctgggttcttccaccatctctcccactggtctgtgtagttggctgtgatggacagatagccaatagtggcatcaaaccagacatagaataccttgtcttcaaaaccttctaagggtacaggggttccccatttgaggtctcgggttatgcagcgtggcttgaggccatcccgaagccaagaacgggtgataaactgggcattgggtgtccagtcactgccaggcaatgtcctccccaaccactcctccagtcgcttctccagcttaggcaggtccagaaacaggtgctggctcgactgcaccacagggcatgatcggcagactttacactgaggcttcttaagctcgacagcattgatgagcttgccacacttgtcacactggtcaccccgagcctcctcatagccacagaagggacacacgccctccacgaagcggtcagccaggaagcgagcacagtgctcacatcgcagttgctccacagtatcttgcagcacaaaacctcgtttcagcaactgctggaaaatgtcctgggtgattctggtgaggtgggccagggatcaggaagagacagtcagaagacgtggtggaccccttcctcctgccactccaaccagggacccaaactcagtgacaaagaaatcaggcagaaggctcctcaaggaaaagggcatctattcatcttttgagagttttactggatgagctcagacccatcacacatattccccaactgcccacataatctttcccctcaacactttagaattcacttttgttgaacacagatttatctgttttgtatttttcattaacaaaaatctccaataggataggactgtgcctgttctttaatatatcctaaaaattaagtcagtccaagtgctaaactaaactgcatagcactatcagttggcggcctgtctactatgtaaannnnnnnnnnnnnnnnnnnnnnnnnnnagacagagtctnnnnnnnnnnnnnnnnnnnnnnnnnnnnnnnnnnnnnnnntgatatagagaacttgtgcttgctgttaagggaatgcaatactttgggccagtgaaaaatacctagaaattgatcaatatgaaatgtagcccaaaggagtcatatatcttcaaaatctaatgagatcaccctgtttttggcttattcccaaagctgtctctgtgtttacagttggagagaaaaggttagtggagtggcttttataaataagattaattattacagctataactgaagtctccaggcaggaggctttacaactcagtcagtgctatattgtgcctccattttacttccaggacctgactggcataccgttcttgatgctttctacaaatataaaaatctctgcaactgtttagataaaattggaagnnnnnnnnnnggcaaagctgaccataaaaacaacagggggttgggggaggcagagaaaaaggacaagtatacattacatagtttaggaaagtccaggattattgcagaaattaaaatgaacaaggaaaagggcaggcaccaataaaagcacctaaagctagcaaatgcctaaactggtttatttagagtccctccccacaatgttcataggggaggaaaataatgtaatttgaaaagcatcaaaactaaacaaatgcacactgaccttagaaaataagattttgaatttcatcatgatacccttttttcctataaaatttactttttcactctgaaagacttcttcatggtggatttgcccttgcccggcaattttacttcctttcttgcactggttgcaggggtccatgaatgccaa

SEQ ID NO: 240048 - DNA, 3555 bp, Homo Sapiens
  misc_feature (1542)..(1550): n is a, c, g, or t
  misc_feature (2021)..(2110): n is a, c, g, or t
  misc_feature (2135)..(2174): n is a, c, g, or t
  misc_feature (2550)..(2559): n is a, c, g, or t
tggtgtgggggtagaaccgcggtcagtagggtgaaggtgctgagggctggaggctcaggatgtggtggcaggggcctgactcttggagccgggcagcaggctgggtgtgctcagaggctcatggcccacctggcgaagctccttccaggtgcaggcaagcctgaggcgtcagggcagcaggcggccgccaggaaggattcagacaactctgcctgggagtgagggctctgctcagcggcctagacctgggcacaacggaacaggccactccgtttctcatcacagacctgaaggcagatggcctgggcgtcgggcttcctctgctctctggcggggcgattttcacggtcaccaggctgcggacaggctgtgggggtggcgggcggtccaaagccaccgcttcacgtaggccaggggagccttggagaaatcaggcctgatgttgctcagcagcggcagcctgttgggaaagcacctccaggcctcggggaccatctctctcaggacgcggatgcgggcggggaccatctctctctggatgcagatgcgggtgtagtcccagctgggaggagtggtgcggaggggccggatgcggacccagtgcttcctgtggaagtaggtgaccttgcagttctcctggacctgggagctgaggaagggcctggactgcagaacccagtgcttttgggcggggcgcagctttctggcaagcggcttgggccttccagtagacactgggctgccagaagtttccgaaatctgcggtcaaggccagagatcaaatgtcagggctcagtgactagcgacggttagcatcaaaatgttggaaagtgcacaaggcgccgtgtgccaggtacggtctgtccaccaactgttgcatggggcaggaggccacggccaggccacagctttgccgcgcgcagctgcagaaggggcaagtggcgccccatgctgtctggaggaccaaggaggctcaagcctcagtccttcccactcatggtcccagacacttagctctgggcagaggggcctggcagctgtctctgcttttgtacctgacctttaaaggcagaacatagaagaatttctgccaggtcctgaaaactgcagatacctgttgacagaagggtgctctctttgatcagtgtgaaaatgatccaatacacttggaggctcttttaaggaaaaacaaatcatttgctcatattcgtctaggatgactgttaatatcactttttgcaattttgctcttaagaaaacggtgaaagccatcaggatttatgttttagtacctgtaatgctgattttatgttgaccctcataattttcagtgttcacacagccatatatacataatcttctctaaacactaatgccatttctgtcctttcatttctattggtaatcctggagtagagtgaggcacattttccactaatagctgaaaagatctaacttcaaaaacaaagaatccaaaggctgcttagtaactgtagtgcctaagtttagagtctgttcaaggtggtgtgaaaagtttttttnnnnnnnnncatttccctcaaaagcacgtggagaaggaacctattgaccctctggaatgccagaatcgggaagagacaaaaaagtcgcaaccaattgaagattgggcaatagatttggcccagactgaggcagatgggtgaatagtaaagacaataaatagagcttaatgaggaagcaccaaatgctttttgaggtcagagggggccaagtgttttgcaatgcagggttggggtcagccagtagttgcaggggaatgagatccctaacactctcctctcaccaatgaattcctttggttttttgcctgattccttatttatggaatcatctctgggtatatgattttcaaaacctagagatattcctatggtataattcagtataattttcttctaaagacagttctcataatgagtggaatgactttttattcatatctaagacatctcaagataatggcatcagagtaggtatagacnnnnnnnnnnnnnnnnnnnnnnnnnnnnnnnnnnnnnnnnnnnnnnnnnnnnnnnnnnnnnnnnnnnnnnnnnnnnnnnnnnnnnnnnnngggcacctgagcaagactccgtctnnnnnnnnnnnnnnnnnnnnnnnnnnnnnnnnnnnnnnnntgatatagagaacttgtgcttgctgttaagggaatgcaatactttgggccagtgaaaaatacctagaaattgatcaatatgaaatgtagcccaaaggagtcatatatcttcaaaatctaatgagatcaccctgtttttggcttattcccaaagctgtctctgtgtttacagttggagagaaaaggttagtggagtggcttttataaataagattaattattacagctataactgaagtctccaggcaggaggctttacaactcagtcagtgctatattgtgcctccattttacttccaggacctgactggcataccgttcttgatgctttctacaaatataaaaatctctgcaactgtttagataaaattggaagnnnnnnnnnnggcaaagctgaccataaaaacaacagggggttgggggaggcagagaaaaaggacaagtatacattacatagtttaggaaagtccaggattattgcagaaattaaaatgaacaaggaaaagggcaggcaccaataaaagcacctaaagctagcaaatgcctaaactggtttatttagagtccctccccacaatgttcataggggaggaaaataatgtaattgaaaagcatcaaaactaaacaaatgcacactgaccttagaaaataagattttgaatttcatcatgatacccttttttcctataaaatttactttttcactctgaaagacttcttcatggtggatttgcccttgcccggcaattttacttcctttcttgcactggttgcaggcttctttgaggagccaccactaggtttcttgatgactgtggatgagggtctggtcttcttggcaggcgttttggccttaggaggtgctttcttaggcaagggcctagctttcccccgctgggcagctgagactttaggtgcaggtttggaccctctctgcttcacagatgcggccttccctggggacttggctggggttttcttctgcaaccttctcttaggtggcggctcttcatcctcagagtcttcttctgatgactcatcttcatcttcatcctcatctctagaatcatctggctctttcttcggaaacagaactcctgggctgggataatagggaaaacagagctggaaggtgccactgaaccctttcccagagatctgttccatccacccattcttttcgcatttctgcagggtttttttcagcaaatgcatttgatagttagaattggttcctgggtgattctctaggacatacttcttcagagcagtggtagagcaggtcttcggctcattcatggcagcaatggcagacaagattgcaccaacttttttgtacaaagttgccctctttataagaaaagcattgctcatcaatttgt

SEQ ID NO: 240049 - DNA, 1404 bp, Homo Sapiens
tcccctaccatagagccttcacttctctctttcttttccagagtgtgcggacccaaagctcgccatcagtgctgtctggaccttcagagaccttgagaaagacaggaggtttcctgaatacaccgactcctgggtggaggtgggggggtcccagtcaggatgacatcccctgggtaaaaggtaacaaactgggacacccaggctatcaggtcctctgtcttgaataccatctggttggtgttgctgctctggaccacttccccattcactcgacagcagatctttaagttgtgtggatctgctacactgtccttggtcaccaaggcagggcccagagggcagaaggtgtcgaaggtttttcccagcagccactgtttcccattgcatcttgttagccagtcacgagcactcacgtcatgagccacagtgaagccggccacgtgggccatggcatctgtggcctatgggggcaggggatttggccatacaggaggatagatcatgggtgacaccaacacctgtggcaagggatctcaaagctgttatcccatgttagtagccagagccagccaaaggtgggtgaagggaaaggcagtgtcagggagcaaggaggctgactgcttcctagtgtcagggacagctggcaccatgtgttggtgagcgaggtcagaactaggagaggcaggagctggggcctctgctgcactctggactgggagcccaccctttccacctcaccttgatgtgcttgcctttctttccaatgaccacggccagctccacttcccaatctacctcctggctctgtggtgggaggaccacctcatcatagggccccacgatggagctggcaaacttgctgaagatgatgggctccttgggcacgggcacgttctgttctttgcagtggtccacataattcatgcccacacacaccaccttatctggtcgtgtgactggagccaggaaggttacctccgaccgtggtaggactggcaactgggcagccagggctctgtagagaccagagcaggtgagagggtctggctgggaacaggtgggcaatcccgggcaggctgggcagatcctgcagcagctacaggttttgctttttgaaatctatttcctagctctatcaaccatcagagtcagtgtgaaaatcactgactattgtcctttgctatcagagcagggcttttatttatccagtgttgatttcctctcccccttaggtaactcatgtccatgtaaaagatacaaactggaatacatggaaaggtttccctttccccttctggttaccccgttcccctggctcttcgcagctactctatggatattcttctcccacccttttgtatgcaaatgatagcatactatttacccaactttttttgtacaaag

SEQ ID NO: 240050 - DNA, 1554 bp, Homo Sapiens
caatgcttttttataatggccaactttgtacaaaaaagttgggctccggcaacgccaaccgctccgctgcgcgcaggctgggctgcaggctctcggctgcagcgctgggtggatctaggatctggcttccaacatgtggcagctctgggcctccctctgctgcctgctggtgttggccaatgcccggagcaggccctctttccatcccctgtcggatgagctggtcaactatgtcaacaaacggaataccacgtggcaggccgggcacaacttctacaacgtggacatgagctacttgaagaggctatgtggtaccttcctgggtgggcccaagccaccccagagagttatgtttaccgaggacctgaagctgcctgcaagcttcgatgcacgggaacaatggccacagtgtcccaccatcaaagagatcagagaccagggctcctgtggctcctgctgggccttcggggctgtggaagccatctctgaccggatctgcatccacaccaatgcgcacgtcagcgtggaggtgtcggcggaggacctgctcacctgctgtggcagcatgtgtggggacggctgtaatggtggctatcctgctgaagcttggaacttctggacaagaaaaggcctggtttctggtggcctctatgaatcccatgtagggtgcagaccgtactccatccctccctgtgagcaccacgtcaacggctcccggcccccatgcacgggggagggagatacccccaagtgtagcaagatctgtgagcctggctacagcccgacctacaaacaggacaagcactacggatacaattcctacagcgtctccaatagcgagaaggacatcatggccgagatctacaaaaacggccccgtggagggagctttctctgtgtattcggacttcctgctctacaagtcaggagtgtaccaacacgtcaccggagaatggcacaccctactggctggttgccaactcctggaacactgactggggtgacaatggcttctttaaaatactcagaggacaggatcactgtggaatcgaatcagaagtggtggctggaattccacgcaccgatcagtactgggaaaagatctaatctgccgtgggcctgtcgtgccagtcctgggggcgagatgggggtagaaatgcattttattctttaagttcacgtaagatacaagtttcagacagggtctgaaggactggattggccaaacatcagacctgtcttccaaggagaccaagtcctggctacatcccagcctgtggttacagtgcagacaggccatgtgagccaccgctgccagcacagagcgtccttccccctgtagactagtgccgtagggagtacctgttgccccagctgactgtggccccctccgtgatccatccatctccagggagcaagacagagacccaggaatggaaagcggagttcctaacaggatgaaagttcccccatcagttcccccagtacctccaagcaagtagctttccacatttgtcacagaaatcagaggagaaatggtgttgggagccctttg

SEQ ID NO: 240051 - DNA, 826 bp, Homo Sapiens
cagggacaaagagagacagcagctacaagtctataggcagtgacaaaggatctgagatcccatcagagtagacttcaagttggagaaaccttttattggcacaggcattccttgttaacttgacagggtgaagctgtaatttttcaaaaacagtaaaagctggtttctcctaaactattctccttgtggtagtagagatcagtgggtcagaaacaactcctgaccacttggtttccttttgagccgcgtcataaggaggcaatctgtaaaactagcacaggtctcccgctgttccactggctcacccacatgattagcagagtgcacgaaaaaataaaacttctattaaagaatcatgctgagcacaagatcagagaggttgtgacattgcaaactcgatagatgcagggggcctgggagactggcgttctccaaagggctcccaacaccatctctcctctgatttctgtgacaaatgtggaaagctacttgcttggaggtactgggggaactgatgggggaactttcatcctgttaggaactccgctttccattcctgggtctctgtcttgctccctggagatggatggatcacggagggggccacagtcagctggggcaacaggtactccctacggcactagtctacagggggaaggacgctctgtgctggcagcggtggctcacatggcctgtctgcactgtaaccacaggctgggatgtagccaggacttggtctccttggaagacaggtctgatgtttggccaatccagtccttcagaccctgtctgaaaagttgtatcttacccaacttttttgtacaaa

SEQ ID NO: 240052 - DNA, 552 bp, Homo Sapiens
ggggcctgccaagaaaagggaaaagtcagtggtggcccagaacagctgcccaaagtctgtatttcatgcccaagaacccaaccatatcccagggcttagaggaaaaggtgagcatcccttgggcctcaaccctactcacatcagggaaaggtgaaagggtaaactcccagatcaaatttgcacctactcacattctggaaccggcggtagggtacaaactgcacaatgtcgcgggcagcagcctgcccagaacgtgtatgcaggggtccaccatcagcgtccagctgctccatggcctcaaagtcagcaccacccacacccacaatgatcactgacatgggcaggttagaggcacgcaccacagcctcacgtgtggcttccacatccgtcacagcaccatcagtcagcagcaacagcatgaagtattgctggggacaagcccattcatgtcctgaagcagatcctcctcctaaacccctgcaaacaccccagccacacatccccacactcataagaagtcccttgttacaggccgggtgcgatggctcacac

SEQ ID NO: 240053 - DNA, 834 bp, Homo Sapiens
  misc_feature (782)..(790): n is a, c, g, or t
tcaactcctttattaaattggttgcaaaaaagatatacattcttatattgacaattcttgtcatgaataaaagcatcaaaaataaggcaacagcaagatgtgcttcacatataaacaatcatgttgtaagaataagaaacctgaatccctgtacaacaaaaagattaggaagcaaaatgtgaataagcttgtattcagaatatacctatatgtgtgtgcaaagacaatacactcatcatatacctcacttaggttcctttatgatgcataattccttaatcattcatttgtgaaacaagaatgaatattaagaaacatgaaatccaaattgcacttattttcacaatatcaatgctaaactcaaaatagcaacttcattgactctcaatggtaaatttcaaacatggaaagcaatcttaatttttttaaccctttgactagggtctgtaaaaaacggtggattattttactgtacttacaaagaggctgggtctcagcctgcacttaaacagcatgagcaacaaaggacaggaaacaaatatcactaagagtaatgcccatacatataaagatatctagttgagccacgttctacttacatagcaagcctattaaaccactagcataacagatcatatctcatgaaacagaattactaaattaactacacatctctcagaaatttccaaatccctgctcccaacacaattttagtacacctattaagtaccacgggtcatttagaaaaacagaaaaaaatatacacctagtctttgcaattnnnnnnnnntcataacataaacaatgttagatataaattttgaactcaatatg

SEQ ID NO: 240054 - DNA, 2144 bp, Homo Sapiens
taaggggtttaagtatattaatagccgtggtacataatccataaagataaaaacgaacccaaattcaagccaagtaatttccaatgatattctaaggctaagtctaaaagatgaatgttctgtaactttggccataaatcattttcttctatgaaaattttcttctagaataaataagatgggcatgacagcatgaaacttcatttcagcaggaaataaagacttaaaataaatgctttcaagaaatagtttatcaagagaatgagttctgaatcagttaacctcacacacggacacactgttgggcagaacacatgctggctggtacaaacatgccccagttgcacacccatcaaagaagaagaaattatgaacacttaaaattatggagaaataagatatctagtgatatacaggcatgagtccttcctcagttttcactcaaaccgtggagtcacttccgaagtagatttgaatctttgagtcaatagtctcagatccacacaagctagattttggtgtgtatcacccttcaggaaaattctgttgaatctgtgacactctgggataggactcagtcaagaaaattagttactgagctttcacgatgtgcctagtctttgtagctaataatcccacattttactctgagatgcccaattttacactttcaaaataagaaaaaaggcatttcataaaatgcacacaaattttaacataattcaaaatagagaatagcaaaaataaccttagagcaaacaaaaaattttattagattatatacctgagcaatagaaaacttcgagataacattttaaaaatattgacacgttaaggagtattttactttcaaaataccataaaattgattttaaattccctttggaagaaaacatcccctagtctccttcactaaattacaaataattacccaaatataaaaaggacttgcaatgtttgttaaatatggacggcatgaagacaattaagaaactataggacttatttccaacaagaatacaatatgcatgaagttttgaaaatgtgactttttaccacagtttctgagagtgtaatagtactaaatgttctaaatgtaatctttcagatccacgagcggtgaaagtaatgctggtttggaaaatgaggttgatacttcctctcttaagcttctcagtgaatggctgcttctgtttctaagctgcaggaacaaagcacctctatcatataagcacataaacacacaactcaactatccagatactcagggccacaatctcaaatctagggctgtataaattcaacaaattgatgacctagattgcatacatgtgctaatctatgcaatatatgattcacaaggttcatctaatgttaaaagtctagctaagtctttaataatttaatattaaataaaatattaattatttaaaatggtcactcataaaagaaatgtagtcataataagccccataatgatctccattcctcgcaagggaagcttgatttgaaactggcttgtaagtgaattgacttgtaagagaggtaaaaatgtgtcttacatgaattactatcccacagatatgatggaacataatgctagtttgacaattagatttttctaaccaatgactgggctttcactgaggaaaagagggatttctcaattattttcccagttagtaagggctggagagaacacatctagcctctgcttctaactagtccttaattgtagcttccaagggagaagccacgaatctaactggacagagcacaatcagtatgagaccaccttgtaaatgcaggcatgcaaccttcattgacaaacagcgcacatttaccagtatctcagacaactgaacatgtgaccaatctccttccaacttccctcccctcttcccgtgttgttactctccctacacacacaggttggggggagtagaggtaatatcctgggatctacacaagggtctagctgtcttgaattcaatgagggaaaagaaggaaaactgctttggccccagacataaatcacattcttttaagcacacagcaacttataaggagcttgcccagacttaatagcgttactctgcttctcattaagctagtgatcctcgtgtaggggatccaaaagccaa

SEQ ID NO: 240055 - DNA, 1047 bp, Homo Sapiens
gccctttcccatattttattaaattcgtgttttattttaaaaaattacagcaacattatcaaagacaacatatgtacaaacattttacaaaaaagaacattaccaatatcagtggcagtaagggcaagctgaagaataaatagactgagtttccgggcaatgtctgtcctcaaagacatccaaactgcgttcaggcagctgaaacaggcttctttcccagtgacaagcatatgtggtcagtaatacaaacgatggtaaatgaggctactacataggcccagttaacaaactcctcttctcctcgggtaggccatgatacaagtggaactcatcaaataatttaaacccaaggcgataacaacgctatttcccatctaaactcatttaagccttcacaatgtcgcaatggattcagttacttgcaaacgatcccgggttgtcatacagatacttgttttttacacataacgctatgccatcccttccttcactgccccagtcaggtttcctgttgttggaccgaaaggggatacattttagaaatgcttccttcaagacagaagtgagaaagaaaggagaccctgaggccaggatctattaaacctggtgtgtgcgcaaaagggagggggaaggcaggaatttgaaaggataaacgtctcctttgcgccgaggaatcaggaagcgtgactcacttgggtctgggacgataccgaaatccggtaccccaccccatcccctgccccgccgggtacctacaagctcggttcctttctcaactcccccagttccttgatctccaccttcttgtacttccccgactttctccggttggtgatcaccaggacggccatgccggcgacgagggccaccacgaccaccacgatgacggcgatgaggccggcggtgaggcgcttcatggagaacttcgggggaatctcgtccaggtaatagatgagcgtgcgctccacctgcaggggttctccgcgcacgcgcaagtccaggccgccgcggccgtggaatagagccaacttttttgtacaaagttgg

SEQ ID NO: 240056 - DNA, 1595 bp, Homo Sapiens
gcatatgtggtcagtaatacaaacgatggtaaatgaggctactacataggcccagttaacaaactcctcttctcctcgggtaggccatgatacaagtggaactcatcaaataatttaaacccaaggcgataacaacgtatttcccatttaaactcatttaagccttcacaatgtcgcaatggattcagttacttgcaaacgatcccgggttgtcatacagatacttgttttttacacataacgctatgccatcccttccttcactgccccagtcaggtttcctgttgttggaccgaaaggggatacattttagaaatgcttccttcaagacagaagtgagaaagaaaggagaccctgaggccaggatctattaaacctggtgtgtgcgcaaaagggagggggaaggcaggaatttgaaaggataaacgtctcctttgcgccgaggaatcaggaagcgtgactcacttgggtctgggacgataccgaaatccggtaccccaccccatcccctgccccgccgggtacctacaagctcggttcctttctcaactcccccagttccttgatctccaccttcttgtacttccccgactttctccggttggtgatcaccaggacggccatgccggcgacgagggccaccacgaccaccacgatgacggcgatgaggccggcggtgaggcgcttcatggagaacttcgggggaatctcgtccaggtaatagatgagcgtgcgctccacctgcaggggttctccgcgcacgcgcaagtccaggccgccgcggccctggaatagagactcgcccttgatgtccctctcgaagtagtaggcggcatcgccgatatccacgtcaccggcggccttctgagacgtgttctgccgcagctcgatctggatggtgggctgctcgtagtgcacggccgccacgaacttggggtgcagccgatagcgctcgcggaagagccgcctcagctcggcgtccaggtctgagtggttgaaggcgccggcggtggggcggtggcgcaggtcaatgaggatgtggtgggtgcgcaccagctcatcgcagcgtaggctcaggtcgcccttgtccgtgcggcgcacgcccaccgagttcacgcaccagcacaccgacgtctggttgcactggcgcgccttgaagcggccctcggggtcgcagtcggggtcgtagaggccatcgttgtccacgagcgcgtgctcactcggccgcaccagcgtgcgggcgttcttgggggcgctcatgcgcgccttgagcagcagacacttggaggtcagcgtggagcagtcgaccgccatgcccgagcccagcgcgcggcactggcagcggccgccggggccgtcggggctgcacacggtcatcttgttggtgggacacgtgcagttgtcctgcgcggccgtgtggccggtcaccgccgccagcaccagcagcagcagcggcagccgcagcggtggcggcgcgaggccggggccccgagccatggtggggcggaggaacgcggaccggacgcgggcggatgaggcgcggggactcgtcggggctcgggctccggcgtctgggatggccaacttttttgtac

SEQ ID NO: 240057 - DNA, 1115 bp, Homo Sapiens
ttggctcacctggtaccatactcccaatgttgtattcatcaaaactgaggatcctgacttgccagctttctactttgaccctttgatcaacccaatctcccataggcactcagtcaagagccaggaaccattgccggatgatgatgaggaatttgagctcccggagtttgtggagcccttcctgaaggacacacccctctatacagacaatacagccaatggcattgccctgctctgggccccgcggcccttcaacctacgctctggtcgcacccgtcgggccctggacataccccttgtcaagaactggtatcgggagcattgtcctgccgggcagcctgtgaaagtgagggtctcctaccagaagctgcttaagtactatgtgctgaatgccctgaagcatcggccccctaaggctcaaaagaagaggtatttgttccgctccttcaaagccaccaaattctttcagtccacaaagctggactgggtggaggttgggctccaggtttgccgccagggctacaacatgctcaaccttctcattcaccgcaaaaacctcaactacctgcacctggactacaacttcaacctcaagcctgtgaaaacgctcaccaccaaggaaagaaagaaatctcgttttgggaatgctttccacctgtgtcgggaagttctgcgtttgactaagctggtggtggatagtcacgtgcagtatcggctgggcaatgtggatgccttccagctggcagatggattgcagtatatatttgcccatgttgggcagttgacgggcatgtatcgatacaaatacaagctgatgcgacagattcgcatgtgcaaggacctgaagcatctcatctattatcgtttcaacacgggccctgtagggaagggtcctggctgtggcttctgggctgccggttggcgagtctggctctttttcatgcgtggcattacccctttattagagcgatggcttggcaacctcctggcccggcagtttgaaggtcgacactcaaaaggggtggcaaagacagtaacaaagcagcgagtggagtcacattttgaccttgagctgcgggcagctgtgatgcatgatattctggacatgatgcctg

SEQ ID NO: 240058 - DNA, 1500 bp, Homo Sapiens
  misc_feature (182)..(190): n is a, c, g, or t
aatctattggatatgtattctttcctggtaggaatttacacacgtaaagtaagggactctaccaaatgaagtcttctcaacattaccagatggaagaatcttctcaacaatattgatttcaccttgttattgcaaaaaaataaaagagtggttattaatggcttttccacatattcctgggnnnnnnnnnctccagggtggtgaataaagtgtgggccatattacttcacagtcatcactttcacataaggcttctttccaagagttctctgaagtaaggcattatacttctttttaaaaaattccatacattcatagtttttctttgcagtgtaaattcactggtgttcagtaaggaatgagtggtaattaaatgaattttcatattcataggggttgtcaagagtgtgtgtcctctgatgtttagcaaggtttgagctccagctgaaggatttgttgcataccttacatacatagggtttctctccagtatgagttctctgatgtagaatgagggaaaagctccggctgaaggctttatcacattcagcacacgcatagggtttctctccagtgtgactcttcgtatgttgaataagggatgcatgccaagtgaaaactttaccacattcatcacattcatagagcttttctccagcatgaattctctgatgtttaataaggaatgagtgacaacggaaagctttcctacattcattacattcatacggggttttggttgtatggatgctctgatgtcgagtaaggtgtgagaaacggcgaaatgccttcccacattcaatgcattcataaggtttctctccagtatgtgtaatctggtggcgaatgagttctgagccactgctaaatgctttaccacatttcctacatatatattgtttctttcctatgtgaattctttgatgtcgagtgaggttggaggcacggctaaaggcctttccacactcagtacattcataaggtttctccccagtgtgcgttctctggtgttcaataagaaatgaaaggtaactgaatgttttattacagtccttacactcatggggtttctttccagtatgtatcatttggtgtttcacaaggtttgaaatctggctaaaggttttgccacattccttacatgcatatggtttctctccagtatgagtcctctggtgtaacaccagggaaaagcgtcgaccaaaagtttttccacattcatggcatccatagggcctctccacagtactgatattcatatgttgagccagggcttcttgatgagagactgttactttcctaatacatccctgattttcttgcagcatctcagtatgatccttgcatttccagcctcctttaaaactggaatacacagggccttgacttagaattctttccatgatcaaatactgggatgagtcatcataaatgacattttttggtgaaaagtctttgatctcaccacttgactctgaaactgaaagccaacttttttgt

SEQ ID NO: 240059 - DNA, 1539 bp, Homo Sapiens
ttggattggagacaagatggcgctgcgggcgatgcgggggattgtcaacggggccgcacccgagctacccgtgcccaccggtgggccggcggtgggagctcgggagcaggcgctggcagtcagtcggaactacctctcccagcctcgcctcacatacaagacagtatctggagtcaatggtccactagtgatcttagatcatgttaagtttcccaggtatgctgaaattgtccatttgaccttaccggatggcacaaagagaagtgggcaagttctggaagttagtggttccaaggcagtagttcaggtatttgaagggacttcaggtatagatgctaagaaaacgtcctgtgagtttactggggatattctccgaacaccggtgtctgaggatatgcttggtcgggtattcaatggatcgggaaaacccattgacagaggtcctgttgtactggccgaagacttccttgatatcatgggtcagccaatcaaccctcaatgtcgaatctacccagaggaaatgattcagactggcatttcggccatcgatgggatgaacagtattgctagggggcagaaaattcctatcttctctgctgctgggctaccacacaatgagattgcagctcagatctgtcgccaggctggtttggtaaagaaatccaaagatgtagtagactacagtgaggaaaattttgcaattgtatttgctgctatgggtgtaaacatggaaactgcccggttcttcaaatctgactttgaagaaaatggctcaatggacaatgtctgcctctttttgaacttggctaatgacccaaccattgagcgaattatcactcctcgcctggctctaaccacagctgaatttctggcgtaccaatgtgagaaacatgtattggttattctaacagacatgagttcttatgctgaagcacttcgagaggtttcagcagccagggaagaggtacctggtcgacgaggttttccaggttacatgtatacagatttagccacgatatatgaacgcgctgggcgagtggaagggagaaacggctcgattactcaaatccctattctaaccatgcctaatgatgatatcactcaccccatcccagacttgactggctacattacagaggggcagatctatgtggacagacagctgcacaacagacagatttatccacctatcaatgtgctgccctcactatcacggttaatgaagtctgctattggagaagggatgaccaggaaggatcatgccgatgtatctaaccagctatatgcgtgctatgctattggaaaggatgtgcaagccatgaaagctgtcgttggagaagaagcccttacctcagatgatcttctctacttggaatttctgcagaagtttgagaggaacttcattgctcagggtccttacgaaaatcgcactgtctttgagactttggacattggctggcagctactccgaatcttccccaaagaaatgctgaagagaatccctcagagcaccctcagcgaattttaccctcgagactc

SEQ ID NO: 240060 - DNA, 1255 bp, Homo Sapiens
gcttttttcctattaagccaactttgtacaaaaaagttggcacggttaatgaagtctgctattggagaagggatgaccaggaaggatcatgccgatgtatctaaccagctatatgcgtgctatgctattggaaaggatgtgcaagccatgaaagctgtcgttggagaagaagcccttacctcagatgatcttctctacttggaatttctgcagaagtttgagaggaacttcattgctcagggtccttacgaaaatcgcactgtctttgagactttggacattggctggcagctactccgaatcttccccaaagaaatgctgaagagaatccctcagagcaccctcagcgaattttaccctcgagactctgcaaagcattagctgctgcttctgcattgctccgcgctcttgtgaaatactggttctgttttctttattccttttgcactctcggttcccacctttgtgttggagtttaccatgttaccctgtaattaaaaacaaagaataggtaacatattgtgccagtgttgcaacgttttaaactgctaacagaccttaaaatatccccctacctgggtcctcagtgctatgtttaaagtgctgcagggatggagtggcgttttcttattgctgtatgtattgtacatagtggagtagttagttacctgataacagtcttgttatttgggtctcttagaccttacctctcaactccctcaagagtaccagtctctgaagttataatgctttggtctctacattaggggcaagatccagtctgagagaagtctcctttgagaagggccaagaggctctttcctgagtgtttgctttcggtttgttggtatgcctgtattgctgggctgtgctgctgctcgaagcagatggttttgactgtctttttgctctttcctatataatgaatagatgagtgaaaggagttttctttttctctttagtacttacgtattgggattcctgtgtcttacagctctccctctccaaataatacacagaatcctgcaactttttgcacagctggtatctgtctggtagcagtgagaccccttgtcttggtgatccttactgggtttccaagcagaggagtcacatgattacaattgccagtagagttgtttgtttggggtacaagatgaaaagaaagaaaaacctacagcctttctacattctgacatgctaacagtgggtttagtttctaaagtgtttaccagatgctgaaggcaaggggagg

SEQ ID NO: 240061 - DNA, 905 bp, Homo Sapiens
gagcaatgctttttctattatagccaactttgtacaaaaaagttgggatggttttgactgtctgcttcgagcagcagcacagcccagcaatacaggcataccaacaaaccgaaagcaaatggttttgactgtctttttgctctttcctatataatgaatagatgagtgaaaggagttttctttttctctttagtacttacgtattgggattcctgtgtcttacagctctccctctccaaataatacacagaatcctgcaactttttgcacagctggtatctgtctggtagcagtgagaccccttgtcttggtgatccttactgggtttccaagcagaggagtcacatgattacaattgccagtagagttgttgtttggggtacaagatgagaagaaagaaaaacctacagcctttctacattctgacatgctaacagtggtttaagtttctaaagtgtttaccagatgctgaaggcaaggggagggagcagaagcacttatgtttacggatattttaaactctgttagagagcagcctttgaaaatccccaatttggttctgctttttgacctctctctaccttttcagggtaatctttgtggcacaaacgatagcatttccaagctttagagttttctgaattcctgcgccttcctgacgtgagccctgagcgatcttctatgcagttctgccatgcgtcctgttggtctctctgtgttctttgttacttgggtgcaatagcaacttccctaccccgtgcattccatctttcatgttgtgtaaagttcttcacttttttctctgagggctgggggttgggggagtcagcatgattatattttaatgtagaaaatgtgacatctggatataaaatgaaaataaatgttaaattaaatgggacctt

SEQ ID NO: 240062 - DNA, 1756 bp, Homo Sapiens
cattcccagcccactgggtcctggggctcctttccagacacctatctacatttggcctctctacttcaggttgcttcccccagtggctcatcttaagccaacaaatcacgtccaagtaaaacttcattggactccatgcccggaggcagaaacagctggttttccatcaaaatgtaccccagccttggcatacttcatcaggttctgccatgctggcctaccgcagcccagcccggggcgtattgcttctggtaagggtctggcaggaagctgcagcctttctcaagagcagccaggatctcctgcttggtgctgtttttctccaggttgcgatccaaataacccaccagcttcttgcacacttcgcagaagccaccgtcctttggctgagtcacgtgaacggtcagtgcaggcagccgcgtgccagagcagaggtgcagcatgctgcacaccagctcagggctgacctcctccagcaggatggacaggatggagctgccgtacgtgtccaccacctcctggcactcttccgacagggacttcggcagcttcgagcacattttgtcaaaagcgtcgagtatttctttctcagtcttgttgttgtcaatcagcttggtcacctccttcaccaggaattcacacacctcacagtaaacatcagactttgctgggacctcgtgcttcttaatgggctccaccagttccagggcagggatgacattcttggaggccactttggcggggaccagagtctgcatgggcatctctttcacctcatcacagaacccaaccagcgcacagatctccttgggttgctgaagagagcacagaacaaccagtcagcagcaagcctacgcccactgctcctcagtcccaatccagccagaggacagggagctggacagcaccctgggcccaggtcaaggctacctccctctccccctcccacaacggggcagattccagtttccatgttaaagggctcgtgtctgaagcagtgcatatgtgccagttacatctcggggaggagaccacacaaagctcctaaggaacatcaaacagagtctccatccagggccaccacgagggagactccccagcaccttccacatctccaaggacacctggtctgttctagaatgtgtcttttcaggtcactctaggtaggaactaagctatgcttttttctagagggggaactaccatgcccataaactaacagaaagccaaatgtgttagaaataaaaccacaccagatttttcagcggcaggaccatttaaaatgatgcattaaggggaaatgctggctttttaaaaaaccacattctatgttcaagctgcacacagtgcacatgaaaacccaacccgccaaatggatgaatcattttaagccacaaggtctccagattgatcccctttcaccatttagacaccaaacacagagcactagatagtctagacatcctgaccatgacactctgatggccaagagtgagacaagtgtatagactctgtatattgtggaaataaatgcaaccagcaactagctctgagcctgagtgcatttgccttccagcaccaaaccctaaagcagcaggaacaaaagtgctaaaaacaggacctgttaagggaaaagagctagaccatgactatggctcatcttgttttaatatcaagaaggttcgagaattaataagaccgggggagtctgaaaagtatatcccaaataccctgtctctgccacaccttaagaatg

SEQ ID NO: 240063 - DNA, 1281 bp, Homo Sapiens
ttggcttgctaccagtggaacagccactaaggattctgcagtgagagcagagggccagctaagtggtactctcccagagactgtctgactcacgccaccccctccaccttggacacaggacgctgtggtttctgagccaggtacaatgactcctttcggtaagtgcagtggaagctgtacactgcccaggcaaagcgtccgggcagcgtaggcgggcgactcagatcccagccagtggacttagcccctgtttgctcctccgataactggggtgaccttggttaatattcaccagcagcctcccccgttgcccctctggatccactgcttaaatacggacgaggacagggccctgtctcctcagcttcaggcaccaccactgacctgggacagtgaatcgacaatgccgtcttctgtctcgtggggcatcctcctgctggcaggcctgtgctgcctggtccctgtctccctggctgaggatccccagggagatgctgcccagaagacagatacatcccaccatgatcaggatcacccaaccttcaacaagatcacccccaacctggctgagttcgccttcagcctataccgccagctggcacaccagtccaacagcaccaatatcttcttctccccagtgagcatcgctacagcctttgcaatgctctccctggggaccaaggctgacactcacgatgaaatcctggagggcctgaatttcaacctcacggagattccggaggctcagatccatgaaggcttccaggaactcctccgtaccctcaaccagccagacagccagctccagctgaccaccggcaatggcctgttcctcagcgagggcctgaagctagtggataagtttttggaggatgttaaaaagttgtaccactcagaagccttcactgtcaacttcggggacaccgaagaggccaagaaacagatcaacgattacgtggagaagggtactcaagggaaaattgtggatttggtcaaggagcttgacagagacacagtttttgctctggtgaattacatcttctttaaaggcaaatgggagagaccctttgaagtcaaggacaccgaggaagaggacttccacgtggaccaggtgaccaccgtgaaagtgcctatgatgaagcgtttaggcatgtttaacatccagcactgtaagaagctgtccagctgggtgctgctgatgaaatacctgggcaatgccaccgccatcttcttcctgcctgatgaggggaaactacagcacctggtaaaatgaactcaccc

SEQ ID NO: 240064 - DNA, 928 bp, Homo Sapiens
actttgtacaaaaaagttggctagataatatgactccacagcccatatacttagcaattatatatataatgttaagcatagcaatctcaacatatgtatgttacatgcttgtgtaacagtgactcttcctagtcggctaagaatgggttacaaatgcctcaggatagctatgtccaacctggctggaggctctcaagggctgcacccaagtatcctcctgcagtgagcagctgactcaagtcaccacagtgtgcttgctgtataaatgttattttttgtgagtgttgacaggaaaaagtttaggatgaaacactgtgttcagtacataacactacagttgcagtcttgtcactaattcttgtaaataccgaatttttaaaaaatctcttactttttttgtaacaaagagtataaactataggctttatttcttcttcagtactagtactactgaaaacacaactgctaacataaaaggatcgttttctaattttagacacttcttactcgggagaagttatcttgattacccagcttttttccttatagtttcttgcagaacataaattattaggaaacattaaaaatgtggccaagacagctaacaaggaccacttggttacagcctataaccatctttttgaaactaagcgttttaagggtactgaaagtataagtaaagtgtctgagcaagtaaaaaatgtgaagcttaatgaagataaacccaaagaaaccaagtctgaagagaccctggatgagggtccaccaaaatatactaaatctgttctgaaaaagggagataaaaccaactttcccaaaaagggagatgttgttcactgctggtatacaggaacactacaagatgggactgtttttgatactaatattcaaacaagtgcaaagaagaagaaaaatgccaagcctttaa

SEQ ID NO: 240065 - DNA, 1699 bp, Homo Sapiens
  misc_feature (539)..(551): n is a, c, g, or t
  misc_feature (591)..(607): n is a, c, g, or t
  misc_feature (787)..(817): n is a, c, g, or t
  misc_feature (1121)..(1130): n is a, c, g, or t
  misc_feature (1256)..(1279): n is a, c, g, or t
  misc_feature (1477)..(1485): n is a, c, g, or t
gaaatttaatggcatcttttgtcaaaaatagtcttatttccactttaagtctcatgactacaatactatagtgctatccctgtagtatttacaatacagtcatcaaaaatatctgaaaacaaatcttggacccttgtgaaatagtgcatccctccacttctataaaaataggagccacacaaagatctaaaaagagtgctgactgcccagatccagaacagaggtacttaacacctttgttttccagtttagttatcaaagcgtggtgtgaacaaaatgcttagtgtcacactggcattacaaataggcccaaaattttgagcttttaacaagattgagaaacattatatgagatttaactcaatatgccttaacacatccatgaggtagttaggtaaacagtactacccattttaattacacagtaaacagaagcacgggtaagtgacatactcatactttaagcaataagaattagaagaaaccatagaagcttggggccttctctctagctctaacccaaagaaaatgaattttannnnnnnnnnnnnaaaagaaaacagcatcaatcacttaagattttcttcctcnnnnnnnnnnnnnnnnnacacttgcttattagtatagcatctcgttccaaagctggtaccttttcttcaacaatgtgttaaaaactgagtataacccttaattcaaggtaggcctctacttctacctgaattggtacaaaattaagacattatcttgtaagaactaaaattgtatttgaaatttttattttagctgnnnnnnnnnnnnnnnnnnnnnnnnnnnnnnntaacttgaaaataggcttgtcaaatgatgtaaattcatcctttccagggaagcagaaggtagaccctaccacaaagaaaagatgcttagttaatggaggttaaatttaaaaatacagttaaattcaggctaacttctgaaaatcccgttttattcacctcactgtggtaccagtaactatactgagtcaggttactttacagttaactatgtcacctaaaacacaataatccattaacactctaataacagttattgggtgtggtcatactggaaattcttaaccatatagttgtcttgccaannnnnnnnnnaaacaataaattgtcttagtataagtcactgcatttctgtaacaaagtaatgaaaggcacagctaatccaagcggacttaaccctattcaacaaccagctgaaaaaatactttggttcttcaaggnnnnnnnnnnnnnnnnnnnnnnnnggtatttcctttaacagttgttaattttcatagctgtactccaagagctacataaaaatattccagaagaaccaaattatgtagcaatgaatgaacatgcgtgacagaatttgtgcattcaacatagctggcagaaaaactagttaaaatgctaggtagaacaaattggtctttaaaatatcagtttcctgtcctttnnnnnnnnnttacctagtctaccaagaaaatacaaaaacataaggctgtaagtaaataagagttgtgtttaggctattacagtgcaggttatcctcaaggccacatacatcctgcttcactgctgcttgcactctgctgggttttgatccttctttgggtcatagtctggatcattttcctcatctccttcttcttccccttcctcatccgcttcttcaccaa

SEQ ID NO: 240066 - DNA, 1386 bp, Homo Sapiens
  misc_feature (1124)..(1141): n is a, c, g, or t
  misc_feature (1181)..(1196): n is a, c, g, or t
cattttggaactggaaaaatggcataaacactgacgtcccttaaaacttcaattttataaagaaaattcttctgcaaaccacatcccctttatgtaacaagactaggtattatctacaccttcactttggcaatagctatttcctaaagaatgaaaaagatgatttgctacttcagttcattaaaaatgggattctatctttgaagttcagaaaaagctgcatttcgatgaactatggttaaataaaaaaagcacatagtgtctaatcaaagcaaaggaaatcattttgaaaataaagaaaaaaagctattataattggttaaggatttccagtagtaagttaaaatctcaggagaggaatggatagcactacaaacaatgtgttcacattccaagaccttaacactaacttctcagaaaggaagttttcattacctctaaaaatcaattcaatgtaattttattaagagcaggaaatctagaccttcctctaatgacaatccaataatccaccctcactgtcaaaaaaaagttcaaccccaaaattaacagtaattagcctgaggtattgtaaatgtggctctacagtctgaaatttaatggcatcttttgtcaaaaatagtcttatttccactttaagtctcatgactacaatactatagtgctatccctgtagtatttacaatacagtcatcaaaaatatctgaaaacaaatcttggaccttgtgaaatagtgcatccctccacttctataaaaataggagccacacaaagatctaaaaagagtgctgactgcccagatccagaacagaggtacttaacacctttgttttccagtttagttatcaaagcgtggtgtgaacaaaatgcttagtgtcacactggcattacaaataggcccaaaattttgagcttttaacaagattgagaaacattatatgagatttaactcaatatgccttaacacatccatgaggtagttaggtaaacagtactacccattttaattacacagtaaacagaagcacgggtaagtgacatactcatactttaagcaataagaattagaagaaaccatagaagcttggggccttctctctagctctaacccaaagaaaatgaannnnnnnnnnnnnnnnnnaaaagaaaacagcatcaatcacttaagattttcttcctcnnnnnnnnnnnnnnnnacacttgcttattagtatagcatctcgttccaaagctggtaccttttcttcaacaatgtgttaaaaactgagtataacccttaattcaaggtaggcctctacttctacctgaattggtacaaaattaagacattatcttgtaagaactaaaattgtatttgaaatttttattttagctgcaaaaacccaa

SEQ ID NO: 240067 - DNA, 1784 bp, Homo Sapiens
  misc_feature (243)..(253): n is a, c, g, or t
  misc_feature (1131)..(1143): n is a, c, g, or t
  misc_feature (1183)..(1198): n is a, c, g, or t
  misc_feature (1378)..(1408): n is a, c, g, or t
  misc_feature (1712)..(1721): n is a, c, g, or t
ggaatcatttggaacggaaaaatggcataaacactgacgtcccttaaacttcaatttataaagaaaattctctgcaaaccacatccccctttatgtaacaagactaggtattatctacaccttcactttggcaatagctatttcctaaagaatgaaaaagatgattttgctacttcagttcattaaaaatgggattctatctttgaagttcagaaaaagctgcatttcgatgaactatggttnnnnnnnnnnngcacatagtgtctaatcaaagcaaaggaaatcattttgaaaataaagaaaaaaagctattataattggttaaggatttccagtagtaagttaaaatctcaggagaggaatggatagcactacaaacaatgtgttcacattccaagaccttaacactaacttctcagaaaggaagttttcattacctctaaaaatcaattcaatgtaattttattaagagcaggaaatctagaccttcctctaatgacaatccaataatccaccctcactgtcaaaaaaaagttcaaccccaaaattaacagtaattagcctgaggtattgtaaatgtggctctacagtctgaaatttaatggcatcttttgtcaaaaatagtcttatttccactttaagtctcatgactacaatactatagtgctatccctgtagtatttacaatacagtcatcaaaaatatctgaaaacaaatcttggaccttgtgaaatagtgcatccctccacttctataaaaataggagccacacaaagatctaaaaagagtgctgactgcccagatccagaacagaggtacttaacacctttgttttccagtttagttatcaaagcgtggtgtgaacaaaatgcttagtgtcacactggcattacaaataggcccaaaattttgagcttttaacaagattgagaaacattatatgagatttaactcaatatgccttaacacatccatgaggtagttaggtaaacagtactacccattttaattacacagtaaacagaagcacgggtaagtgacatactcatactttaagcaataagaattagaagaaaccatagaagcttggggccttctctctagctctaacccaaagaaaatgaattttannnnnnnnnnnnnaaaagaaaacagcatcaatcacttaagattttcttcctcnnnnnnnnnnnnnnnnacacttgcttattagtatagcatctcgttccaaagctggtaccttttcttcaacaatgtgttaaaaactgagtataacccttaattcaaggtaggcctctacttctacctgaattggtacaaaattaagacattatcttgtaagaactaaaattgtatttgaaatttttattttagctgnnnnnnnnnnnnnnnnnnnnnnnnnnnnnnntaacttgaaaataggcttgtcaaatgatgtaaattcatcctttacagggaagcagaaggtagaccctaccacaaagaaaagatgcttagttaatggaggttaaatttaaaaatacagttaaattcaggctaacttctgaaaatcccgttttattcacctcactgtggtaccagtaactatactgagtcaggttactttacagttaactatgtcacctaaaacacaataatccattaacactctaataacagttattgggtgtggtcatactggaaattcttaaccatatagttgtcttgccaannnnnnnnnnaaacaataaattgtcttagtataagtcaggtgcatttctgccaacttttttgtacaaagttgg

SEQ ID NO: 240068 - DNA, 1095 bp, Homo Sapiens
  misc_feature (980)..(992): n is a, c, g, or t
ttggctgggtgaaaaaagatagtttgtcctgcttattattgagtgcttctatggatcagactattctcttatgggagtggaatgtagagagaaacaaagtgaaagccctacactgctgtagaggtcatgctggaagtgtagattctatagctgttgatggctcaggaactaaattttgcagtggctcctgggataagatgctaaagatctggtctacagtccctacagatgaagaagatgaaatggaggagtccacaaatcgaccaagaaagaaacagaagacagaacagttgggactaacaaggactcccatagtgaccctctctggccacatggaggcagtttcctcagttctgtggtcagatgctgaagaaatctgcagtgcatcttgggaccatacaattagagtgtgggatgttgagtctggcagtcttaagtcaactttgacaggaaataaagtgtttaattgtatttcctattctccactttgtaaacgtttagcatctggaagcacagataggcatatcagactgtgggatccccgaactaaagatggttctttggtgtcgctgtccctaacgtcacatactggttgggtgacatcagtaaaatggtctcctacccatgaacagcagctgatttcaggatctttagataacattgttaagctgtgggatacaagaagttgtaaggctcctctctatgatctggctgctcatgaagacaaagttctgagtgtagactggacagacacagggctacttctgagtggaggagcagacaataaattgtattcctacagatattcacctaccacttcccatgttggggcatgaaagtgaacaataatttgactatagagattatttctgtaaatgaaattggtagagaaccatgaaattacatagatgcagatgcagaaagcagccttttgaagtttatataatgttttcacccttcataacagctaacgtatcacnnnnnnnnnnnnngtatttataataagataggttgtgtttataaaatacaaactgtggcatacattctctatacaaacttgaaattaaactgagttttacatttctctttaaaggt

SEQ ID NO: 240069 - DNA, 893 bp, Homo Sapiens
  misc_feature (71)..(79): n is a, c, g, or t
ggcctttttaaaaaacttttatttgagtgggtcttacaaaaattgttgcaatatgaaagtcatttgtttgnnnnnnnnntcaagctgtcttggcaaacacactgaaataacccaaaaatatatttcaaagctcacagagcttaaaaagagccaaagattatatgcaaccagacaaaacctatttctgcatttcctatttctttctcagactgctttgcctaccagactctcacgtttaaacatcttcaggaaatgcagggatcattttgtttggaattttaagacacaccagaacacatagtatttacaaagaaacttttacagatacattaattgaaaagataccatcaagaaatataattttgaaatctccctttcttgccaattgatcagaatgcaagatgagatgctaaccaaacagccctttagctgtcttgtatttccatacactaaatgtgtatttcagaaactgctcaaccatcagccaaatatcaacattagtgaaatgtgaaatgtaaccactgtgtaaaaagttaggcttctgaaacattaaaaacattacatccctggtctgcctttttacagaaagcacatttgttctcctagagctattcctatagttcattaattttctacatgaacattttaaaaggcagaacaagagaacagttttgtatacagtgggatttactatttagggagaatgagcacactgcattcctgttaacatttttattttttcaaggtaacaggaaattgcatacaaatgacagtagatccttgcctctttatttttatctaaataaaagataactcaagatgaattctcaagaaagaaaaaaagctatatacataaggggctatatcttccccaacttttttgtacaaagtgg

SEQ ID NO: 240070 - DNA, 1231 bp, Homo Sapiens
  misc_feature (183)..(195): n is a, c, g, or t
  misc_feature (1160)..(1170): n is a, c, g, or t
catcatgaggacgaagtggtaacatttcaagttgtcaaagggtaaagggaacaggaataagaaaatacaaaacaattttaaaactaattatttacttatagtttaacatggaaggctataaaaaaatttagatgggtatgtgtttaaccactttgttgcttacatttaagtcatcaagatacnnnnnnnnnnnnnttttccatattaacatgttaaattttactttcttatatagtttagatattaaaagttatccagatttacaatgttgaagtggttaaatataatttccataaaacatgaagtcctgttttgagttttattccatgtgctatggtccctttggtcagtaccatggctctatttctgcctaagccccaagtggccatgctagcagccagccactatcgatttcctgtgaccgatgccattcctgagatcttcgcccatttccgttggagggttgggactgtaagagcttgatgccacctctgtcacacatctcgccctgaagcaaacagggattcacactgctttagtaatgttgactcccaagaacccaagaaagtcaattaataatccaccaagtccagcctaaacatttcctacttccatacctgtttacatggaattacatccatgttaaaaaaaactaagacacaagaatcttaacattaaaacagaaagtagctcttcaagagtctaagcattacaaaattacatacactatttaaatctatcaagaattcatccaaattggtaccacatggtcgtgctatacaatccaaaacaaatgtattatttttaaaaggtttagtgaaatgtttattttaaagtttgattacatcagctataggagtaaagtgctaacttacaaagcttacagtttgtgacaccagtgataatgcatgcatactgctattttcaccaccaactggtgaaacaatgaaaagacagtttacttttactgagataccgaaatgagtcaaagactatattagccaatataattcctttgtttttagtgtgaaatactatggtagggcctaattaaaaataaaaacaatatggagaacagtaaaacagtcatcaagtgactctaagcttgtatttactctaagcttgtattaagcttgtattgactctactgcctcttgtannnnnnnnnnnaatttctattcagggatccaagaattttagtaattattaactgagcagcagattgccccaa

SEQ ID NO: 240071 - DNA, 3843 bp, Homo Sapiens
  misc_feature (448)..(466): n is a, c, g, or t
  misc_feature (2246)..(2255): n is a, c, g, or t
  misc_feature (3655)..(3663): n is a, c, g, or t
aataaaagataactcaaagatgaattttcaagaaagaaaaaaatgctatatacataagggactatatcttctttcatcgtctacttggaacccagtagctgtgttgctgtcatagaatcaggaaaccaggttgtggtaagttggaagagggtacatatgctgctgttatcattttaccagcaaaccacctgccatgcaatgcattgacagcagcaatagctgcagcaattgatgggcacttcacatacacattgccctgagctgaatttttgtcaacataaatatgaataactcctccatgtttatttacattcttcaatcacatcatccttaatctcggtatcccatccaacttcttcttctgtttgagggttaaacatgttagagagttggaaacattgtgttgcaagtggctgaacagaggcagctgcagctaaagctgaagctnnnnnnnnnnnnnnnnnnnttagtttcatggaaaatgcatgaaagtatccctcataaatactttaaaacgaaaccaaaaacccaccccaagcatgtaactaggatgtcactggagttattttaacttatttaatattgctactaatgtatgttatcagtagcttttaggtgccagaaaactgaggtaacctaatacttgaaacagacattcagaaatttgggagtcctattttaacagggaaattaaactttatgtgttatcaaaatcagttcaattagacaaaatctcaatacacatcaatccaaacagatgaaggataaaatagatttgagtttatacccaaataagaggggataataaaacaaaatcctttgaaatgccaaataaatctatatcctttcctatttcttcgctttctgcccacgaagttttttaaatctacaaattattaaagaattaagacatataaaatcatccaagtgtttaaagacaatgtcctagaaaaataaatcctattaacaatcctattaaaaataaatcctattaataaatcaaatgttttaaaaatgttttcgcacaataaaagaacactgaaaagagcagcatatatgtgtaatatccactactaccaaaacatactggggtttgaagtttaaagagcattttccaagacagttgctccaatgctttcacgtgatttacaaaaatattaccagtagctgttacagaactcaccgtaatcatattatctgaccaaatttcattccaaaacataataacaaacaaagctaaggataaaacagtgcattagaaattatggtaattaaaataaacgatcacttaaagtatcagaaatattacaccgagaaattagggctgtgcatgaaatatatcataaatgataactttctggtagcattacaggtgctttagcttctctgtaacatataagttttttctttcataaagttttattttaaataaaacaaaattttaatataacatgtcaaattctgctggaaaaaagttaaagattcgagagtgtattataactgtgcaaaaatgaagctcactgtgtagcttacagaagatatggaagtatccttaaaaaaaactagaaagtctaaacagaactgaggaagacttgattcttccagtttctcaagtttagtatgattatatactatgaatactaaaaaatattaagaaaacgtactatacaaacattcacgttcaagctagatcaatgcagaacacagtaaatctaggaaaatcttttaaaaatctcttaacaaaacagcactgattagaagcatcttgtttgtgaaaaaatttaattcttgactgtgatggaacatgacatatctttctcataatcatttccctaaacattaagcatactcctacaaaagatatagaacttacattaacagcaaaatgctcatgtcaagcaacagagatttagtgataactaaaaacaagaaatcatagcctacttaatgaatggtttctctgaaatgtgcatgtaatttaagtatgtataaacctcttattgcttggtactggcttaaataaatcactgagtactatgtcttaagcaaaaaaaggtgagttttatagcatgattcacaactttatactaagacaacttccagattccaggttctaaaatacttgcctactcgttaataagagaatacttcatttcctgacttctatatgcaacttatcaacacttagaacacacaggtaggcataaaacaaaaacaaggttgaaaattttaagcaaactaaagcnnnnnnnnnnttgttattttgattttttttaagtccattaatttgggttaggtcttctgaaatacagacagattactatgaatataccactatgtgtcactgtgtcaaaatttggtccaaattactggtataaaaatatgacaataaatatagaaaactgtcttactacatttaattctatttcaaagacaaaaataaaaaatatgaacacttcaactcaccttcagtctgctgggaaagtcttgtttgcaaatctataacaaaagagaattctacagctcagtgcaggaacaatgaagagcctcaactaacagggtaaatgtcaggaaagcattaataaaagaggactacaatagcagggttcattcaaatgcacttagtaaaacctggcagcaaaacctccttccccattcctcattgagaaggctttggggccttttttccccctcttatcctgggaaacttacttttccctctctcttcctagactagactactcttccacatctcaagtgattttcactacactactatacagctgggaataatgggaaatggggaaagggaagcacaccggtcagaaaatgagtgaaaaaccctgatcttgagaattcaattccaagtacttgggaaatgcaagtatttatatttttagtggccatagtacttaacactttaaaaggatattataaaattgtaaatactgcacatcaaaaagctgtaacagtttccatgatttcccaatttaggaagaacatcaccattgggaaatacaccattccaacagtatgcatatattatttttttaaggacttttcaaagatttaacttgtcaaatctagcccataatggggcaacttgattattgatttcctggcctagtgtaaaaatttagcaaggcagaaataaaaatctctggagttttcttaaaagctatgaagtttaggaaaatgaaaacatctaatcagtattaaaaataagagggatgtgaccaatatattttctcatataatcgttagatttctacagtggacgccatctgaaagctgctacagagtgaaacagtagcaagtctgaacagtaagtctgccacagtgctataatgctctcttgaagttctttttatagaaatatatgacatcaaaattttgattcagtaacctgattttcattaaaatttgattcaactgcaacactttattaccacatatatgggtttcttgcaacatgggcaaaaatgtacagggatctgcagcccaagttatattgggataaaatacctgggtcctaggtgctcaaaattggcatctcagggagctgaagaaatgtaactggtgtatactgaaggaacttgaagataggaccatgtgaacagtgtcaataaactttaaataataacagaatttgtcnnnnnnnnncctaaaatgggaaaaaatgtatagatatcagaaatccatgctattttgtctaccaacccaatcataatttcaaaaatgatttgtcatatcatttgtgacaaagtgaaaaataaagcatggttttcataaagataaggactctaacctattttagaaagggcctatcaaactggcagccaa

SEQ ID NO: 240072 - DNA, 354 bp, Homo Sapiens
gcctttttaagagacttataatagagtggttcttacaaagattgttgcaatatgaaagtcatttgtttgatagaaatatcaagctgtcttgtcaaacacactgaagtaacccaaaaatatatttcagagctcacagagcttaaaaagagcaaagattatatgcaaccagacaaaacctatttctgcatttcctatttctttctcagactgctttgcctaccagactctcacgtttaaacatcttcaggaaatgcagggatcattttgtttggaattttaagacacaccagaacacatagtatttacaaagaaacttttacgggatacattaattgccaacttttttgtacaaag

SEQ ID NO: 240073 - DNA, 1593 bp, Homo Sapiens
  misc_feature (1360)..(1382): n is a, c, g, or t
ttggccaagctcacggacccctcgctgggtgccggttaagaccccgctccccgtcgccagtgctatggaggcggcggcggcggtggtggcggcagaggcggaagtggaaaacgaagacggcgacagcagctgcggggatgtatgcttcatggacaaaggcttgcagagcatatcagaattatctttagattcaactcttcatgccgtcaatcttcattgcaataacatctccaagatcgaagccattgatcatatttggaatttacaacatctagatctgtcatctaatcaaataagtagaattgaaggactaaacacactgacaaaactgtgcacattaaatttgtcctgcaatttgattacaaaagtagaaggacttgaagaactaattaatctgactagactaaatgtatcttataaccacatagatgatcttagtggattgattccccttcatggaattaagcataaacttagatatattgatctacatagtaatcgtatagatagtatccatcacttacttcagtgtatggtaggattgcacttcctgaccaatcttattttggagaaagatggagacgataatcctgtctgtcgactgccagggtacagagcagttattctccagactttgccacagcttagaatcctagattgcaagaacatatttggtgaaccagtaaatttgacagaaataaattcatcacagctgcagtgcctagaaggtcttttggataatttagtttcttctgattctcccctaaatataagtgaagatgagatcattgatagaatgccagtgataacagcacctatcgatgagttagttcccttggaacagtttgcaagtacaccaagtgatgctgtgttgacgtcttttatgtctgtgtgtcaatcttctgagccagagaaaaataatcatgaaaacgatttgcagaatgagataaaacttcagaaattagatgaccaaattctacaacttctaaatgaaacttctaattcaatagataacgttcttgagaaagaccccagaccaaaaagagacacagatataacttctgaaagtgactatggaaacagaaaagaatgcaatagaaaagttcctcgaagatcaaaaatcccttatgatgccaaaaccattcaaactattaagcaccacaataaaaactacaactcttttgtaagttgtaatcgtaaaatgaaaccaccttaccttaaagaattatatgtaagctcatctttagcaaactgtcctatgttacaagaatcagaaaagccaaagactgaaataattaaagtagaccaaagtcactcagaagacaacacttaccagtcccttgttgaacagctagaccannnnnnnnnnnnnnnnnnnnnnnctgagcaagccgaaaataaactcatggattatattgatgagctgcataaacatgcaaatgaaaaagaggatattcatagtctggctctacttaccacagataggctaaaggaaattatttttagagagagaaattccaaaggacaactcgaagttatggttcacaaacttcaaaatgaaattaaaaaactgactgttgaactaatgaaagc

SEQ ID NO: 240074 - DNA, 683 bp, Homo Sapiens
atcaacatttatatgctttattgaaagttgacaagtgcaacagttaaatacagtgacaccttacaattgtgtagagaacatgcacagaaacatatgcatataactactatacaggtgatatgcagaaacccctactgggaaatccatttcattagttagaactgagcatttttcaaagtattcaaccagctcaattgaaagacttcagtgaacaaggatttacttcagcgtattcagcagctagatttcagattacacaaagtgagtaactgtgccaaattcttaaaatttctttaggtgtggtttttgtcatgtagcagtttttatgtagatctatatataaaagtccacacctcctcagacagccaatgaaacaactaaatttcaatctgtacaacctaaatagtagttacagtcctctattgtacaaaatagttacactacatacacaaatatacaataagcaaaacaaccttcatggtaagatagcctaggtcccagctacctgtcaccattttgtcactctcatagttttgtgtcatccattgtttgagaagaaagaggcacagtactattgttttttatgaattttggtgacagttgtcaaatttgtacagtgaactctgttccccctcattttagtcttttagaccctcctttcaaccaacttttttgtacaaagt

SEQ ID NO: 240075 - DNA, 1265 bp, Homo Sapiens
  misc_feature (1051)..(1103): n is a, c, g, or t
cagaaaacaatatgcatataactactatacagtggatatgcagaaacccctactgggaaatccatttccattagtagaactgagcatttttcaaagtattcaaccagctcaattgaaagactttcagtgaacaaggatttacttcagcgtattcagcagctagatttcagattacacaaagtgagtaactgtgccaaattcttaaaatttctttaggtgtggtttttgtcatgtagcagtttttatgtagatctatatataaaagtccacacctcctcagacagccaatgaaacaactaaatttcaatctgtacaacctaaatagtagttacagtcctctattgtacaaaatagttacactacatacacaaatatacaataagcaaaacaaccttcatggtaagatagcctaggtcccagctacctgtcaccattttgtcactctcatagttttgtgtcatccattgtttgagaagaaagaggcacagtactattgttttttatgaattttggtgacagttgtcaaatttgtacagtgaactctgttccccctcattttagtctttttaccctcctttcaagttcctcctggggggaggagaggagagaggcgagtccagtgaggagctccatcgcttcacaaccccatgtaggacactaagcgcaagcaggagagagaacccttggaagtgaggggtagggagccggaagggatggaaaggcacacagctcctgagcatgaattaaaccatttctcagatatctgccaagctgcatgaggtcccggtatatccatgctaattctcggattaacctttaattcacccaactaagaaatttctccaagccataagcatatgagtgtttaatactggaaaagagataatggcatatgtcagtctcacgtctctttcgcagcgagcaatgaaatgggtgactgtggaggcagattctccctagcacatcttctccgtctgttcagttcacacgcagcagccagttctgcgggggcataggcagctatgcggttggtcctgagccctgcgatgcnnnnnnnnnnnnnnnnnnnnnnnnnnnnnnnnnnnnnnnnnnnnnnnnnnnnnagccagtctgcagctgggcctgaaactgggcaagctgctcaggactggccagtgtcttcagcagattgttctcctgctccagctgggaatttttctctattagttctttgatttgctctttgaggacctccacttcttctctgccaacttttttgtacaaag

SEQ ID NO: 240076 - DNA, 1600 bp, Homo Sapiens
actttgtacaaaaaagttggctctgacagtcattgatttcaccgaggatgaagtggaggacctgctgagcatcgtggccagcgtccttcatttgggcaacatccactttgctgccaacgaggagagcaatgcccaggtcaccaccgagaaccagctcaagtatctgaccaggctcctcagcgtggaaggctcgacgctgcgagaagccctgacacacaggaagatcatcgccaagggggaggagctcctgagcccgctgaacctggagcaggccgcgtacgcacgagacgccctcgccaaggctgtgtacagccgcacttttacctggctcgtcgggaagatcaacaggtcgctggcctccaaggacgtggagagccccagctggcggagcaccacggttctcgggctcctggatatttatggctttgaagtgtttcagcataacagctttgagcagttctgcatcaattactgcaacgagaagctgcagcagctcttcatcgagctcacgctcaagtcggagcaggaggagtacgaggcagagggcatcgcgtgggagcccgtccagtatttcaacaacaaaatcatctgtgatctggtggaggagaagtttaagggcatcatctcgattttggatgaggagtgtctgcgccccggggaggccacagacctgaccttcctggagaagctggaggatactgtcaagcaccatccacacttcctgacgcacaagctggctgaccagcggaccaggaaatctctgggccgaggggaattccgccttctgcactatgcgggggaggtgacctacagcgtgaccgggtttctggacaaaaacaatgaccttctcttccggaaccttaaggagaccatgtgtagctcaaagaatcccattatgagccagtgctttgaccggagcgagctcagtgacaagaagcggccagagacggtcgccacccagttcaagatgagcctcctgcagctggtggagatcctgcagtctaaggagcccgcctacgtccgctgcatcaaacccaatgatgccaaacagcccggccgctttgacgaggtgctgatccgccaccaggtgaagtacctggggctgttggaaaacctgcgcgtgcgcagagccggctttgcctatcgccgcaaatacgaagctttcctgcaaaggtacaagtcactgtgcccagagacgtggcccacgtgggcaggacggccgcaggatggggtggctgtgctggtccgacacctgggctacaagccagaagagtacaagatgggcaggaccaagatcttcatccgcttccccaagaccctgtttgccacagaggatgccctggaggtccggcggcagagcctggccacaaagatccaagctgcctggaggggctttcactggcggcagaaattcctccgggtgaagagatcagccatctgcatccagtcgtggtggcgtggaacactgggccggaggaaggcagccaagaggaagtgggcggcacagaccatccggcggctcatccgaggctcatcctgcgccacgccccccgctgcccgagaacgccttcttcctggaccatgtgcgcacctctttttt

SEQ ID NO: 240077 - DNA, 1207 bp, Homo Sapiens
  misc_feature (137)..(165): n is a, c, g, or t
ccagactgctggatccacctataaaaggtgttttttaaaagttaccttaattttggcaagaatttaaatgttaatcaggccaaacagaaaggtgaaaaatgtttctccacatctcttttggctcaatgaatgtcaannnnnnnnnnnnnnnnnnnnnnnnnnnnnctcccagaaatttccgcatcaaatatgctcatttgtaacgatccaattcaaaatagacatgttctgacctctggcgccacctaatggcataaaacaaactcatcaaattcatattgctttgaaaaaacggcagccattcaaatccagtattttttaagcctcattattgataagacagagacatacatcaaacctcaaaaaattttatgaggtaaaattctaacttaaaaaaaactattatcctatgtctttaggtaattgaaaacatagaagaaaattttaaaaaaccatttaaaataacacaaagcctgacagaaacaaatttgaagaaacgttaaaagatgaatctacatctactgccgaaagaaatgaatcttatttcctagtgaaaaaggttctacaacatttaacagaagcaaattagactgccaacaccacacatagcacaggagccatttaagagctttgagaggcgtctcaagaaggcagtgaagcaccttgctgattagaaaaataaaacccaggcagtttgtacagaaaatataaaaccagaaatggagattacctgagttgttctataagcaacaccataaacactcattcctaactctagaccatcatagggaattggcatatgtttatacagaattctttggaagaaacattggaatcaaatgaaaacaggctttcagtatattttcactggaggctaattaacactcatcttctttttatcaatcacaaacttacagcctgtatataaacacagacttttctaacaagagggttgtgagcataaatgtgaagaggtaaactagtctcaaaaactaatgttgaaaaacctaccaaacaccaaacttctcctgtacccaatataaagaatatcactgaaagtaacaatcaagaaaattctggaaatgtatgtaatatttgggttgctgaatgaagatataggactttatggattgattgttaatttaactgttaggacgatatatttttctgtttttattttaagccaacttttttgtacaaagttggc

SEQ ID NO: 240078 - DNA, 945 bp, Homo Sapiens
attttatcaaattctctatgctaaaaagctgcctcaaagagctctgattcataggatgggtttaaaaaataagtccaatctgtatctgtatcaagagctatactttaacatcctaacactaggaaatgggttttattcctctgtttctcttctctctttaccacagaacttgcaatacctttcaaatgacaggctgtttaacagacccaaaaagtcaaatgtctaaaccacggtttgtatgaaaaaaggacatcatcttctgaatactaaggtatacaacgctggagaaagccaaaaagccactccaaattaagggacagtaactgacaagaaatcagaaataattcttcagaatttgggcctttggactctgatccaagaagaaacagttttcattgcaaactttgtttatataaatctcatttagcttctaaggggactcatgaaaaacaaaaacataaaatttatagtagattgaaatggaaaaattaactctcacctttgaggacaagacttttacacaaatagaagatcaggattggaatggaaaggagacttatgaaatttctgatcttgaaaagcctctaacaaatgtttgccatgaattttctaggacttcttataagaaatgaaatgccaagcacagagaaaaaggctgaaggaacacgtaatagaacaagaacacgctagagaataacacataacagaacaagaacacgctagagaatacagagtacacaagcagagagcctagagaggcagcaagaattgacaggaagtgctgagttccaacctgcggtggctgtgtggtgctgaaccgatactctccttgtttgtctcggttgaacacaactttccaaaggaccatgtcaaggaagaagttctgagagatattccagtgagttaagaattaataatgactaagtcattttttattaatgccaa

SEQ ID NO: 240079 - DNA, 1469 bp, Homo Sapiens
  misc_feature (527)..(536): n is a, c, g, or t
  misc_feature (1337)..(1367): n is a, c, g, or t
caaaacatatagttaccactatttatacttgagggagaaaaaaaactttaaacaaccctgagggagacacacattaaaaatcttgttatttatttaaaaagttaaaaagttacatatcattatttaacaattactttcccagacatttctgtcctttaagtatgtgcataaataaaatttaaatcagcaatattcatcttaatacatcaaaataatatatgtacagattttaaaatttaggtctgtataaactcaaataatttaatgtgaaattcagaatcaaaattactatgtaatggtaacctacgagagaagactcagtctatctatggcactgagtagaacccacacctggcttcacaggcattcttcaaataacattctcaacgtgaataacccaccttgtctatattcaaatctaacttcctacaaatgcttttccagccacctaaacacctcattcctttgaaaacaatatggacagaagagatataaaacccttactaactctaaatgttaaaaaagtnnnnnnnnnntgtcaaaaatagctctttatgatcatgctcttaaagatgttaaatacaatcggataattgaatttttaagctgctacttagcaattactttcattatatgcttcagtacttaaaccaaagaataaaatgcacaattgtggaaatcactgaagaataacacgagcatatttgaaattaatatggaaattataaaaatgatccagagaataagtaactatagaaaatagtgctaattcacagctcaagaggtctaagatgcatagcttcatagaatcattcatggaacaactgttatcatctaatgtgtattaatagcatattatacatttgatggaaaacttcgattatatttttgcaggaatcatcagtggcaatagcagtaacagtgatcctgagtgtaatttctatttttctatagttaccaaacatcatccaggtctttgcagcataaagagtgagaaccatttggtcctaaaattctaggtaaaatttggtaaatttgtaaatatatgttgggaaaagaatgatcagctagaagtagaaagcacgagcaagcatgttactggctctggaagaacagagaacaatgtcacactgttttcatagtttagcgtccattttatagcacgatcagttttctgtgttgtggtaactgtgggcgttgccagactgctggatccacctataaaaggtgttttttaaaagttaccttaattttggcaagaatttaaatgttaatcaggccaaacagaaaggtgaaaaatgtttctccacatctcttttggctcaatgaatgtcaannnnnnnnnnnnnnnnnnnnnnnnnnnnnnntcccagaaatttccgcatcaaatatgctcatttgtaatgatccaattcaaaatagacatgttctgacctctggcgccacctaatggcataaaacaaacccaa

SEQ ID NO: 240080 - DNA, 1828 bp, Homo Sapiens
  misc_feature (880)..(889): n is a, c, g, or t
  misc_feature (1690)..(1720): n is a, c, g, or t
caaaaacttatttttagaatatgtcaaaaatgccatgcatgaatatttctaaagctggattttgctcttcactggataatgttatctatagctgtttctgtaacagactacataaacattgatatattatttaccatgcctttgaaactgtgcaggactttcataaacatggggaacaaaataaatagagtaaaaactgcaacagttttgtttagatgcaagtgcaatgggaaagctttcgaatttcaggattataaaactactataaaagtatttattctgttgttggcttagccacttgtattcaagcattatttgcagcattgctttacagcagttggtgctagaagatacaaaacatatagttaccactatttatacttgagggagaaaaaaaactttaaacaaccctgagggagacacacattaaaaatcttgttatttatttaaaaagttaaaaagttacatatcattatttaacaattactttcccagacatttctgtcctttaagtatgtgcataaataaaatttaaatcagcaatattcatcttaatacatcaaaataatatatgtacagattttaaaatttaggtctgtataaactcaaataatttaatgtgaaattcagaatcaaaattactatgtaatggtaacctacgagagaagactcagtctatctatggcactgagtagaacccacacctggcttcacaggcattcttcaaataacattctcaacgtgaataacccaccttgtctatattcaaatctaacttcctacaaatgcttttccagccacctaaacacctcattcctttgaaaacaatatggacagaagagatataaaacccttactaactctaaatgttaaaaaagtnnnnnnnnnntgtcaaaaatagctctttatgatcatgctcttaaagatgttaaatacaatcggataattgaaatttttaagctgctacttagcaattactttcattatatgcttcagtacttaaaccaaagaataaaatgcacaattgtggaaatcactgaagaataacacgagcatatttgaaattaatatggaaattataaaatgatccagagaataagtaactatagaaaatagtgctaattcacagctcaagaggtctaagatgcatagcttcatagaatcattcatggaacaactgttatcatctaatgtgtattaatagcatattatacatttgatggaaaacttcgattatatttttgcaggaatcatcagtggcaatagcagtaacagtgatcctgagtgtaatttctatttttctatagttaccaaacatcatccaggtctttgcagcataaagagtgagaaccatttggtcctaaaattctaggtaaaatttggtaaatttgtaaatatatgttgggaaaagaatgatcagctagaagtagaaagcacgagcaagcatgttactggctctggaagaacagagaacaatgtcacactgttttcatagtttagcgtccattttatagcacgatcagttttctgtgttgtggtaactgtgggcgttgccagactgctggatccacctataaaaggtgttttttaaaagttaccttaattttggcaagaatttaaatgttaatcaggccaaacagaaaggtgaaaaatgtttctccacatctcttttggctcaatgaatgtcaannnnnnnnnnnnnnnnnnnnnnnnnnnnnnntcccagaaatttccgcatcaaatatgctcatttgtaacgatccaattcaaaatagacatgttctgacctctggcgccacctaatggcataaaacaaactcatcaccaa

SEQ ID NO: 240081 - DNA, 1026 bp, Homo Sapiens
cattcattaaaatttttatttgaatagcttcaatcaaaaaaggtttcataagattatttacaatgctgaatgtacaattatgaatgtatgcctttttgacaagagggtaccattcttgagcagcaatacaattttaaaaatataaagatgcagtatcatttctgatataaagttacttaaaaaaatccaaggtcttagggaattcacaaatcataactagaagtaacttttattaatttaatgtacacataattaccaaattttaatacattaaaaatgtgtaaatgcccacagactgtacaaaaattaacaccccattttgttaaaagttcccaaccacctcccaccataaatatacaaaaacctatttttagatatgtcaaaattgcatgcatgaatattttctaaagcttgaattttgctcttcactggataatgttatctatagctgtttctgtaacagactacataaacattgatatattatttaccatgcctttgaaactgtgcaggactttcataaacatggggaacaaaataaatagagtaaaaactgcaacagttttgtttagatgcaagtgcaattgggaaagctttcgaatttcaggattataaaactactataaaagtatttattctgttgttggcttagccacttgtattcaagcattatttgcagcattgctttacagcagttggtgctagaagatacaaaacatatagttaccactatttatacttgagggagaaaaaaaactttaaacaaccctgagggagacacacattaaaaatcttgttatttatttaaaaagttaaaaagttacatatcattatttaacaattactttcccagacatttctgtcctttaagtatgtgcataaataaaatttaaatcagcaatattcatcttaatacatcaaaataatatatgtacagattttaaaatttaggtctgtataaactcaaataatttaatgtgaaattcagaatcaaaggttactatgtaatccaacttttttgtacaa

SEQ ID NO: 240082 - DNA, 1486 bp, Homo Sapiens
  misc_feature (541)..(549): n is a, c, g, or t
  misc_feature (1348)..(1378): n is a, c, g, or t
gctagaagatacaaaacatatagttacccactatttatacctgagggagaaaaaaaactttaaacaaccctgagggagacacacattaaaaatctttgttatttatttaaaaagttaaaaagttacatatcattatttaacaattactttccccagacatttctgtcctttaagtatgtgcataaataaaatttaaatcagcaatattcatcttaatacatcaaaataatatatgtacagattttaaaatttaggtctgtataaactcaaataatttaatgtgaaattcagaatcaaaattactatgtaatggtgacctacgagagaagactcagtctatctatggcactgagtagaacccacacctggcttcacaggcattcttcaaataacattctcaacgtgaataacccaccttgtctatattcaaatctaacttcctacaaatgcttttccagccacctaaacacctcattcctttgaaaacaatatggacagaagagatataaaacccttattaactctaaatgttaaaaaagtnnnnnnnnntgtcaaaaatagctcttatgatcatgctcttaaagatgttaaatacaatcggataattgaatttttaagctgctacttagcaattactttcattatatgcttcagtacttaaaccaaagaataaaatgcacaattgtggaaatcactgaagaataacacgagcatatttgaaattaatatggaaattataaaatgatccagagaataagtaactatagaaaatagtgctaattcacagctcaagaggtctaagatgcatagcttcatagaatcattcatggaacaactgttatcatctaatgtgtattaatagcatattatacatttgatggaaaacttcgattatatttttgcaggaatcatcagtggcaatagcagtaacagtgatcctgagtgtaatttctatttttctatagttaccaaacatcatccaggtctttgcagcataaagagtgagaaccatttggtcctaaaattctaggtaaaatttggtaaatttgtaaatatatgttgggaaaagaatgatcagctagaagtagaaagcacgagcaagcatgttactggctctggaagaacagagaacaatgtcacactgttttcatagtttagcgtccattttatagcacgatcagttttctgtgttgtggtaactgtgggcgttgccagactgctggatccacctataaaaggtgttttttaaaagttaccttaattttggcaagaatttaaatgttaatcaggccaaacagaaaggtgaaaaatgtttctccacatctcttttggctcaatgaatgtcaannnnnnnnnnnnnnnnnnnnnnnnnnnnnnntcccagaaatttccgcatcaaatatgctcatttgtaacgatccaattcaaaataggcatgttctgacctctggcgccacctaatggcataaaacaaactcatcaccaa

SEQ ID NO: 240083 - DNA, 1271 bp, Homo Sapiens
  misc_feature (440)..(449): n is a, c, g, or t
tttatttaaaaagttaaaaagttacatatcttatttaacaattactttcccaagacatttctgtccttttaagtatgtgcataaataaaatttaaatcagcaatattcatcttaatacatcaaaataatatatgtacagattttaaaatttaggtctgtataaactcaaataatttaatgtgaaattcagaatcaaaattactatgtaatggtaacctacgagagaagactcagtctatctatggcactgagtagaacccacacctggcttcacaggcattcttcaaataacattctcaacgtgaataacccaccttgtctatattcaaatctaacttcctacaaatgcttttccagccacctaaacacctcattcctttgaaaacaatatggacagaagagatataaaacccttactaactctaaatgttaaaaaagtnnnnnnnnnntgtcaaaaatagctctttatgatcatgctcttaaagatgttaaatacaatcggataattgaatttttaagctgctacttagcaattactttcattatatgcttcagtacttaaaccaaagaataaaatgcacaattgtggaaatcactgaagaataacacgagcatatttgaaattaatatggaaattataaaatgatccagagaataagtaactatagaaaatagtgctaattcacagctcaagaggtctaagatgcatagcttcatagaatcattcatggaacaactgttatcatctaatgtgtattaatagcatattatacatttgatggaaaacttcgattatatttttgcaggaatcatcagtggcaatagcagtaacagtgatcctgagtgtaatttctatttttctatagttaccaaacatcatccaggtctttgcagcataaagagtgagaaccatttggtcctaaaattctaggtaaaatttggtaaatttgtaaatatatgttgggaaaagaatgatcagctagaagtagaaagcacgagcaagcatgttactggctctggaagaacagagaacaatgtcacactgttttcatagtttagcgtccattttatagcacgatcagttttctgtgttgtggtaactgtgggcgttgccagactgctggatccacctataaaaggtgttttttaaaagttaccttaattttggcaagaatttaaatgttaatcagccaaacagaaaggtgaaaaatgtttctccacatctcttttgccaacttttttgtacaaagttggctttataggcaaagcat

SEQ ID NO: 240084 - DNA, 1175 bp, Homo Sapiens
ttggctcctgtttttggtgaattactaaactgattgactttcagcctttttggctagatcctgagaggctatttttcttacgaatataccaacatcctgaaagttaaagaaaaaaatctaatgtatgaatgtgactcaccaatttttatcaactaattccttttttttattaaaggcatgcagggattaacaggacttctgtttacaatggaaatctgaaatggaagaaacatctttaaccttgtgtgtctgtgatctcctctgtcttaatccacgctcaggctaaagatggggataatgtggaaatggcagttgtcccgagggcgtggggtggggggtgcttctgtgcccacgggtccctgggcaacagtccctaggctaagacaggggtggggggctaagggaccagggctggccctgatccacctacctgctaactccagatattatttttaagttggagacctaaaaataattctcttgtattttggagatgaagaaaaaagtcattcacctgggagggatttttaacaaacatgcactaatattacctccctcttccaaactcctactgtcctcacctcacccaccactgtaaaagtattacgtcgtgcattaaagaccagaaaagacttgcttttacccagggaggggacattcccccaatcctgtgtctgggcagcttgcctggtggatgtttctggccctttttccaccatgggaatttctcacctctagctctaagggcagctgaccacctgccagcccctctctggttccagaagattacccttcgcaccggcacaggagagatcttaaatggtctctgggctgctgggacatgcaggctctgagtggggactgcacccactcatgctgttcctgaggctgccctctccagtcccaggagccgtgtctagagttcctgaccagccaccttctgccagaactgcaggcctgcggctgggtcttaggctcccgctgccatttgggtaagccggtggctggtctcgtctgccgggggaaagggtggggaggtgcaatgggatgggaggcaaggatgcttgcccagaaaggtgctttccttcagacggtgcagggcctgggccagccttacaggtcagtagactagactcgactacttggggtcagtgattcttttgtaacgagtcttt

SEQ ID NO: 240085 - DNA, 1432 bp, Homo Sapiens
ttggcagcgtggagggtttaggcagcgtgttctgattctttgcgggacggcgagcgcatttgtgctttgcccgccgcggcctaggaggccttttgaggccgcgtagtcggtgtttttgaactgactctacagcttctggcaggccgtgcggcgccctgacccggcctcaccatgttggtgctgtttgaaacgtctgtgggttacgccatctttaaggttctaaatgagaagaaacttcaagaggttgatagtttatggaaagaatttgaaactccagagaaagcaaacaaaatagtaaagctaaaacattttgagaaatttcaggatacagcagaagcattagcaggaaaagctgaatctcagttgtatccatagtcctgttgttaatgaacttatgagaggaattcgttcacaaatggatggattaatccctggggtagaaccacgtgaaatggcagctatgtgtcttggattggctcacagcctgtctcgatatagattgaagtttagcgctgataaagtagacacaatgattgttcaggcaatttccttgttagatgacttggataaagaactaaacaactacattatgcgatgtagagaatggtatggctggcatttccctgaattaggaaaaattatttcagataatttaacatactgcaagtgtttacagaaagttggatccttttcattggctttctactttttcttttgactatttgctggattttatataatttgttgaagagtgattctccctcatcctctgcaaacattccataggcgataggaagaactatgcctctgccaagctttctgagttgctgccagaagaagttgaagcagaagtgaaagcagctgcagagatatcaatgggaacagaggtttcagaagaagatatttgcaatattctgcatctttgcacccaggtgattgaaatctctgaatatcgaacccagctctatgaatatctacaaaatcgaatgatggccattgcacccaatgttacagtcatggttggggaattagttggagcacggcttattgctcatgcaggtgatggttttaatgtaatttgtaaatatgagtgtttgaagtattttctggttaggattttgtttacatctttaaactacagctgttaaagaaattttagctgataacacaaaagtagatgatatgtgggagatcactaagggccaagtgttcaatgatgatttctatttgtttgcctgatttccttttggataatgaaggcatctttagtcactacctcttctgagacacttgtggtccattgttagaagtttgttagggttaattagaacaatcggatgaatgcaggaggataaaacagttaacattttcataataaaaactcactagacctagatttgaatacagttttaagaaatcactgtagagaaag

SEQ ID NO: 240086 - DNA, 1129 bp, Homo Sapiens
  misc_feature (193)..(208): n is a, c, g, or t
  misc_feature (682)..(798): n is a, c, g, or t
  misc_feature (861)..(896): n is a, c, g, or t
ttgggcacttaaagcatccattcacattttaggcactcatttcagtattttctttctgcttacattagaacaaaagcaaatgttgggttctatggaatcttttccatgtgcatgtatttgtatcctttcttgttcttgtgatcttgtgatgaagacttctatactaagcttggtttagattttttgttctgcnnnnnnnnnnnnnnnnccccccattgagcagtgttctgaaagttggatggttcagttttcactttctagttaggtgtgaagacgttttctcctttcatttccccccatgctgattgagtgttttcctgtaccatagtaactacattgattactaaatcagaaattcatttagctcaccacatctcttgaatgtgattgacctacttgaaaaatattaatacctttaacttttggaaactattagtcttcataaactaccccaaagccactaaaatgaaacaacattgtgtgcttatgtaagtattatctaatggcattttctttatctcttgagaattatttcaattccagatacttgttagagattttctaaaactttttgggtctttcagtgaagtgaagacttacgatccttctggtgactccacacttccaacctgttctaaaaaacgcaaaatagaacaggtagataaagaggatgaaattactnnnnnnnnnnnnnnnnnnnnnnnnnnnnnnnnnnnnnnnnnnnnnnnnnnnnnnnnnnnnnnnnnnnnnnnnnnnnnnnnnnnnnnnnnnnnnnnnnnnnnnnnnnnnnnnnnnnnncacattaaggaagaaccactttttgaggaagaaccatgtaccagcacagcaattgctagtccnnnnnnnnnnnnnnnnnnnnnnnnnnnnnnnnnnnncgaggattaacagaaaggaattacgattatatcacccggacacacatcatgcttaagattcaactgggagcataccagggatgctctctaacgtaatcaagggaaggttcagtaagacaaagtgatttatcatctataacttcaaacctatttgtcttgacatcaactctgttaaccttatgtcatcatttcttagagtctttgatatacaaataaaattttctttgtatttt

SEQ ID NO: 240087 - DNA, 1784 bp, Homo Sapiens
ttggtggagggtttaggcagcgtgttctgattctttgcgggacggcgagcgcatttgtgctttgcccgccgcggcctaggaggccttttgaggccgcgtagtcggtgtttttgaactgactctacagcttctggcaggccgtgcggcgccctgacccggcctcaccatgttggtgctgtttgaaacgtctgtgggttacgccatctttaaggttctaaatgagaagaaacttcaagaggttgatagtttatggaaagaatttgaaactccagagaaagcaaacaaaatagtaaagctaaaacattttgagaaatttcaggatacagcagaagcattagcagcattcacagctctgatggagggcaaaatcaataagcagctgaaaaaagttctgaagaaaatagtaaaagaagcccatgaaccgctggcagtagctgatgctaaactaggaggggtcataaaggaaaagctgaatctcagttgtatccatagtcctgttgttaatgaacttatgagaggaattcgttcacaaatggatggattaatccctggggtagaaccacgtgaaatggcagctatgtgtcttggattggctcacagcctgtctcgatatagattgaagtttagcgctgataaagtagacacaatgattgttcaggcaatttccttgttagatgacttggataaagaactaaacaactacattatgcgatgtagagaatggtatggctggcatttccctgaattaggaaaaattatttcagataatttaacatactgcaagtgtttacagaaagttggcgataggaagaactatgcctctgccaagctttctgagttgctgccagaagaagttgaagcagaagtgaaagcagctgcagagatatcaatgggaacagaggtttcagaagaagatatttgcaatattctgcatctttgcacccaggtgattgaaatctctgaatatcgaacccagctctatgaatatctacaaaatcgaatgatggccattgcacccaatgttacagtcatggttggggaattagttggagcacggcttattgctcatgcagatttctcgaatgctggcagccaaaaccgttttggctatccgttatgatgcttttggtgaggattcaagttctgcaatgggagttgagaacagagccaaattagaggccaggttgagaactttggaagacagagggataagaaaaataagtggaacaggaaaagcattagcaaaaacagaaaaatatgaacacaaaagtaactacattgattactaaatcagaattcatttagctcaccacatctcttgaatgtgattgacctacttgaaaaatattaatacctttaacttttggaaactattagtcttcataaactaccccaaagccactaaaatgaaacaacattgtgtgcttattgaagtgaagacttacgatccttctggtgactccacacttccaacctgttctaaaaaacgcaaaatagaacaggtagataaagaggatgaaattactgaaaagaaagccaaaaaagccaagattaaagttaaagttgaagaacaggaagaagaaaaagtggcacaacaacaacaaacatctgtgaagacgaacactaaaaggtgtaaaaagaaacccattaaggaagaaccactttctgaggaaaaactatgtaccctcccagcaattgctatcccccagaataacaacataaagcaaaaatcccctccctctcctgttcaactctcccatcataataaactaatgctccccccc

SEQ ID NO: 240088 - DNA, 634 bp, Homo Sapiens
tactcaaatgctaaaaaagccactgagtttataaaatcgcaatgagaactaagtgtcaagtagctaaatgactaacaatgtaaaaatatttgccttctcagatgcatctgctaattttactctctacaaaagtataggttttcaactaagacttcttaacacttatatctaagaatcgtgccactcttgtcctccaaaaaataatctctatgtcaaccctggactctacctaagaatggaaagtaggatttctataaatcatctatatgcagtataaaaagctctcctctgtgaataggttctcttgctttggtatatatataactaaaagactgaagcaataatttatcctctctgcttttgaaggagctgggggaaaagcaaagaacagatagaaattctactctaaatctccctctacttctcactcaactatctactataatatatggtatttaatatacccaattaataacaatgagttatccattgatcaatactcacaaaagagcttgtaattatttttgaaaattatatgtggtgaaaaaatcttctgtgtctgaaaaagagtactttctgcataaacaaagttagatttttaaaaaatatggctgggcatggtggctcacacatg

SEQ ID NO: 240089 - DNA, 2043 bp, Homo Sapiens
  misc_feature (412)..(421): n is a, c, g, or t
  misc_feature (535)..(547): n is a, c, g, or t
  misc_feature (1539)..(1552): n is a, c, g, or t
  misc_feature (1691)..(1704): n is a, c, g, or t
aaatcaaaacagcagcaaggccaaaccacattttttcctctctataagcatatttctgaaatgaggtaaagcatggtacccaagtgcaatgcttatctgtgctacatgaacagaacagaagggaaaaagctattataaaacgcagcatagttaggactgcggaaagcatattataaaagaaattttaaaaaatttacaaatgaaggttcatgttaactaacttgcacacaatcatcataaggaatttctgcagttgctttttcaagacacgcctccccagtcctttacacacgtgctcagggcacaaccacaccccactggtaggttttccatattacattcggtctcacattgcaatcacaggaacacagggtggcacacagggctctaaagtggggcaacatagagtgannnnnnnnnnccttaattgacagatgcaaaacatttcaacaagctaaacacaggaaaactttacagcattaaaaatcagcagcacaaaagcgttcataaccatttcatatgtctaactcgtacnnnnnnnnnnnnnaactcagtaaccaggggatcacagaatgcttcaaactgtgagtcaaattaaaatctactatttttctccaacaaaaagtgaaacggctgaagtttgctgttgataaaacatttgaatggtagaaggaaatttgaacccctgagaatgtatgacctaatcatgtctaagtttgaacatcttagtattaacaaaaaaatactcttcttaaggttacaaatatattgaggcatttttctcccactgggaatcataactgtgaaaacaatctgattttggtgccaggaatcaagagaatcccgtaacactgggatcaatgtattagacacaatgcaaagccctaagctcctggcatcaggtagtttataaatattaagagatttgtgattaaacttgatcacaaatcaccctcagaataaaattcacatccagccttgttaactgcacacttttacagttatataattcaagaattgctttgttttaactggtcatatcttacattaaggttttttaaaaaatcaaatagacatttaaggttccaaatcggaattaaatatttttaaaacaagtcacctaatttgctcaaaaactcgtttaataatttagatctcaatttaagtttaagattggagacaacaaaaaacactggagaagcttaatacccccctcactcagggttccttagaaagcagagctgacagttttctgtcggtgcactcgcacagaggcatttctctgtgggtggatgatgcagataaagcaggaaggacagtattcaaatgtcacttacatataaatgcagcattccatgaagcatcaagttcagaatcatgtgctgggaaatatgagacacctctgctcagctttcttaaacttcaagcataattaacggggcaaattgcagcaaacctctactggtatgttgatgggagtgcaagactgacccacagcttttaaaaaggtaaattaagaggtattatagttacagtgcnnnnnnnnnnnnnnttaaaatttcaagcataatacataaacatagcaccaaacaggggaaaaatgcatgcaaaagaaaagaagaactgaggtatttaagtgaagagtgcctacaagtctaattaaagaaacttaggcaaatgcctaaagaagnnnnnnnnnnnnnnccttttccaaagatggaaataatgagctagtttatctaaattaatgacctaaatcacagatgtatcaaaattacggcagtttatcgcaaacgttaaactttcacggcattaacagcacagctttggtaggtgaaatatgcatgcaacattatgaaaagtatagtaagaaatttatgtgaggagactaagggtaaaggtgctgtgttttgcttcttaaataagtaaccaatcaattataaaatctgcagcatattttaggtgtgatatgtaataaggtttattttgccaacttttttgtacaaagttccctttaatgtaaagcattgctcatcaatttgt

SEQ ID NO: 240090 - DNA, 961 bp, Homo Sapiens
ggaaggtcaacatctcattttacggaagagcgactctctggagctactcatgctacaatccaggttctctcagtctgactcctacctgacgttcgtacgatgattatacggatggaaaagctcagaactcaggtgaaacatttcaacatcacatcactcaccattttaacactggaagccactgaacgtgtccttttgaggagggtgggacacaacagtacagaaataagtgctaatttcaaagctatcattttctatttttctaagataaagtaaatgaattccaggttaaatgttcactttaaggtaataatcaggaaagcaaccttactactgaaatgtatcttggctgtcaagagtatcaaatgccatgcagcacttaaacttgtgataaggaagatgaagggtcttcagagaagaacctcttaaaaggcccacgggtgcaccagggctgaggtctgatgggaaggacttgactccaggtgcagagatgcacaggctcaagagagtaaaccaggactgctgcccgcacagcttccctcccgggcactcacctcgccatccctgccgtcccaaggctctctctcaacgatggtagggaaagccccgcctcctacaggtgccgtggagccacgcccaaaagagagctcccttagggaaaaatgaccaaaacacacacacacatttacaatggactgctggtgcagaagaataaacaactttaaaaataacagtctgcctactttgtttatgcagaggcatttcttctctcttgctgcactacattcctcagaaacaccttgaggacattatctttttaatcacggacaacattacaaccagattcaacattcccaactaagccccctgcatcagataaagtcagttgctatcagtaagcttttaaaaatagcagagcatttgctgaaatacaaattaaatccaacttttttgtacaaag

SEQ ID NO: 240091 - DNA, 979 bp, Homo Sapiens
actttgtacaaaaaagttggcatgcaaagcccgaacgaccgcctggcctcttacctggacagagtgaggagcctggagaccgagaaccggaggctggagagcaaaatccgggagcacttggagaagaagggaccccaggtcagagactggagccattacttcaagatcatcgaggacctgagggctcagatcttcgcaaatactgtggacaatgcccgcatcgttctgcagattgacaatgcccgtcttgctgctgatgactttagagtcaagtatgagacagagctggccatgcgccagtctgtggagaacgacatccatgggctccgcaaggtcattgatgacaccaatatcacacgactgcagctggagacagagatcgaggctctcaaggaggagctgctcttcatgaagaagaaccacgaagaggaagtaaaaggcctacaagcccagattgccagctctgggttgaccgtggaggtagatgcccccaaatctcaggacctcgccaagatcatggcagacatccgggcccaatatgacgagctggctcggaagaaccgagaggagctagacaagtactggtctcagcagattgaggagagcaccacagtggtcaccacacagtctgctgaggttggagctgctgagacgacgctcacagagctgagacgtacagtccagtccttggagatcgacctggactccatgagaaatctgaaggccagcttggagaacagcctgagggaggtggaggcccgctacgccctacagatggagcagctcaacgggatcctgctgcaccttgagtcagagctggcacagactcgggcagagggacagcgccaggcccaggagtatgagggccctgctgaacatcaagttcaagctggaggctgagatcgccacctaccggcggcctgctggaaaatggcgaggactttaattcttggtgatgccttgggacagcagccactcc

SEQ ID NO: 240092 - DNA, 960 bp, Homo Sapiens
actttgtacaaaaaagttggggaggtcagagtggaagcaggtgtgagagggtccagcagaaggaaacatggctgccaaagtgtttgagtccattggcaagtttggcctggccttagctgttgcaggaggcgtggtgaactctgccttatataatgtggatgctgggcacagagctgtcatctttgaccgattccgtggagtgcaggacattgtggtaggggaagggactcattttctcatcccgtgggtacagaaaccaattatctttgactgccgttctcgaccacgtaatgtgccagtcatcactggtagcaaagatttacagaatgtcaacatcacactgcgcatcctcttccggcctgtcgccagccagcttcctcgcatcttcaccagcatcggagaggactatgatgagcgtgtgctgccgtccatcacaactgagatcctcaagtcagtggtggctcgctttgatgctggagaactaatcacccagagagagctggtctccaggcaggtgagcgacgtgtccttgacacatctgaccttcgggaaggagttcacagaagcggtggaagccaaacaggtggctcagcaggaagcagagagggccagatttgtggtggaaaaggctgagcaacagaaaaaggcggccatcatctctgctgagggcgactccaaggcagctgagctgattgccaactcactggccactgcaggggatggcctgatcgagctgcgcaagctggaagctgcagaggacatcgcgtaccagctctcacgctctcggaacatcacctacctgccagcggggcagtccgtgctcctccagctgccccagtgagggcccaccctgcctgcacctccgcgggctgactgggccacagccccgatgattcttaacacagccttccttctgctcccaccccagaaatcactgtgaaatttcatgatggcctaaag

SEQ ID NO: 240093 - DNA, 1639 bp, Homo Sapiens
ccagcagcaccaaagagctgttcaagataattataaatatatgcctgttaataaaagcaattattccatgcttaagaatacgttcaactttctcattcattttttccttttccgcatgttctatttctgcaacctttgccgtagagtcaactcttacccgggaaccaaatatctttattttgtctgtatccataccagtatttgcaataagaattttagcattttcaattcgttttggttgatttactccaatttttttatccaacaggaagccttcatctaaataggaatctgccaaacttcctcctagcttcttgataatatgaattgcctccaggttgccagagcctttcagtctgagaactgcttctacagctaactttgtaaagtggtctttgtgatgagtaagaagttttgaggataatgttgtgcccgcaatattcattaaatcttgacggaatttaacttcatcggaaccatgatcaactgcagaactcaacagcgcctctcttgcagccttcgtggcttctctccaacccgctatgatggtctgtggatgaatcttttttgcaattaaagattctgcttcccttaataattctgctgctaaaacggtaacagaggtagtgccatcaccaacttcatcatcttgaacccttgacatatcaactaaaactttagctgctggattgtcaacaccaatgttttttagaatagtggcaccatcattggttaccataagagaggcatctcgtccactgcttagaagaattttgtcctaaagggaacataattggttcaagttaagacataagcacatcttgaagaatgcatggatcaatcagtattctcacacagtgctagtgtataaacactctggatagctattttgtggtatccattcatcaaatgttttcaatacatacaccacgtaaccaaaccatgtatctacccctagaaacactagaagcacaggtagacactagtttttgtttcaacaccgtaactgcaaaaacaatggaaagaaactatcaatacagccataattaaattataaaataattaaggtacaggataatatttgacagttaaaggggcagtgttatctacttacactgaaaggaatttaaaagagcaagctacaaaaaagtattgataaatagtatctgttttataaaacagtatgttacatgagtataaaatacataatgaagtacacatacttctacataaacagaatattagaagatgtacgtgcaaatgataacagtacttgtcattggggaggggcatgggattggggatggtgattctggggactctgatttttactaaggagaacatacttgtcttttataattaaacgttttaaagattaaaaagcattttaatacgcttgttattatatttccaccaagcgctctaaaacaatattaaaatataaaacttttctatttttcttaccatgcctttgggtcccaaggtgctctttaccaagtctccaatggcgatggcaccaataaaagaagtcagacgagctgtctctgctctctcttcatcagctcctgccttaaagatgttaacaggtgcaagggaaagggacgccatggttccgaggagttccgcacacaagtgccaa

SEQ ID NO: 240094 - DNA, 1489 bp, Homo Sapiens
ttgggcccgcggcgtcgggtttgggctggaggtcgccatggggcgaggcagcggcaccttcgagcgtctcctagacaaggcgaccagccagctcctgttggagacagattgggagtccattttgcagatctgcgacctgatccgccaaggggacacacaagcaaaatatgctgtgaattccatcaagaagaaagtcaacgacaagaacccacacgtcgccttgtatgccctggaggtcatggaatctgtggtaaagaactgtggccagacagttcatgatgaggtggccaacaagcagaccatggaggagctgaaggacctgctgaagagacaagtggaggtaaacgtccgtaacaagatcctgtacctgatccaggcctgggcgcatgccttccggaacgagcccaagtacaaggtggtccaggacacctaccagatcatgaaggtggaggggcacgtctttccagaattcaaagagagcgatgccatgtttgctgccgagagagccccagactgggtggacgctgaggaatgccaccgctgcagggtgcagttcggggtgatgacccgtaagcaccactgccgggcgtgtgggcagatattctgtggaaagtgttcttccaagtactccaccatccccaagtttggcatcgagaaggaggtgcgcgtgtgtgagccctgctacgagcagctgaacaggaaagcggagggaaaggccacttccaccactgagctgccccccgagtacctgaccagccccctgtctcagcagtcccagctgccccccaagagggacgagacggccctgcaggaggaggaggagctgcagctggccctggcgctgtcacagtcagaggcggaggagaaggagaggctgagacagaagtccacgtacacttcgtaccccaaggcggagcccatgccctcggcctcctcagcgccccccgccagcagcctgtactcttcacctgtgaactcgtcggcgcctctggctgaggacatcgaccctgagctcgcacggtatctcaaccggaactactgggagaagaagcaggaggaggctcgcaagagccccacgccatctgcgcccgtgcccctgacggagccggctgcacagcctggggaagggcacgcagcccccaccaacgtggtggagaaccccctcccggagacagactctcagcccattcctccctctggtggcccctttagtgagccacagttccacaatggcgagtctgaggagagccacgagcagttcctgaaggcgctgcagaacgccgtcaccaccttcgtgaaccgcatgaagagtaaccacatgcggggccgcagcatcaccaatgactcggccgtgctctcactcttccagtccatcaacggcatgcacccgcagctgctggagctgctcaaccagctggacgagcgcagctgtactatgaggggctgcaggacagctggcacagattctgcgatgcccggggggcgctga

SEQ ID NO: 240095 - DNA, 1300 bp, Homo Sapiens
ttgggaattaatcgctcatgcccgggaagcagcatccagggtcctgagtgcactgagtgaccggcagatgtcagaacggatggccttggatgcccggaagcgtgagcagtttcagaggctgaaagaacaatttgtgaaggaccaggagcgacgccaggcggccaggcaggaggagctggatgatgacttcagctacgcccgtgaactccgagacagggagagaaggctgaagtccctggaggaggagctggagaggaaggcgaggcaggcactggtcgaccactacagcaagctctctgcagaggcagctcgtcgggagcagaaggcactgtggagaatccagaggcaccgactggagagtgcacggcttcgttttctcttagaagatgagaaacacattcaggagatgctgaaagcagtgtctgaggctcaccagccccaggagccgccagacgtcctcttgagcgtgcacccccaggtcacgtctccgggccctgagcacccagagggaggccaaggctgtgattctgggtctgcagagcaacactcgcctgcctgggatggctggaacaggccaggcctgctgaccccacagccccttaagcctctagcagtgggggctggtggcagggggctgcagcaggcggagggggccagacccttctctgacagcctcagcattggagacttcctacctgtgggcccaggggctgagccgtccgtgcagactggcatggtccctctcctggaggtggcgctgcagaccattaacttggacctgcccccctcagctcctggggaggcacccgcagcagccagcactcagccctccaggccacaggagtacgactttagtactgtcctgaggccagctgtggccacctcacctgcaccagggcccctgcaggctgcagagtgcagcttgggcagctcagggctacagctgtgggaggacagttgtgggaagatggatgcctgtggctccgcctcgcgggagactctgctcccctcacacccacccaggcgtgctgctctggaggaggggagcagccagcccacagagcggctctttgggcaggtgtcagggggtggtcttcccacaggggactacgcttctgaaatagctcccacccggccacggtggaacacccacgggcacgtgtctgacgccagcatcagggtcggggagaatgtgtcagatgtggctcccacccagctcacggtggaacacccacggacacgtatccaatgccagcatcagctttagggagtctgtgtcagatgtggctcccactcggcc

SEQ ID NO: 240096 - DNA, 410 bp, Homo Sapiens
aaaagacatgtttacttttttaataagcagttcaattgtttttttattcacgtaactcaggatcaacagtaacttcatctaatgtgccatcagagcagtcgcaaattgaatgaaagtgatggccaccacaaaatcctttttctcctgaactctccataaagtctcctttctttgcacatctttgtgctaaaataattagctacttgtaaagacagtacacatagcaacactacacattcacatatttttcccacatctgttgtcttatttaagcgcaacttatttggaatcagaattgaattcaaattgggactaaggcagtaagtaactatgacctcgaggaagtcacttaagctctctgggtctcagttttctcacttgtacaatgagattaataataaaaattatgg

SEQ ID NO: 240097 - DNA, 1194 bp, Homo Sapiens
  misc_feature (271)..(411): n is a, c, g, or t
  misc_feature (960)..(968): n is a, c, g, or t
ttggtggggtttctggtgttaaatagaagtgatacttctgcataaagtattatggagatgctctgttccatccagggaggtgcaggtgaaaagagggcagttcatcctcctcacacttagggcagggagcagcatgcaggggcagatcagcagctttgcatgttgacaaatccactctctgctgcagatgcctaggggaagttgcagacttaaattttcttttgtaaaatgggggaacacaaacagatcttatgtcacactggttactccnnnnnnnnnnnnnnnnnnnnnnnnnnnnnnnnnnnnnnnnnnnnnnnnnnnnnnnnnnnnnnnnnnnnnnnnnnnnnnnnnnnnnnnnnnnnnnnnnnnnnnnnnnnnnnnnnnnnnnnnnnnnnnnnnnnnnnnnnnnnncatttttgtagtctgtcaccacatttatgaatggctggtcctcgggctctgtggtgtgtatgattagtaacatggctgaagctaatgcattctctaatcctgatccccaggttcatgagtgtctttcattaatattctttgtaatttaaccccagagcagtgctgcacagctcaatggccttacgataagataagcctctaattctgtcttcagctctcaccagcttgtgtcctaacgtatcaagaatttcacccacctgagcctcactttcctgtaatttactgcagtgggttcctaggcatataacacctaagaggtcagtagattgccttagaatgattttaggattccagatctcaattcatctgtaaaaatcagggcagtaggaaactttctgagacacacctttaaaattagttataatgtgtgttatatttacagatcttagttttgaagaccagcaacacagcaatacttccagatctccatataacctctgttcatttgggaggggctttgtattttcaacaggagagttcaaagttcannnnnnnnncagcaactacagttctaagtgaaatctatttttattgatacatgatattttacatgtttatgggatacatatgagtcataatctattttaaataatatcttagtgttgtaaaatcaacagtgctttttaaaagaaatataccttgttaattatcccacatgtgtcttcagaagtacagcttgaacaattccaccttctgtggaccaagcaccaccctgggcatttc

SEQ ID NO: 240098 - DNA, 1673 bp, Homo Sapiens
  misc_feature (565)..(573): n is a, c, g, or t
  misc_feature (945)..(961): n is a, c, g, or t
  misc_feature (1208)..(1220): n is a, c, g, or t
ttgggaaggaactacaagagagtcggagatgatgcagcacacacacaattccccagcccagtgatgcttgtgttgaccagatgttcctgagtctggagcaagcacccaggccagaataacagagctttcttagttggtgaagacttaaacatctgcctgaggtcaggaggcaatttgcctgccttgtacaaaagctcaggtgaaagactgagatgaatgtctttcctctccctgcctcccaccagacttcctcctggaaaacgctttggtagatttggccaggagctttcttttatgtaaattggataaatacacacaccatacactatccacagatatagccaagtagatttgggtagaggatactatttccagaatagtgtttagctcacctagggggatatgtttgtatacacatttgcatatacccacatggggacataagctaatttttttacaggacacagaattctgttcaatgctgttaaatatgccaatagtttaatctcttctattttgttgtcgttgcttgtttgaagaaaatcatgacattccaagttgacannnnnnnnncattttaattaaaatttgaaattctgaacaccgtcagcaccctctcttccctatcatgggtcatctgacccctgtccgtctccttgtccctgcttcatgtttgggggcctttctttaactgccttcctggcttagctcagatggcagatgagagtgtagtcaagggcctgggcacaggagggagagctgcagagtgtcctgcctgccttggctggagggacacctctcctgggtgtggagacagcttggtttcctttcctagctccctggtgggtgaatgccacctcctgagatcctcacctcttggaattaaaattgttggtcactggggaaagcctgagtttgcaaccagttgtagggtttctgttgtgnnnnnnnnnnnnnnnnngaaataaaactataatataaattctcctattaaataaaattattttaagttttagtgtcaaaagtgagatgctgagagtaggtgataatgtatattttacagagtgggggttggcaggatggtgacattgaacatgattgctctctgtctcttttttcagcttatgggtatttatcttctattagtatttgtatcttcagttcattccactttaggaaacagagctgccaattgaaacagaagaagnnnnnnnnnnnnngcagcagacaacacactgtagagtcttgcacacacacaagtgcccaggcaaggtgcttggcagaaccgcagagtgggaagagagtaccggcatcgggtttccttgggatcaatttcattaccgtgtacctttcccattgtggtcatgccatttggcagggggagaatgggaggcttggccttctttgtgaggcagtgtgagcagaagctgatgccagcatgtcactggttttgaagggatgagcccagacttgatgttttgggattgtccttattttaacctcaaggtctcgcatggtggggcccctgaccaacctacacaagttccctcccacaagtggacatcagtgtcttctctgtgaggcatctgggccattcgcactccctggtgtggtcagcctctctcacacaaggaggaacttgggtgaaggctgagtgtgagcacctgaagttt

SEQ ID NO: 240099 - DNA, 332 bp, Homo Sapiens
atatattagtttttttgatctttatttgagaaaatcagaagataaatgtatcaaaagaccacacaggtggcgggggaggcacagccattggcggcagcaggggtgggcatccgggataaggctttacttggcggcagtctcatcggattttgcagcttctgggcccccaagctgggcccgcgactcgaaggtgactgggatggtgatctcgttggactgcgtggctagcttgggcatgggggcctccacggtcagtgtgccctcaggggacagggaggaggaaacttgggtgggaaggggactgctgtagaaaagccaacttttttgtacaa

SEQ ID NO: 240100 - DNA, 730 bp, Homo Sapiens
ttggctggttttgagactgcagcttggactaaattcagtcatctggctgtctggggaagcatgctgaccagtctggtgttctttggcatctactcagccatctggtccaccattctcattgccccaaatatgagaggacagcaagcaactgtgatcctgagctgtgcacacttctggttgggattatttctggtttctacttcctgtttgaagatgtggcatggagagtgctctgctttgacctgaagtattttatctatcctcagtctcaggacactgttgatggaattaaggccaagcacatctgcaaaaaagacattgctggaggaggtgcaaagagctggaaaccaagtctccagtcctgggaaaagcagtggtatggaaaagcaatggaaagagcattttgaaaatgccattccactgttttctggcctttatgatttctgctgagaaatccactgttagtctgatggggtctccttcatagcaccaatgacctgaagagccttgttgaaggaagactccatctgatgactcagagcaagtattttttagtgtgttattgttattagcagaaagagggccataaaatacatggggcaagatgaatatatcttaggcaaaagaagaaaatattcaaattcttatgttattttatctaattattttatctctttttgtgtgtgacttataatgtgtgtattgtattaataaaagtatataaacatgt

SEQ ID NO: 240101 - DNA, 1000 bp, Homo Sapiens
  misc_feature (221)..(241): n is a, c, g, or t
  misc_feature (272)..(357): n is a, c, g, or t
aaagttcttgattcagagtttgggaggaacggagcagggcgcggagctggggagtgagcagtacgcaggcgcacttggagccgcgcacacgcccactcagcggctagaaactggcaccgcgccagggaactccccgcttatctggggatggggctgtgggtgggaaggggactctgtagaaaagcgcattttctctcttcatcgatgatctttaaaaaaannnnnnnnnnnnnnnnnnnnntaatggcgcggggtcggggcgggggggcgcnnnnnnnnnnnnnnnnnnnnnnnnnnnnnnnnnnnnnnnnnnnnnnnnnnnnnnnnnnnnnnnnnnnnnnnnnnnnnnnnnnnnnnagcagaaagcgcccttagaagcgacccgcactcccaattcctgagcaagggaatcaggagtcctgtttttcccggtgctgggccaacgtttaactccccaggcccccgggacccccgtttcaaccgcacgcccccggccctgcccgccctgctagcctcctcctctcccctgcaggagcaggggggctcaccggtgatctccaccacgccatccttggtcttgaccgtcagctcgtccggggcgaagtggttgacatccagggacacgcgccagcggtccgcagtgtgccggatctccgagaccccgctgctgagttgccggctgagcgcgcggctgtaggcgggcgcggccactgcggggctctcgatggcggcggggggcagggggcgcacgtagcctggccagctgctgccgcctaaccactgcgaccactcctccggcagccggggcagcccgaaggcctggtcgaagaggcggctatgcgggtaccagtcgcggaaggggtcccagctggggccccgcaggagcgagaaggggacgcggcgctcggtcatgctggctgactctgctctgggcccaacttttttgtacaaagttgtttttattaggaaaagcattgctcatcaatttgtgcaacgaaca

SEQ ID NO: 240102 - DNA, 510 bp, Homo Sapiens
  misc_feature (119)..(128): n is a, c, g, or t
catgatttttaaatgattaaaactttggtttttgtttgttttggttcagttttaaggtttaccataaatctattggttttagattctaagttgtatataagcttctgttttaaaagaannnnnnnnnnaaatcctcttatcgtcaacaatacttagttgtgctggaaattttattttggtattgtttaatggagaaagacaaataatgttcgagaacagacattgattcataacatcaaagtatattgtgagaagatggtatttcagaatagaggaagaatttcttatgtgctggtaggattgtttgtaaataatcatttctgcatgattttcatagctggatttctttaataaagccatttaaaggttaagttctagattgcttcatgttgcttatcaatgttttaaagctaaaatagaaaattagcagttaagttggctcaaccggaaattcagtatatcctttaaaaagagaaatttagtaagtagtgtgtctaaagaatgacatat

SEQ ID NO: 240103 - DNA, 961 bp, Homo Sapiens
tacatcatgcaatcaaagtttaaaaaggtttcacggaatgtttcaaacctttgggaacaaatcatgtagtaaccattttgaccagtttttgcttgaataaacgcaaaatttgcaagtcaacacagatgcaggctttgctgcaaaaagaaccgctgatcagagccaaaccagtttccaaggagggcacctgccagaaaacaggggcctcagcagagagccagaatgactccgtgtgttggcacaaacttttacgcctttggagtctgtggcagctgcacacccagcagcaccacctctgcccaagcaaaagccagtcctttactggagaaacagggaacatcacggttctttctcctcaattacttttaaagtcccattaaactaaaaagcaacaaaaaaatccagaatcccatgcatctgcagctgtaattaagacttgcaaaatttcacgtcatctaccccttaaagcctgtctgtttcttgcactaataatggaagcacagttttgatacctttgagagttcactctctagctaaaccagccacaaaatatcgcattcccaaacaagaacccaccagagcattacaagaggcgggagaagttaattcagcgcaatatacaattccccacatgttcccaacgttttaacatgctcgcaataagaaaaaaagccggtttctctggattcagatgtggtgaaatcgttttcatcactgtcaaaggcatcaaccagatttgggagtttgttaaaaggttaaaaattcatacaaaacctgctgtaaattaagacaaaggtagattaaaatgcgtcattgtctgtctctttaaataaagtaatgctttccataaaaagcaaaggtgggcttttgccttgatgccgaacaacgctgtctctagaattctgtgcaattctgcacaaaaatacattctctgaaaaaatccaacttttttgtacaaagt

SEQ ID NO: 240104 - DNA, 748 bp, Homo Sapiens
tttgtggctgaggaaacccaaggcttgaagaagggacacgatttgtccacagttgcagccaggaggaagcaaagccaggccttgaacataggcctcgtgactgtaaggagaatatgtgccaccccttccctgggtgtgcataggtgagctcagagaacagagccggcaatggggtcctgggatcgcgagcaaaattctatctgatctatgtgggcaaagttcctaatctcctggcagagtttttatgtttttggttttaagagttgaagtagttccatttaacccttggatactacattctccacttagaagaatgagaaaagacagcgttgtatccataacagatacattccatgcactcagttcatttcctagaaaagaaactgttagttatcatcacatggattttgaattttcaggaaggctactgttcacagattctgttttccaactgagaaactgaggaaagagggaaatgatcttaattagttgtacctggagaggagaaaacacaaaagacaaattcttgggcagttcttcatgaaaagacagagaatgatgtaatcctgaccgtaaggatgggtcagtttctaaagcttcctggaaagggccttcaaatacagtctccatatgttcaactaagtttaggaggtgatcgttataacctcatataataagaaaggaacccaaaaaagtgcaccaggtgagacgaggagagcagattctgacaagtgggttaacgggtttc

SEQ ID NO: 240105 - DNA, 596 bp, Homo Sapiens
  misc_feature (200)..(230): n is a, c, g, or t
acaaaaatacattgaacttagtatatgtttcaataaaatgggtaaatacagaatctgaacaggacaagtctataagttataatccttcttgtggggatagaacattccactccactaagaaaagagaatcacaacatgattaggcctgattatctcataccgcctactgttctaatttcagagactggtggacttggagnnnnnnnnnnnnnnnnnnnnnnnnnnnnnnnctgaatatggtcaactgcctcaattgctctctaaatatacattttcccatttctttacacagccaaatgagatgaggacgtgaggcagagccctgtgggggacggtcaggggctctgctgcctaaatgccaggcagatgcatgggttccctgaggtggcccagaaatgtattttgaccactcagtgctgcaactgagaaatacaggtagagtagcaggaatgaaaaagaagcttcaagaactgctggcaggaggcctgatgtccacaagcacgtgttcaaaactcaacctacacagttagaaaagacagctgagatagaatcctcattttttgttaaggattgacaaacccaacttttttgtacaa

SEQ ID NO: 240106 - DNA, 2272 bp, Homo Sapiens
  misc_feature (628)..(652): n is a, c, g, or t
  misc_feature (1228)..(1282): n is a, c, g, or t
  misc_feature (1285)..(1531): n is a, c, g, or t
taatcaaattaaaataatgccatgtcctctgataaaaaaagaagttctcttgtcacaagaaaaatcaactttacatgttatataatacagtacatctccctatgagtatacagactacgtatatgaaggtcatcagtatttctgaatgcaacgtaaatatattagtggagtgcttgagtgaaggtgttaaactttgtcttccttattataaacttgtcactccttactgtgaagtttgtgtaataacttgatgataaattctattttgtaaagaaccagtgaatttctttttaaatctcttaaaaccattacagaaattgtcttcatatatattctacagatgtccaaaccaatagggcaatgttctaacaccaactatggaagatggcttttactgattatctagacccataagatttgcagtaaaacatcaatactgcagtgttacctacaggttagcctatgttgctttaaatgatatgtgtttctcctgaattgattagaggtgttacagttcaaagccacagcacacacaggcagaatggaccttaatacgcatgtaggcagtgcagttagaaagggatgtctgttccttttattccagtaccttcatataataaagttaacnnnnnnnnnnnnnnnnnnnnnnnnngagccagctggcactgccaaccaattcctatagtagtcttagaaatcctaatcctgtagaatttcctcttgtagtcaataagcaccaccatcttcaggagtatttcagtgtattgttatctacgccaagcaagcctggtgatgcagctacctgagttctcttggttatgggtgaatgttatcttcattcataacttcccagctttcatgtaggtggggatagagccacgttgagtcaacccttcaaaccttttataggtataattgagaaaaacccagtctttggatttgtagtccggttctgtggtatttggcactggttgtaaaatatcagattcagggaagtcatcaaaatttgaagtatcatcaatgcttttgatttctatagggattgctgctggcctttccctataaaaaggtattaagtatgcatggtaacttttcttgaactctcaatttccaacaaataattctacttgtaaattctgcatactattctacagatactagaaaatccaaggaaatttattgtggatttgagattagttaaagggagttcaaaatagttgagtataannnnnnnnnnnnnnnnnnnnnnnnnnnnnnnnnnnnnnnnnnnnnnnnnnnnnnnggnnnnnnnnnnnnnnnnnnnnnnnnnnnnnnnnnnnnnnnnnnnnnnnnnnnnnnnnnnnnnnnnnnnnnnnnnnnnnnnnnnnnnnnnnnnnnnnnnnnnnnnnnnnnnnnnnnnnnnnnnnnnnnnnnnnnnnnnnnnnnnnnnnnnnnnnnnnnnnnnnnnnnnnnnnnnnnnnnnnnnnnnnnnnnnnnnnnnnnnnnnnnnnnnnnnnnnnnnnnnnnnnnnnnnnnnnnnnnnnnnnnnnnncacctacttgccatttttatatctctgtacccaaggctttctcatcctatttttttaagtggaaaaatgagctaatgaaaagtaaaagaagaggttttatttaaaagattgtataattgtataaagtatttgagatattatgaggacaggatccttcttaattgatttaggaatagaattctactagtagacaatccataaattaaaagtcatttgggaaaataaggggcacataggtgaagggactatatatttgtgatgaaatctgcatgcaaaaacttctgtcatacaaattttaagagaatcaaagatactcagttaaaaagaaaccagtcatgaaaatgccttcttatcatgctaaaaagtttagctatacaaatggttaaaagaagctatcagtttttattgcttctgttttttcaacaaatatttattggatttattaggtgctaagtttaccaaattatttaaaaccatatatattttttaccagaattattccaactcatttatacttagtatactactttaataaacctagtttagaggaaagaaccctggaggcctgagagctaaccttccttgttattaactagcagtatgaccttaggcagccaaatccctgctccatgactgttccctcattataaaaccaaaagaactggcagtctctaagcatccttcccactgtaaaagggagggtatttttaatgctattcaatccaacttttttgtacaaag

SEQ ID NO: 240107 - DNA, 698 bp, Homo Sapiens
ttggcagcgactctcccgggctgccagccgggacgcgcggccgccgccgctgcagacgacgagtccgccctcgtcccgcgcccccggggctcgcggagccaggtctccacctctgggcaggagagttgccgaccacctcgggggtgctttctctgcgcttgaacatctatagctgcttctgaggggctgggagccgggcccctgggagagacgagccatgaaccccccacagcctctgcatttggggacctcaccttaggagagtgccatttacagcttccgccagggcaaaggagctgagcagccatcccaagcccagcccacctccctcccccggcccctggtaggcatggactagcagctgtgagcagccagagctgatgcccggcccccaggggggcagaggcgccgccaccatgagcctgggcaagctctcgcctgtgggctgggtgtccagttcacagggaaagaggcggctgactgcagacatgatcagccacccactcggggacttccgccacaccatgcatgtgggccgtggcggggatgtcttcggggacacgtccttcctcagcaaccacggtggcagctccgggagcacccatcgctcaccccgcagcttcctggccaagaagctgcagctggtgcggagggtgggggcgcccccccggatgatgacatctccccctgcaccctcc

SEQ ID NO: 240108 - DNA, 3374 bp, Homo Sapiens
  misc_feature (2870)..(2934): n is a, c, g, or t
tcaagtactggagcagctagcaagctcactccccactctcctcacttatctctgtgacaatgtctatcaggctctggagcccgaagatatagccagcatcctggccctcatgcaccacggtgtcctcgccatacagcctgcaggtggtgtgtgcaaagtcgatcatgcgcacatctacagagctggcgccgatgggtttgtaggcataggcaccagcagactcatcagctgattcctctgacaggtcctccaaatcctcagcatctgagtccaggaccacttcgggccgctccttgccatcataaatgaccagcagggagcttgagtagaagcggtaggactcctgtcgctccaacactgccttgagctcagtcagcttcttgagcacagggcccaggagttcacggcgcaggtaccgcccattgtggaagaactggaaaagtgcctccttgaagccctgcaccgatagcttccgtccatggtacttgttcatgaacatgagctgcccactgcctgcttggtacacctgcatgccacacacacgcacaccaatgactgcagatgtgctctgctgacattttcggatctggttggctgccttctcctctgaagcatcatcaccatgttgtcgtgtgcccatcttgaggtcaaggacacaaggcacctcatagcgggaagtcaggttttccagtaagataaatttgtactggttccgatgctttgcattctccttcattctctgtaactgttgctggtgacatttcatgctccaagggttatagtgtttaagctgggaacttatattccccttcttctctacagtgtagtacaagacttcagatttctttagccactcaaattcttcttctaacttatggctcttcattttctcctctttacggtgctgacgcacccagtccttaggggtcttttctgtttctaagacatgatgttttttgtttgttgtccaccttaggagcttactttttggttcacagtctgaattatctacaatgtccacaattccatggtcccctttcaatggatatgctattagacacaagttcctgtcttcatcttcttcaaagcgcacagataccacacctggaagggggtgaggagcagaaagaacttttaatttagcaggaagaagcgttgtaagtaacatgattgtaacatttgtttttttcttacccagttccttagtctctatgttgccagaggccccaaactcatctgcaaacttaacaaatatcaaaacagctagaaaagatgacaccatacaagacaagcaattagggagcaaacatggctgagagtcttcctctctgatgtactcaacgaggcaagagccaaagaattacaagacacatttttccatcattgaaaatgtttattaatttttatgtaattcttctaatcctaaaagactgaaaacattgctctttatagtttgcgggaatttttaatgccctaaacagaaactccaacagcctcatggcttgctttaaagcagagcctgaatacagggggaacacaggtttgcctgagggttaagaagcatccaagagtaagggaagactgggtaagcaaagcaaaataaaggggcaaacaaaacaaaccacacagcacaagacaccctagcaaaggcttcccacagtgcccccacacgggtaggcacccaggccttttgttcttataaaatatgtttttattggtctttgcagtctcacgtcacaaaataacaaaatgaacacaaggcagatagagctggttggggagcacagacatgtggtggccttgaaagcagcttttccccttaagtctctagaacctgccatgagtaattaagacagtctttgaggatggggctgtcaggtgggggcgtttcagcaggtgccgacgagcgccttacaaacgactggctgaacacctttcctcccaggcctctctgccccagcatcactcaatctgctcagtcctcgactgctgcaggggaatgcgtgctcagagagagatgacacttctgaggtggcccccagctctgggtgcagaggagccggggtggggtattcaggccacacttccctgtggccacaggggaaaggaccaggggaaaaaatggggcagggatggccagctaacaaggggcctttggctttgtcctggaaaaaaacaacagagaaggaccaagtgagggcccccaactcccccatccccaccgcaatacacatgcatattcagagtacagagaaaggcacccagtacattctgtccttaaagacaatgtttcaacagtcccaaaagaacctaagttgttctagagtcctttatgtaaccaggtaatgcacatttaaaattaatttctttaatggattcttacttgatttacaaaagactcccccactccccaacaaagaccccaccatgctggtggctgctgatgtcccctataaaatacattataaaaagaaataaaaaattatcatatgtgaatcgaagggttgctttcatatagcaattttggggacattctgtaacagcaaagggcttgggctaatcagcacaggcctcccactcctgcattccatctgactcaacgctgctccccggcctactaattacccgagcttctggtttcctggaggacaaaaagcaggcggcaagtattctgggtaaaatcctcccaaagtcttcccccaccgtccccccagtgggggactatgggttactgtgatcaagagacacctgaacataaaacacaactacacttctaccaaaatcaaactcaaatccacacaacaaaacagaattgagcaatcttaccagggattgaaaactgagggtgtgagatgctgggctgagggccnnnnnnnnnnnnnnnnnnnnnnnnnnnnnnnnnnnnnnnnnnnnnnnnnnnnnnnnnnnnnnnnnggctgccagggccttccatggccacgatctctcacatctcctcgccagtgtggcaacccctccagcagctgggacttacctttgtactggggagtgaatttgcgcatctcagcagggagggtctcgtagaactgatgttcccttgggaccaggggcttgcacagggttgtctcattgaagcggagcacgcatgagtgccccccgacctggtggacaaagggctccagaaggacgcctttggcgcggggctccacatccatggccctgaaggctgggctcatcctccgggcgcagatggcggggagatgggggaggcagcggagtccagcggccagtacgtcttctgtctgttgtttgtccgtgtgtccctctcgtcttggctccttggcttgttctggccaggatgctctgctgccgcctcagcgcgggttcctcgccaa

SEQ ID NO: 240109 - DNA, 890 bp, Homo Sapiens
ttggcccgaatgtccttagccgtggggaaagatggcggaaaatttaaaaggctgcagcgtgtgttgcaagtcttcttggaatcagctgcaggacctgtgccgcctggccaagctctcctgccctgccctcggtatctctaagaggaacctctatgactttgaagtcgagtacctgtgcgattacaagaagatccgcgaacaggaatattacctggtgaaatggcgtggatatccagactcagagagcacctgggagccacggcagaatctcaagtgtgtgcgtatcctcaagcagttccacaaggacttagaaagggagctgctccggcggcaccaccggtcaaagaccccccggcacctggacccaagcttggccaactacctggtgcagaaggccaagcagaggcgggcgctccgtcgctgggagcaggagctcaatgccaagcgcagccatctgggacgcatcactgtagagaatgaggtggacctggacggccctccgcgggccttcgtgtacatcaatgagtaccgtgttggtgagggcatcaccctcaaccaggtggctgtgggctgcgagtgccaggactgtctgtgggcacccactggaggctgctgcccgggggcgtcactgcacaagtttgcctacaatgaccagggccaggtgcggcttcgagccgggctgcccatctacgagtgcaactcccgctgccgctgcggctatgactgcccaaatcgtgtggtacagaagggtatccgatatgacctctgcatcttccgcacggatgatgggcgtggctggggcgtccgcaccctggtagaagattcgcaagaacagcttcgtcatggagtacgtgggagagatcattacctcagaggagcagagcggcggg

SEQ ID NO: 240110 - DNA, 897 bp, Homo Sapiens
ttggttgtcgcagagccgcgcccgccatgagggagatcgtgcacatccaggcgggccagtgcgggaaccagatcggcaccaagttttgggaagtgatcagcgatgagcacggcatcgacccggccggaggctacgtgggagactcggcgctgcagctggagagaatcaacgtctactacaatgagtcatcctctcagaaatatgtgcccagggccgccctggtggacttagagccaggcaccatggacagcgtgcggtctgggccttttgggcagcttttccggcctgacaacttcatctttggccagacgggtgcagggaacaactgggcgaaagggcactacacggagggcgcggagctggtggacgcagtgctggacgtggtgcggaaggagtgcgagcactgcgactgcctgcagggcttccagctcacgcactcgctgggcggcggcacgggctcaggcatgggcacgctgctcatcagcaagatccgtgaggagttcccggaccgcatcatgaacaccttcagcgtcatgccctcgcccaaggtgtcggacacggtggtggagccctacaatgccacactgtcggtgcaccagctggtggagaatacagacgagacctactgcatcgacaacgaggcgctctatgacatctgcttccgcactctgaagctgacaacgcccacctacggggacctcaaccacctggtgtccgccaccatgagtggggtcaccacctcgctgcgcttcccgggccagctcaatgctgacctgcgcaagctggcggtgaacatggtgcccttcccgcgcctgcacttcttcatgcctggcttcgcgccgctcaccagccgcggcagccagcagtaccgggccctgaccgtgcccgagctcaccc

SEQ ID NO: 240111 - DNA, 898 bp, Homo Sapiens
ctttgtacaaaaaagttggctggagcctggcaccatggactctgtcaggtctggacccttcggccagatcttcagaccagacaacttcgtgttcggccagagtggagccgggaataactgggccaagggccactacacagagggagccgagctggtcgactcggtcctggatgtggtgaggaaggagtcagagagctgtgactgtctccagggcttccagctgacccactctctggggggcggcacggggtccgggatgggcaccctgctcatcagcaagatccgggaagagtacccagaccgcatcatgaacaccttcagcgtcatgccctcacccaaggtgtcagacacggtggtggagccctacaacgccaccctctcggtccaccagctggtggaaaacacagatgaaacctactccattgataacgaggccctgtatgacatctgcttccgcaccctgaagctgaccacccccacctacggggacctcaaccacctggtgtcggccaccatgagcggggtcaccacctgcctgcgcttcccgggccagctgaacgcagacctgcgcaagctggcggtgaacatggtgcccttccctcgcctgcacttcttcatgcccggcttcgcgcccctgaccagccggggcagccagcagtaccgggcgctcacggtgcccgagctcacccagcagatgttcgactccaagaacatgatggccgcctgcgacccgcgccacggccgctacctgacggtggctgccatcttccggggccgcatgtccatgaaggaggtggacgagcagatgctcaacgtgcagaacaagaacagcagctacttcttggagtggatccccaaaaacgtgaaaacggccgtgtggcgacatcccgccccgcgg

SEQ ID NO: 240112 - DNA, 1207 bp, Homo Sapiens
  misc_feature (943)..(960): n is a, c, g, or t
ttggcatttttctgttgtgtatgttggggttccatttatgtctttagaaagaaaggcccttttgccagatgagcttgaaagctgtactttagacaacctggtagatcattcagcagattgggtcttgccaagatctagttctgcctgaaaagtcacttctgccctctttgtttcttccagcaatgccattgggcctctggttgctttatatttggtttatgacacaggagatgtttcttcaaaagtggcaacaccaatatggcttctactctatggtggtgttggtatctgtgttggtctgtgggtttggggaagaagagttatccagaccatggggaaggatctgacaccgatcacaccctctagtggcttcagtattgaactggcatctgccctcactgtggtgattgcatcaaatattggccttcccatcagtacaacacattgtaaagtgggctctgttgtgtctgttggctggctccggtccaagaaggctgttgactggcgtctctttcgtaacatttttatggcctggtttgtcacagtccccatttctggagttatcagtgctgccatcatggcaatcttcagatatgtcatcctcagaatgtgaagctgtttgagattaaaatttgtgtcaatgtttgggaccatcttaggtattcctgctcccctgaagaatgattacagtgttaacagaagactgacaagagtctttttatttgggagccagaggagggaagtgttacttgtgctataactgcttttgtgctaaatatgaattgtctcaaaattagctgtgtaaaatagcccgggttccactggctcctgctgaggtcccctttccttctgggctgtgaattcctgtacatatttctctactttttgtatcaggcttcaattccattatgttttaatgttgtctctgaagatgacttgtgannnnnnnnnnnnnnnnnnaaaccatgaagagccgtttgacagagcatgctctgcgttgttggtttcaccagcttctgccctcacatgcacagggatttaacaacaaaaatataactacaacttcccttgtagtctcttatataagtagagtccttggtactctgccctcctgtcagtagtggcaggatctattggcatattcgggagcttcttacagggatgaggttctttgaacacagtgaaaatttaaattattaactttttt

SEQ ID NO: 240113 - DNA, 1223 bp, Homo Sapiens
taaagccaactttgtacaaaaaagttggctccggcgcagtgttgggactgtctgggtatcggaaagcaagcctacgttgctcactattacgtataatccttttcttttcaagatgcctgaggaagtgcaccatggagaggaggaggtggagacttttgcctttcaggcagaaattgcccaactcatgtccctcatcatcaataccttctattccaacaaggagattttccttcgggagttgatctctaatgcttctgatgccttggacaagattcgctatgagagcctgacagacccttggcgaagttggacagtggtaaagagctgaaaattgacatcatccccaaccctcaggaacgtaccctgactttggtagacacaggcattggcatgaccaaagctgatctcataaataatttgggaaccattgccaagtctggtactaaagcattcatggaggctcttcaggctggtgcagacatctccatgattgggcagtttggtgttggcttttattctgcctacttggtggcagagaaagtggttgtgatcacaaagcacaacgatgatgaacagtatgcttgggagtcttctgctggaggttccttcactgtgcgtgctgaccatggtgagcccattggcaggggtaccaaagtgatcctccatcttaaagaagatcagacagagtacctagaagagaggcgggtcaaagaagtagtgaagaagcattctcagttcataggctatcccatcaccctttatttggagaaggaacgagagaaggaaattagtgatgatgaggcagaggaagagaaaggtgagaaagaagaggaagataaagatgatgaagaaaaacccaagatcgaagatgtgggttcagatgaggaggatgacagcggtaaggataagaagaagaaaactaagaagatcaaagagaaatacattgatcaggaagaactaaacaagaccaagcctatttggaccagaaaccctgatgacatcacccaagaggagtatggagaattctacaagagcctcactaatgactgggaagaccacttggcagtcaagcacttttctgtagaagggtcagttggaattcaggcattgctatttattcctcgtcgggctccctttgacctttttgagaacaagaagaaaaagaacaacatcaaactctatgtccgccgtgtgttcatcatggacagctgtgatgagttgat

SEQ ID NO: 240114 - DNA, 1279 bp, Homo Sapiens
ttctggattttgtgttaactctcaatgaatttagcaatgtgactacaggcaattacgttaacaaattccatctattaaatgttatcttgcattacttaaaagtatttgtatagaagtaaacaaagcttaaagaactgcatatgaaaatactatataatattaaattcttctttttcttgacagggtttgtcttcagtattgggagagtttcaaatcccctagactaaatgcatgttctccactttcatcaatgcttttcttcataaagttataatttcattttgctatacccttgaaatttaaaaaaatgtctgataaagtgtaaaaagctaagggtatgtgattttcaatattataaacctaaaaatacttcagtttttaaatgttataagtttattttgcctactcttaatccaaatctattttgaccttcttttctactgcttaccccccaaaccactaaaaggcacagcagtgatcatgaatggtgagtgagtcaggccataagattgcttcctcagtacggatactctaggccatgttgaattgagggtggagaatgaatagcgtggttttccttatcctgtgaaactcaggggggatgcaaaatgagcaaagtcatcttaaaggtgtttcctttccatttagcttataaataaaacagagtttaagtgtgagaacagcagagcagaacaaggaggcctccaatttgttgtgggcttttgcaagcatggcatgaagctgctaaaggctagatatttcagagcatgtactgtactccaaacctaccactccctaacagcttcagcttcgtgccatccacaatcctagtgataaaggaaaaggtgttgaagtaaggaaaccaataatatccaaagttgtttgctttttaaatagcttttaaagtatctgtctatctgccccatacaaagtcattcccataatctaggcagaaatgggagtatgttggcatggccaacaaaaactacgaacatatagtaaaaaggcaatgcagattatgtaacatgtaattacagttaggcttaacaaacatgaacttcaagtggtgtatttttccaatgctaaaaagcaaggcctttaaaattccattatcttaggatgtttttaaatgattactttaaatgtgattatttcctaaaccacacaagagtaaaatagagcatttattgatggaataacaaaagtgcttttcttaaatattcttcaaaatacatttgtacaacttacaataatatatccaaaataactgtatatccaa

SEQ ID NO: 240115 - DNA, 933 bp, Homo Sapiens
  misc_feature (165)..(177): n is a, c, g, or t
aaaaagatgaatagtactatcagcactggaattacccaactacagctgatatagtacctcccagacttctagtttctaaaattctgggtgaagtgggacaatttgaactataacagtctacatggtagtaatattatttttggccactggctcaatactaatccnnnnnnnnnnnnnaatatataaaatatgctgaaattgtatctcttaaaacacatttcaattaatgtaattaaaaacagaagggtaacagcttccttttagaagacttaagacttagttatgaaaaatctgccatatttgttaaattaatccaacatttttagggtcaaatatagatcatactacatttttcaatttagagtctgtgataaatacttgtacaaataactataaacacaaccaaattacttttaaaaatggaaattaccatttttatctctttagtaactttaatcacttgattttatccaatttaaggacaaacttcaaaaatccactgtgaaatttgtattccgactaagcacaaaaatacacaaatgttagttctagtcagaaatttaagctgacaagtgaaaatctcactttgaaagtagatctgggacacagaagttaaatttttgatctgaacacatcataaatatattgttgtaatgtaaaaataattttttaaaagaaatgtttaacagtctttttactccaccatctcaaacatgtaaaatttttccctaaaatagtctaagataaacatctcatctgaaacccgattttataaaaaagagagaataaaactaattactcttatatgtacttgagccaagtagttgctgcttccagatgtgagctaaaaatcgtgacctaatgacattatggtaagcaaccttttgcttataaccctagtaacttgtaattcaattcctattgcttatccaa

SEQ ID NO: 240116 - DNA, 1895 bp, Homo Sapiens
tttcaattaatgtaattaaaaacagaagggtaacagcttccttttagaagacttaagacttagttatgaaaaatctgccatatttgttaaattaatgcaacatttttagggtcaaatatagatcatactatatttttcaatttagagtctgtgataaatacttgtacaaataactataaacacaaccaaattacttttaaaaatggaaattaccatttttatctctttagtaactttaatcacttgattttatccaatttaaggacaaacttcaaaaatccactgtgaaatttgtattccgactaagcacaaaaatacacaaacgttagttctagtcagaaatttaagctgacaagtgaaaatctcactttgaaagtagatctgggacacagaagttaaatttttgatctgaacacatcataaatatattgttgtaatgtaaaaataattttttaaaagaaatgttgaacagtctttttactccaccatctcaaacatgtaaaatttttccctaaaagaaaatagtctaagataaacatctcatctgaaacccgattttataaaaaagagagaataaaactaattactcttatatgtacttgagccaagtagttgctgcttccagatgtgagctaaaagtcgtgacctaatgacattatggtaagcaaccttttgcttataaccctagtaacttgtaattcaattcctattgcttatcaaagacccatatgtatttgtaaatttaaaaatttacatcttttaaaaagtacctaacaaactattttcttaaataaaatataattattatataaagaactgtttattctaagaactttaaaagacaaacaaaatggggtgcgggagagttgggcacatgccctccaagaaaatatctagaattatatcacaataataaggctaagaaccatgaaggatttattaggctgaagtttcaagtctcctaatatgttactttaattgtgtttttgatggtctcctacctatttgaacattgcggtgtcctttccaaactgtaaatcagacaatctgaagtgtgttatattttattgtcattttcttagagaaaataattgcttcactggcctaacaaggcacagaaaaactgtacacaaataaaatatagccatttaaatgttccatacttaagatggttattcagtaatttcaaacaatttatgtggtatctaatattttcatactattcttatttcaaatctcaaataaattaatctctattatttataaataatttccttagacaatggatcagtcttatctttattggaatgatgaaggggtactaaattttaacagaaaattaagctaaagattatgttccaaagcattttataagtgttcattctccatttaaaatattttagaaaacaatgctaccaaaatcttagtccagcagtattagtttgtcactactaactatttgccaactttcctctcatttttaatcataccaatctgagtcagcagggatttccaatatatattttaaatgatagaacacagatatgggagacagagatacttgatcttgctccagttgtactacttagtaagtacgtgatcttcagccagtccctcaacttcttcatgcctttccttcctcttctaaaagataaggagcctatcactctcctttgttggactcatggaactgtgggaaatcacgtaagaaaaacataggaaagaactctaaaaaagggccaatgtgctatcaacatacagaggtttgttatagtactggattttattagaatgaccagtctactagggtgtaacttaaagttattccaggaagtatcagaaaaatttctgtaacatatctttagcatgtcctctccaacttttttgtacaaagt

SEQ ID NO: 240117 - DNA, 1209 bp, Homo Sapiens
  misc_feature (872)..(927): n is a, c, g, or t
taaattttaacagaaaattaagctaaagattatgttccaaagcatttataagtgttcattctccatttaaaatattttagaaaacaatgctaccaaaatcttagtccagcagtattagtttgtcactactaactatttgaactttcctctcatttttaatcataccaatctgagtcagcagggatttccaatatatattttaaatgatagaacacagatatgggagacagagatacttgatcttgctccagttgtactacttagtaagtacgtgatcttcagccagtccctcaacttcttcatgcctttccttcctcttctaaaagataaggagcctatcactctcctttgttggactcatggaactgtgggaaatcacgtaagaaaaacataggaaagaactctaaaaagggccaatgtgctatcaacatacagaggtttgttatagtactggattttattagaatgaccagtctactagggtgtaacttaaagttattccaggaagtatcagaaaaatttctgtaacatatctttaccatgtcctctggataaggtctgagagcagtttagaaaagcgtattaatacctatcctattcccatggaaaaaagcacactggacattgacctaagaaaagctaaaagcctcattcactctttctagatgttttatggctatacttctgcttcacctgaatgtgtgtttgtagttttattaatttacagcctgttttgttccaggcttattctgacagttacttaactctctctgaaagtagtcacataccatctttatttctcttctatctttttacttgtttcaaattcttgtttttttctgactcaaactccactaaaagtagatataatnnnnnnnnnnnnnnnnnnnnnnnnnnnnnnnnnnnnnnnnnnnnnnnnnnnnnnnncaaatgcttctactttccatccttttcaggagatactatcatgcactctaatagtatataagaagcacagatcatcagaaaaatctgtttaatttacacgatgtaattttccaaggttaaaagacacaagcaagaaaacaaggattgatttttgtatgagcgtatctaaaagataattttgaagaaatgaatggtgataataaagtaaatgggacatgaggacaggatgggaacataatagaaaggatatgataaaataactttaatttttattttacccaa

SEQ ID NO: 240118 - DNA, 930 bp, Homo Sapiens
aaacatttgctcacatcttgcccagttacctttgcatgtctgtcttaaagcaaaaatataaaatttaaagggtggtagttttaatatattctgtgggtcctaagggatgctttgaatttgaagtatatatacttttaataaaattcagtatgacagttgtcttctgcttaacccataaaactttatttaaaaaatttaactagatggtacaaaacattcattggtatgcacataattctgtatagttttgttattaaatgctaaatgacagtgataacaatggcttaagctttacagtattcttgtagttccctagtaccacttagtatttaaatattgtcatattagcttcagattatcatgtaaatgacggtagaggaataagagaaaaggctttcattggttatcagttttaaattctgaacaaaagagaccatacactgctcactacaagaatgcaattttctaagaaaatgtagtttaaaatgttattctgaatatctgccaaagaattatattgttattactagctagaaccaagatgttgaagaaagcagtttctacattctggatgtagtaaacaagcctgcctgtgtaatccaattatctcttcactaatgagtagataaggtgcctgttatagatgttctggtatataaagaaaaaatgtaggccaagtgtggtggctcacgcatgtaatcccagcactttgggagaccaattatataaaggaaaataacttttcatgtgaatgtaaaatgtttacacacataagtaagacagtttacaagacaaactggtctacacagacaaaggtctatattaaagttcaatctggaccctagaattcttgtcatgggcctcttgtgaagagtctgccctactcaggaatgggcacatgggttaacaattttcacttatttactccaa

SEQ ID NO: 240119 - DNA, 1242 bp, Homo Sapiens
  misc_feature (133)..(183): n is a, c, g, or t
  misc_feature (770)..(1025): n is a, c, g, or t
aaaacttcctataaatgaaaatgttctataatgtatgttgctcagtacagtagccactaaccactgtgatttgaacacttgacaatgtggctaatgtaattcgaaaactggattttaaactaaatttacttannnnnnnnnnnnnnnnnnnnnnnnnnnnnnnnnnnnnnnnnnnnnnnnnnngagactgttggttttaagttggacttaatcactttcctacccaaattctaccactcctttaagaactcctttagaactcttttagtttacataatacgccatattttttttactgtgcctgtagttcttcaaggagtggtacaatttgggcaggaaaaccaggcaggaattccagggtagtgttcaatattgacattagtaatagtctatcaataataaaatagacatctcaatcactatacaaaatctcagaaatgtaaagctcttacagagcatgcttgtgcttgtgtaacagctggtgtaatgcctgcattttcagtaccatgtagccgcactgttaatagttttctatcactttttagtcactcatgtctcattaatgatagtgccattaattgtgatgagtgttttcgattcatgtggtcaataaaaagagactacacaaactggaactttgttgccattagtcaagctagtgagatagtatatctatctatctccccagaagaaagtaagataattgatggggtgtggattcagaagagggattacttttctttgagcctcagacttctagacagtatacnnnnnnnnnnnnnnnnnnnnnnnnnnnnnnnnnnnnnnnnnnnnnnnnnnnnnnnnnnnnnnnnnnnnnnnnnnnnnnnnnnnnnnnnnnnnnnnnnnnnnnnnnnnnnnnnnnnnnnnnnnnnnnnnnnnnnnnnnnnnnnnnnnnnnnnnnnnnnnnnnnnnnnnnnnnnnnnnnnnnnnnnnnnnnnnnnnnnnnnnnnnnnnnnnnnnnnnnnnnnnnnnnnnnnnnnnnnnnnnnnnnnnnnnnnnnnnnnaatttacgtgaaatttatacattctttatctttcctgtttttggtttattgatggtgaggaaaattactcgtttcagctttttcatttttttactccccaaatgattttcacctttttcttaaaatgtacaataaatgcactgaaaactttgatcactgtcactacagttgtacttaagtgtttttcttcggtttttgcttgcacagttttcaccaa

SEQ ID NO: 240120 - DNA, 1506 bp, Homo Sapiens
  misc_feature (101)..(123): n is a, c, g, or t
  misc_feature (1185)..(1194): n is a, c, g, or t
ttggcttttttcgaaagctgggtttcccgggagatcccaggcggtgacagagtggagccatggctagaggcaggaagatgtccaagccccgcgcggtggannnnnnnnnnnnnnnnnnnnnnntggcagcgacggccccgggcccggagatggtggagcggaggggcccggggaggccccgcaccgacggggagaacgtatttaccgggcagtcaaagatctattcctacatgagcccgaacaaatgctctggaatgcgtttcccccttcaggaagagaactcagttacacatcacgaagtcaaatgccaggggaaaccattagccggaatctacaggaaacgagaagagaaaagaaatgctgggaacgcagtacggagcgccatgaagtccgaggaacagaagatcaaagacgccaggaaaggtcccctggtaccttttccaaaccaaaaatctgaagcagcagaacctccaaaaactccaccctcatcttgtgattccaccaatgcagccatcgccaagcaagccctgaaaaagcccatcaagggcaaacaggccccccgaaaaaaagctcaaggaaaaacgcaacagaatcgcaaacttacggatttctaccctgtccgaaggagctccaggaagagcaaagccgagctgcagtctgaagaaaggaaaagaatagatgaattgattgaaagtgggaagaaatgaagattgacctcatcgatggcaaaggcaggggtgtgattgccaccaagcagttctcccggggtgactttgtggtggaataccacggggacctcatcgagatcaccgacgccaagaaacgggaggctctgtacgcacaggacccttccacgggctgctacatgtactattttcagtatctgagcaaaacctactgcgtggatgcaactagagagacaaatcgcctaggaagactgatcaatcacagcaaatgtgggaactgccaaaccaaactgcacgacatcgacggcgtacctcacctcatcctcatcgcctcccgagacatcgcggctggggaggagctcctgtatgactatggggaccgcagcaaggcttccattgaagcccacccgtggctgaagcattaaccggtgggccccgtgccctccccgccccactttcccttcttcaaaggacaaagtgccctcaaagggaattgaannnnnnnnnnacacacttaatcttagcggattacttcagatgtttttaaaaagtatattaagatgccttttcactgtagtatttaaatatctgttacaggtttccaaggtggacttgaacagatggccttatattaccaaaacttttatattctagttgtttttgtactttttttgcatacaagccgaacgtttgtgcttcccgtgcatgcagtcaaagactcagcacaggttttagaggaaatagtcaaacatgaactatgaagccaggtgagtctcctttctccagtggaagagccgggaccttccccctgcacccccga

SEQ ID NO: 240121 - DNA, 929 bp, Homo Sapiens
  misc_feature (739)..(748): n is a, c, g, or t
tttttataatgcccactttgtacaaaaaagttgggtggtagtttctgcgacttgtgttgggactgctgataggaagatgtcttcaggaaatgctaaaattgggcaccctgcccccaacttcaaagccacagctgttatgccagatggtcagtttaaagatatcagcctgtctgactacaaaggaaaatatgttgtgttcttcttttaccctcttgacttcacctttgtgtgccccacggagatcattgctttcagtgatagggcagaagaatttaagaaactcaactgccaagtgattggtgcttctgtggattctcacttctgtcatctagcatgggtcaatacacctaagaaacaaggaggactgggacccatgaacattcctttggtatcagacccgaagcgcaccattgctcaggattatggggtcttaaaggctgatgaaggcatctcgttcaggggcctttttatcattgatgataagggtattcttcggcagatcactgtaaatgacctccctgttggccgctctgtggatgagactttgagactagttcaggccttccagttcactgacaaacatggggaagtgtgcccagctggctggaaacctggcagtgataccatcaagcctgatgtccaaaagagcaaagaatatttctccaagcagaagtgagcgctgggctgttttagtgccaggctgcggtgggcagccatgagaacaaaacctcttctgtannnnnnnnnnccattagtaaaacacaagacttcagattcagccgaattgtggtgtcttacaaggcaggcctttcctacagggggtggagagaccagcctttcttcctttggtaagaatggcctgagttggcgttgtgggcaggctactggttttgtatgatgtattagtagagcaacccattaatcttttg

SEQ ID NO: 240122 - DNA, 764 bp, Homo Sapiens
  misc_feature (714)..(723): n is a, c, g, or t
ttgggtcggtggttagtttctgcgacttgtgttgggactgctgataggaagatgtcttcaggaaatgctaaaattgggcaccctgcccccaacttcaaagccacagctgttatgccagatggtcagtttaaagatatcagcctgtctgactacaaaggaaaatatgttgtgttcttcttttaccctcttgacttcacctttgtgtgccccacggagatcattgctttcagtgatagggcagaagaatttaagaaactcaactgccaagtgattggtgcttctgtggattctcacttctgtcatctagcatgggtcaatacacctaagaaacaaggaggactgggacccatgaacattcctttggtatcagacccgaagcgcaccattgctcaggattatggggtcttaaaggctgatgaaggcatctcgttcaggggcctttttatcattgatgataagggtattcttcggcagatcactgtaaatgacctccctgttggccgctctgtggatgagactttgagactagttcaggccttccagttcactgacaaacatggggaagtgtgcccagctggctggaaacctggcagtgataccatcaagcctgatgtccaaaagagcaaagaatatttctcccagcagaagtgagcgctgggctgttttagtgccaggctgcggtgggcagccatgagaacaaaacctcttctgtannnnnnnnnnccattagtaaaacacaagacttcagattcagccgattgtgg

SEQ ID NO: 240123 - DNA, 2530 bp, Homo Sapiens
  misc_feature (1640)..(1670): n is a, c, g, or t
  misc_feature (1940)..(1968): n is a, c, g, or t
ttgggttcccgcagttccacgtcaagtccggcctgcagatcaagaagaacgccatcatcgatgactacaaggtcaccagccaggtcctggggctgggcatcaacggcaaagttttgcagatcttcaacaagaggacccaggagaaattcgccctcaaaatgcttcaggactgccccaaggcccgcagggaggtggagctgcactggcgggcctcccagtgcccgcacatcgtacggatcgtggatgtgtacgagaatctgtacgcagggaggaagtgcctgctgattgtcatggaatgtttggacggtggagaactctttagccgaatccaggatcgaggagaccaggcattcacagaaagagaagcatccgaaatcatgaagagcatcggtgaggccatccagtatctgcattcaatcaacattgcccatcgggatgtcaagcctgagaatctcttatacacctccaaaaggcccaacgccatcctgaaactcactgactttggctttgccaaggaaaccaccagccacaactctttgaccactccttgttatacaccgtactatgtggctccagaagtgctgggtccagagaagtatgacaagtcctgtgacatgtggtccctgggtgtcatcatgtacatcctgctgtgtgggtatccccccttctactccaaccacggccttgccatctctccgggcatgaagactcgcatccgaatgggccagtatgaatttcccaacccagaatggtcagaagtatcagaggaagtgaagatgctcattcggaatctgctgaaaacagagcccacccagagaatgaccatcaccgagtttatgaaccacccttggatcatgcaatcaacaaaggtccctcaaaccccactgcacaccagccgggtcctgaaggaggacaaggagcggtgggaggatgtcaaggaggagatgaccagtgccttggccacaatgcgcgttgactacgagcagatcaagataaaaaagattgaagatgcatccaaccctctgctgctgaagaggcggaagaaagctcgggccctggaggctgcggctctggcccactgagccaccgcgccctcctgcccacgggaggacaagcaataactctctacaggaatatattttttaaacgaagagacagaactgtccacatctgcctcctctcctcctcagctgcatggagcctggaactgcatcagtgactgaattctgccttggttctggccaccccagagtgggagaggctgggaggttgggaggctgtggagagaagtgagcaaggtgctcttgaacctgtgctcattttgcaattttatcagtaatttgacttagagtttttacgaaacctcttttgttgtccttgccccactcctctccaccagacgccttcctctctggatactgcaaaggcttgtggtttgttagagggtatttgtggaaactgtcatagggattgtccctgtgttgtcccatctgccctccctgtttctccacaacagcctggggttgtccccgctggctcacgcgttctgggagctcaaggccaccttggaggaggatgccacgcacttcctctctcggagccctcagacatctccagtgtgccagacaaataggagtgannnnnnnnnnnnnnnnnnnnnnnnnnnnnnncacacgtgtgtatgagtgcgcagatctgtgcctgggatcgtgcatttgaggggccaggggcaggcagggctgcagagggagacggccctgctggggcttaggaaccttctcccttcttgggtctgccctgcccatactgagcctgccaaagtgcctgggaagcccacccagattctgaaacaggccctctgtggcctgtctctattagctgggttccgggaggcagagaggagtgaccgggcactggcactgcgatcaggaagactggannnnnnnnnnnnnnnnnnnnnnnnnnnnnacttagtgctggtcctaggtcctctgaggcactcatctactgaatgacctctctacttccccttcttgccattattaacccatttttgtttattttccttaaatttttagccatttctccatgggccaccgcccagctcatgtaggtgagcctgggcagcttctgttggcagagcttttgcatttcctgtgtttgtcctgggttctggggcatcagccagctaccccttgtgggcaaaggcagggccacttttgaagtcttccctcagatttccattgtgtggcctggtgggtcagggggagtctttgcaccaaagatgtcctgactttgcccccttgcccatcagccatttgtcttctccccaaacaactcagcttcggggccggtgaggggaggggcctcccccagcacagatgaggagcagctggggtaggctgtctgtgccatggccccccactcccccttcccttggagggagaggtggcaggaatacttcacctttcctctccctcaggggcaggtggtggaggggcgcccagggtcgtctttgtgtatggtggaa

SEQ ID NO: 240124 - DNA, 1219 bp, Homo Sapiens
ttggccttcctctcccaccactgctatgaagggacagtgtccttcctccctgcacaacacacggtgggatctccaagggataggaagccctgccgggcaggatgctttgtttgcaggcaaagcaagcagcagctggaggaggagcagaagaaagcactgtatggtttggaagctgcggaggacgtggaggagtggcaagtcgtctgtgggaagtttctggccatcaatgccacaaacatgtcctgtgcttgtcgccggagccccaggggcctctccccggctgcccacttgggagacgggtcttctgacctcatcctcatccggaaatgctccaggttcaattttctgagatttctcatcaggcacaccaaccagcagggccagtttgacttcacttttgttgaagtttatcgcgtcaagaaattccagtttacgtcgaagcacatggaggatgaggacagcgacctcaaggagggggggaagaagcgctttgggcacatttgcagcagccacccctcctgctgctgcaccgtctccaacagctcctggaactgcgacggggaggtcctgcacagccctgccatcgaggtcagagtccactgccagctggttcgactctttgcacgaggaattgaagagaatccgaagccagactcacacagctgagaagccggcgtcctgctctcgaactgggaaagtgtgaaaactatttaagataattattacagaccaattatgttgatatatacatttaaatgtagaaatttatttttgatagttaaatcttgattttagaagaaaacccttttgtcaacaattttgtgtacatatttggcattttcagttctgtacgcatctgcgggttgcagcccacgccgcttactctcagcggatgcagctgctcacttgggggcactggcctcttaggttttaacgatgtcaacagtgtagtttagaaaatggcccgttagtggctctattgcaataatgttagggacattatatgatttccacgcaggtcacaccatctgggcctgaggtagcagtgggtcactttgatccactttgcaggacttattctgtaacggtttgtggccaagttttgggaagtggttgattctctttgccttcatttcaccttcctcttcgtttacggttaggacatcgctgcttgatccttacaatactgtgcaactgcaatgcaacgtggccctgcttc

SEQ ID NO: 240125 - DNA, 1279 bp, Homo Sapiens
ttgggtcggtgctactcggcgccgggtcggtccgggtaggcgcagcgggactggacctgggtgccgagcggagccgctgccatgggcctgggcgtcagcgctgagcagcccgcaggcggcgccgagggcttccacctccacggggtgcaggagaactccccagcccagcaggcgggcctggagccctactttgacttcatcatcaccattgggcactcgaggctgaacaaggagaatgacaccctgaaggcactactgaaagccaatgtggagaagcccgtgaagctggaggtgttcaatatgaagaccatgagggtgcgcgaggtggaggtggtgcccagcaacatgtggggcggccagggcctactgggtgccagtgtgcgcttctgcagcttccgcagggccagtgagcaggtgtggcatgtgctggatgtggaaccatcttcacctgctgcccttgccggcctgcgcccctacacagactatgtggttggttcggaccagattctccaggagtccgaggacttctttacgctcatcgagtctcatgaggggaagcccttgaagctgatggtgtataactccaagtcagactcctgccgggaggtgactgtaactcccaacgcagcctggggtggagagggcagtctgggatgtggcattggctatgggtatctacaccggatcccaactcagccccccagctaccacaagaagccacctggcaccccaccaccttctgctctaccacttggtgccccaccacctgatgctctaccacctggacccacccccgaggactctccttccctggagacaggttccaggcagagtgactacatggaggccctgctgcaggcacctggctcctccatggaggatccccttcctgggcctgggagtcccagccacagtgctccagaccctgatggacttccccatttcatggagactcctcttcagcccccacctccagtgcagcgagttatggacccaggcttcctggacgtgtcgggaatttctctcttggacaacagcaatgccagtgtgtggcccagcctgccctcttccacagaactgaccaccacagctgtctcaacctcaggggccagaggacatctgctccagcagcagttctcatgagcggggtggtgaggctacatggtctgggtcagagtttgaggtctccttcctggacagcccaggtgcccaagcccaggcggaccacctgcctcagctgactcttcctgacagtctcacctctgcagcctcaccagaa

SEQ ID NO: 240126 - DNA, 530 bp, Homo Sapiens
ctttaaaaagccaactttgtacaaaaaagttggctaattacctataaaaagctgctctggcctcgtcttctagcttgtgcctagttgaaagtctcacctttacaggatcatttgtaatgctggtgtacatgcagggaactcacaagctgtgtcaggtatgcaggacaaggaatgtctgctctggggggcacaggccaactatatggagggagggtcccaaattagcaaacccttcatttaaagcaaacccttgtcaagcctaccagagcagctgatacgtgtgcataacagtgaggcattgtgtcctggatcgtctgggagcccagtgtcaagtctgtttttaatgcaggaagtagaacagaatcgccacaggactgttctggggccagcttcccttaactctgtagcctggcagtctgacccaaagttgccctcacccaaaggttctggctcttccctccctcacttttactttcccttcccccataagttggaggataaaatgggtatcaatgctaatatttccaggg

SEQ ID NO: 240127 - DNA, 1126 bp, Homo Sapiens
  misc_feature (150)..(171): n is a, c, g, or t
  misc_feature (533)..(607): n is a, c, g, or t
ttggcatcgttctaatgttttaactttgctctgaatttataaatagtaaaggccaaagacatagaatatacatttagtagctttataccaagaaatttgccttgaaagctgctgttcgtggagggaaaagtgtagcaaattcctgtctannnnnnnnnnnnnnnnnnnnnnaacaaagacaagatttatgtccctagattttgaaggttaaggcaaatataaatacatatctgcacactattttttagcagttgcatgagtaagagtaatgagatttgtattttaagggctttgtcatgtggatgttttggagttgactgctcagatcttttatagggctttaatatttttgatctattaccttgatgacattatttgtccacacttgagcccatctgtctttctagctatgaccttgttatgaacagtatttgcactcggtgcaaatatccatgtcttacctaattaagcaacatcatagtgccataactcaaggaagttgaatgaggtgaacatagatacagctctttccnnnnnnnnnnnnnnnnnnnnnnnnnnnnnnnnnnnnnnnnnnnnnnnnnnnnnnnnnnnnnnnnnnnnnnnnnnntttggaaacgtgtcaggaaccaaatagtttaagatgagcagttgaggggactgagagagtgatcgacacagaacctggcttcttcgtgcttcatcataagtcgtgctgccggccaggttacttaagcacccttttaacaaggaaaccttgtgggagatccagctggccgactcgagttcagaaacgggaccacagaggttacactctgggatcctggccatgaggttggatgcctcaccttactgaaaggagacactggacctaaatggcgcagcatgattttgttcctgcttggctaaatttctcaacaccacagtcagctaagtcacctactgccaccttcaaaaaacacggagagcacctacccagaggagaaggtagatttggagtaagccgccgtcgacataattcctctgatggtttttttacaaatggtcccctacgaactgcaggagattcttggaaccaccctccctgtttccgccatgaatcctgtagattctggtgtctctatggagc

SEQ ID NO: 240128 - DNA, 1644 bp, Homo Sapiens
  misc_feature (376)..(388): n is a, c, g, or t
  misc_feature (857)..(874): n is a, c, g, or t
ttggcgattgtactgccatcagttgtgactgacgttgtattcaaggagaaagagaaacttgtttagaaagcactttgaaagttttttgagtacgggggtgccctgtatcaccccgttatggttgaactttctccttcaaaattaccagacttggcagcagtggcaaattattgggctaaaagacttaatcagacatattctgggttcaaggctcctaatataatacctggtgcaaacattatacttccactcattcagatggttgcatcctgccaggcatccagtgggactgggaatatggacacttgaacattaaacatcctgaagaattttggaatgacaggttacaagtgaacataatcagttctctatattnnnnnnnnnnnnngatttgggcatagattgggctcacataatctttagagagattttttcatttttgtgaaagtacagaaattcttaactgcttatgaaatgctgattgttaaacagcatccacagctattttgtgttgtttccctgaccccaccctgaagaaaagaaaaattatggcatattgaaaacagcagtatgatgtaagagaaaagatcacaaattccttgagggtgggtcttttccatactcataagcctatttataatattcagagtaatttattgacacatattaatattccctcctatcccattaattgccaaatcatcaaacatttattgagcatctactctgtgtagggtgtaagcagtactggggacttacagtgataaaagacatagttttagccttaagtgatgtactgtttcactgaagagatggaatataagaagccaagtaatttatggaattctcttctttgnnnnnnnnnnnnnnnnnnggcagtggagtcttgctctttaaatagagcaaggctagtctggaactcctgggctcatgtggtcctcccgccttagctttcagtgtagctgggactacaggtgtgaacacagcttggaaatctcttaaccatgggagttaagtctcaaaattctggtgatacaagtggttgaaacttaaaactgtatttaaaaaataggattcgtgaatttgagatagttcataagtctgcaaaaggctgtataaatacatattttacatttactattattaattttgtagtaaatttgagtacagcactctctttatctgtggaaacttcagactctcccctattactttaatttcagtgagacattattaaatataagtgggcttacacatttgttttgctttactgacaaataatacacaacttggaggcttttttttcctttctattcttcctctaaatgttcaacacttttctgattttgtgatttgaggttgtttaatagcttcctgaggctccattgagaccgtatatacgtgacacttaacagtctagccttcctcggtacatatagatatatgatggtggctttgcctgtagtaaattcatgccaaaacataggctttcagtgcctattacatatggctttcagctctctctactgagggatgtaggagtttatttctgaggtctgagcctcttttcctttacttcctttactctttcctaagccttctttataaaaactatgcatgttctattgttttccttttgatccc

SEQ ID NO: 240129 - DNA, 1426 bp, Homo Sapiens
  misc_feature (519)..(596): n is a, c, g, or t
  misc_feature (832)..(867): n is a, c, g, or t
ttgggagggatgtaccttatataaaatttctgaggtctgagcctcttttcctttacttcctttactctttcctaagccttctttataaaaactcctgcatgttctattgttttcctttttgattccctttcttttattatccccagtaggagtgacttgtaattctcatatgttagaaaggcagatctcctggttgaagaaaagatccacccaagcaagtcagcatgtttaataatttttgagggggatctcaaatgtgggaaggattgttatataagacaaccaaatgatgacatgagacaataaatgctataggaattatggaggaataattagctatttattttcttggttagggaagagatattattagttgtagaagtaattactaacttctacattttttattgtggaaatcaaaaatatatatatgaaaataaaatgttataattgacttcagtgtcccataaaccagcttcaacaattaccaaattgtgaccaatctttacacacatgcannnnnnnnnnnnnnnnnnnnnnnnnnnnnnnnnnnnnnnnnnnnnnnnnnnnnnnnnnnnnnnnnnnnnnnnnnnnnntgatataaaatggtggactatttgcatataacctgtgtacatcccgtattatttaaatcatccctagatcacttataatacgtaatacaatgtaaatgccatgtaaataactgttatactgtattaaggaataacaacaagaaaaatgtacatgttcagtacagacgcaattttttttgtgtgtggaatattttcattccaaggtcagttgaacccatggacataggaggctgacnnnnnnnnnnnnnnnnnnnnnnnnnnnnnnnnnnnncatacagacacacatatttctgaaatgtaaatattctctttttaaaaaaattattatcacagctaaacaaattaccagtaattcttttatcctcatatacccggtgttcagattttctagattggctcctaatttttttacagattatttgaatctgattcaattcatgtactgtaatgtttgataacttaagtaccctttataggttctcttttacctcttctttattaaattccttgtaatttgttgtactaaatagattgtcttctagaatttcctgtagtctgaattatgtaatattgtttcacatgttccagtgtcctcttatctcctgtgagttggtagttagatctagaagcttgattaaattcagattttctctctttagatcatcaactttatatcatcaacttggatcatttgtttcattttgcttttgatatgttgtttttttagaatcacctcttaaaatttagatttaattatatactcatgtaaaatgtttataaatctccaaattcagatcagcaaaacactataatatctattcagagaaggc

SEQ ID NO: 240130 - DNA, 2161 bp, Homo Sapiens
  misc_feature (68)..(84): n is a, c, g, or t
  misc_feature (1248)..(1325): n is a, c, g, or t
  misc_feature (1495)..(1495): n is a, c, g, or t
  misc_feature (1564)..(1604): n is a, c, g, or t
ttgggtactgtttcactgaagagatggaatataagaagccaagtaatttatggaattctcttctttgnnnnnnnnnnnnnnnnnggcagtggagtcttgctctttaaatagagcaaggctagtctggaactcctgggctcatgtggtcctcccgccttagctttcagtgtagctgggactacaggtgtgaacacagcttggaaatctcttaaccatgggagttaagtctcaaaattctggtgatacaagtggttgaaacttaaaactgtatttaaaaaataggattcgtgaatttgagatagttcataagtctgcaaaaggctgtataaatacatattttacatttactattattaattttgtagtaaatttgagtacagcactctctttatctgtggaaacttcagactctcccctattactttaatttcagtgagacattattaaatataagtgggcttacacatttgttttgctttactgacaaataatacacaacttggaggcttttttttcctttctattcttcctctaaatgttcaacacttttctgattttgtgatttgaggttgtttaatagcttcctgaggctccattgagaccgtatatacgtgacacttaacagtctagccttcctcggtacatatagatatatgatggtggctttgcctgtagtaaattcatgccaaaacataggctttcagtgcctattacatatggctttcagctctctctactgagggatgtaggagtttatttctgaggtctgagcctcttttcctttacttcctttactctttcctaagccttctttataaaaactatgcatgttctattgttttcctttttgattccctttcttttattatccccagtaggagtgacttgtaattctcatatgttagaaaggcagatctcctggttgaagaaaagatccacccaagcaagtcagcatgtttaataatttttgagggggatctcaaatgtgggaaggattgttatataagacaaccaaatgatgacatgagacaataaatgctataggaattatggaggaataattagctatttattttcttggttagggaagagatattattagttgtagaagtaattactaacttctacattttttattgtggaaatcaaaaatatatatatgaaaataaaatgttataattgacttcagtgtcccataaaccagcttcaacaattaccaaattgtgaccaatctttacacacatgcannnnnnnnnnnnnnnnnnnnnnnnnnnnnnnnnnnnnnnnnnnnnnnnnnnnnnnnnnnnnnnnnnnnnnnnnnnnnntgatataaaatggtggctatttgcatataacctgtgtacatcccgtattatttaaatcatccctagatcacttataatacgtaatacaatgtaaatgccatgtaaataactgttatactgtattaaggaataacaacaagaaaaatgtacatgttcagtacagacgcaanttttttttgtgtgtggaatattttcattccaaggtcagttgaacccatggacataggaggctgactgcnnnnnnnnnnnnnnnnnnnnnnnnnnnnnnnnnnnnnnnnncatacagacacacatatttctgaaatgtaaatattctctttttaaaaaaattattatcacagctaaacaaattaccagtaattcttttatcctcatatacccggtgttcatattttctagattggctcctaatttttttacagattatttgaatctgattcaattcatgtactgtaatgtttgataacttaagtaccctttataggttctcttttacctcttctttattaaattccttgtaatttgttgtactaaatagattgtcttctaaaatttcctgtagtctgaattatgtaatattgtttcacatgttcgagtgtcctcttatttcctgtgagttggtagttagatctagaagcttgattaaattcatattctctctctttagatcatcaactttagatcatcaacttggatcatgtgtctcattgtgcttttgatatggtgttttatagaattacctcttaaaattttgatttaattttataatcgtgtaaagtgtttataaatttccaaattcagatcagcaaaacacaataaaatctattcagagaagg

SEQ ID NO: 240131 - DNA, 1553 bp, Homo Sapiens
  misc_feature (277)..(395): n is a, c, g, or t
  misc_feature (1025)..(1040): n is a, c, g, or t
agtacacaaacttaaaaagtctgattagtctgtcactgtatctacgaaattatttttataaatgttttgaaacatatacagtgatttaaaaagatgaacttatattctgttcctttctttcatatattctaaatcacttatctcatcagattatataaatataaatgggaacttacaacttttttgcattttaccattacttataaacaactgactaatgactacacaaaatgcataattaaaaaacagtgataggctgggcgctatggctcacacnnnnnnnnnnnnnnnnnnnnnnnnnnnnnnnnnnnnnnnnnnnnnnnnnnnnnnnnnnnnnnnnnnnnnnnnnnnnnnnnnnnnnnnnnnnnnnnnnnnnnnnnnnnnnnnnnnnnnnntaagaaattttaatttgaagttactgatttatttaaagtcaaaatatagaaaagaaaaatatgatgttttttatactcaaatgattactgacttctctgcctttaaaaaaagagtatgaaaggtttactgtactcgacatccgtcttcagaaaaacaatgtgtcttaatactggactaggcagagaacattcacttacctactctgttggtggcaaatgtatttctgggaactcttaagtaatccaaggacaaaggagtgttaaaaggtgcacttcgtcagggtatgaagacaggtggttgaaatgaaggcaggtgtgtcttaagctctaatggtgattccaaaactatcaggcttgaaaatgatgtaatcaagtccttaaaagctatagacacgaatttcttctgtgataatgatgcatcataatctataacaatgataaatttaagttagatattcagaataatcaaagactgtcattgatctaggtagagcagatcatgtaaaacaagtcctgatcttcaagagatttgacataaatggcaaaaatattcccattacataaaaaaagaacacaaatgcaattccacataaacatttttcatttaacttgcaacaacccaagtgattnnnnnnnnnnnnnnnngtcctttcccaaagggcaggggctaatgacctatgtttatgagaggtataaaagcacaagactacaaaacaaatgtcaatactgtttaattctaatattctttattattaatttccaactaatatgcaaacatgagatctgttttgagccagcaagcaaccttaggcattattcccaagcatatatactatgttactgttcctcaaaatgaactctgcacttcccaggctctgttaactttgttcaagttcttctctctacctggaaggcccttaacccaacctctgccagaggaaatcttacagccatagagcctctgccaaatgctcccagttgggaagcagtttctcctcatcctccacatttagaaccctatctgaggggtatttatgatcttccagctggtctgtttcatgctgtatttatattcatgctgtatttatatatacttgtttatcttccttgactcatgggcaaaccttctgtcttgttcatcttttgtatccatcccaa

SEQ ID NO: 240132 - DNA, 1366 bp, Homo Sapiens
aaagcttaaactcttacttagttttggagtaccttgttggtgagctcctgtgggctgtttctcccatgaagaaaaatgacacagaatataccatccagcacagccaggcacaagtaagtgttatctgtaagcacaagagttccatgtttaagatgtaattattacttttggtttgtgtatatgatctgaattggactccagtctccacatcccagactggaacaatctgctctcgttttccaaatttaattgcttctgagttttttcctcgagtagtcaatttaagaggtattaaattggcaacactccttcttaaaaataggtaagctgaaaacaatctggcaagtgtcatatacttacttgaagtcttttctgaagcaacgattttccactcatgcttagggctttgtactgtagcatttggagaagagagacatccagttgaactgctacttatctgcttatggccattctcacgtggtggctttttctgcaaaatcaaaaggtagctacagaaacctagccaaagaccacatctgatgtacctttgttcctgagctattccacaacactgagtatccttcacctatatatgacatttataggacactaactttaactcaagccaacactttccaaatgacacaaattactggcatacttccatctccactcaatgatgagacaactacgcctacacaattagcctaggtaagaaaaagctcagttttaacaatttgaaaaacatgttgcaaatcaagacctcagcagaagaaaaaaccaatctataattatttttatattaagtatagaatcttttaaaagaatgctataaatttaaaatagtgtgaattaacagagaatacatttaacccactattttcatgaaattgtcaaacctaactaaatcatatgtacaggtatccttcatacaatgccagcaaaacgtaagcagatatagattcatccagtttctctgaaagtacttgacaggaaaaaagtggcaattacaagaaacacttaaagaatatttctttaggattaccttataggtattatagagtggttttctagacaaaattacatcaaaacacaagaaaatagtaatcagaaatgaaacattactaaaaacaaccaaatattcacaaaagtagaatatacaggaatactaaagagggagaaatgaacaaagctgccaatttccaaatgattgtaagagaactactttacacatgtgttctcatgtatgagttttccttgatggcttccttccaattactttagcctttgccccttccaaaggatatgatcatatggaattggaagagtaaagactactctgagaggaactgccaaatgaacccaa

SEQ ID NO: 240133 - DNA, 782 bp, Homo Sapiens
  misc_feature (132)..(175): n is a, c, g, or t
  misc_feature (399)..(426): n is a, c, g, or t
tcaccatggctactccactagtatgcagattacacaaacgcctcaaggtaacctccagtgtgcttcttgagcttcttgacatattactctggcaggatccggaggtaaagaaaaatacatgtcatggtggtnnnnnnnnnnnnnnnnnnnnnnnnnnnnnnnnnnnnnnnnnnnntcttccaatactggctgaagagtcgttggcttgattggcttgaaagaaatcttcatttttttcatagcttctatcatataacagtaagaaaaaaagcactagtacaatatatactcttaaagaatatacatatttacaataaaatactgaatatagtttacacctttgcagataagtggtctggtttgcataaacatatttccttcctgtaagcaatgtcaagnnnnnnnnnnnnnnnnnnnnnnnnnnnnttcaagcaagctgtagagtcatctccattgagacagatgcaaatacatggcaaatgcatctgactttcaagtgggaatcatagaatttaaagataatctgttagcccttttagaccataatgatgacagtgtttctgcaggcctaacagatttggtaagccctcataaaggaactccgaaaggtttaagtggagagagaaactcaaggttactccactgctccacctgcgtgttttcaattcccaccatttctccatcaattttatcttgtgtattttttttaaaagtagcccaagttaagtgagtgactatatgtatgaacaacaccattgaaaaacacacagctttaaagccaa

SEQ ID NO: 240134 - DNA, 1676 bp, Homo Sapiens
  misc_feature (788)..(823): n is a, c, g, or t
caaagcagattgcagaaggtcattgattttcttgtgtgtgcgagatatagttcagattgagaatgacagtaaagtaatcctcccaagtgacaaattaggcagtattttctttctaactttgagctcagttaaaggaaatgagatggaatcatacatattatactaaaaaccccagattctttcagagacctgattcaatgtcccctcaccccaaaatcatttaccacaagataataatccatctgggaatttactgaattttagacaaaattacctatttggctaaagagtcaaacattctacatgaagactataaggatttccacttagtttgaattctgcagtgaaaacggtatggctcagcttagctgccctcagccgcctaatggaaacatgttctttgtacaattataaaaagctgacatatgaatgcactttaaggggatagcatctgtttgcaggtcgtgactgaagtcaaagcagcagtggtgtcgctaggagcctctctgctcaagaccccggtttcagccagctctgtgctgactgctggaaagcacctgggcctacgcttataaagcctcagctctctcacccgggcaactgtgatcagggaagatgaggccaaagatgtaacaatgtctacctagggcctgggcacagaagagacatcaacaaatgttactaagataacttgagtactgatggtggaataacatgagggcctttgggaaatcttcagcagtatttaaaaattccaactggttagaattacaccagcataaaatggnnnnnnnnnnnnnnnnnnnnnnnnnnnnnnnnnnnncactttttaaaaaagaccaacttgtagtacatatagtttaatcatgaacctgatgccagtgctcagtctaaatataagttcccatttctgaacccttgggtgcttttgcctaagtaatctggaacagattaattcttggttgttccaaaagtctgggtatgagatagaaaagcacaagaataattcatttactgcaaagatgtacatgtctcattcttttgcatatataaacactgcttttggcatctgtcagtcatgagaggtgacaaagcaggccgaagtgccctcccacttgggcttcctgctttccagtccaaagttacatgcagagagccgggtgtgatagagagagctggacagacacacaaagacacgacgtgcttaccctccatggctattgtcgaacggaaggtgaggaaaagttaaaggaatttatcagagaaagggaaaaaagaaaaacaatattaataaaggcataagacaaatcccccataaaaacacatgagcagaacaaaaaggagctagtttccaagcctgcccaccagctctcactcactgttgccagggtgtggctactgtgccacctgctcactgccccagcatactgcatagagaggtctgccatgcaccatgctcagttacaaaacaaatgcagggaacatgcaaagcccgaggaacaatccagcagcagtgcaaggtcaacagaatgagagctcttcaaaaagaaaggaggaggaggacatatggttttaattactgaaaagtgcccatctgaattctcatagattcaggagaaactgcagcagcctcaattcctgagcccggcccctcaatatccttgagatccacccaa

SEQ ID NO: 240135 - DNA, 944 bp, Homo Sapiens
ttggaaacatgaaattataacctgtgctctttggatacctaatgcgacatttaagttgtatttgacagtagatagtattttggatctattgaaatttgggttctacagatttcatttcacaatgaaagtttaggaattaatctttctaggttcctagtcatcactttttgattacaggtggttgtgtcaaaccgattggtgacatctccatgctgtattgtcacaagcacatatggctggacagcaaacatggagagaatcatgaaagctcaagccctaagagacaactcaacaatgggttacatggcagcaaagaaacacctggagataaaccctgaccattccattattgagaccttaaggcaaaaggcagaggctgataagaacgacaagtctgtgaaggatctggtcatcttgctttatgaaactgcgctcctgtcttctggcttcagtctggaagatccccagacacatgctaacaggatctacaggatgatcaaacttggtctgggtaagccttatactatgtaatgttaaaaagaaaataaacacacgtgacattgaagaaaatggtaaactttcagttatccaaacttggagcaccttgtcctgcttgctgcttggaggtattaaagtatgttttttttagggataagtaaggtcttacaagagcaaagaaatgaaattgagactcatatgtcctgtaatactgtcttgaaagcagatagaaaccaggagtattaccctaatagctggctttaagaaatctttgtaatatgaggattttattttggaaacaggtattgatgaagatgaccctactgctgatgataccagtgctgctgtaactgaagaaatgccaccccttgaaggagatgacgacacatcacgcatggaagaagtagactaatctctggctgagggatgacttacctgttcagtac

SEQ ID NO: 240136 - DNA, 989 bp, Homo Sapiens
  misc_feature (157)..(172): n is a, c, g, or t
  misc_feature (893)..(893): n is a, c, g, or t
ttgggcttaaaataattttatttacaagcaagttatgtaagagaatgttttatactatagccacaattctgtcaaagataagtaaaagttaattgatattaaaaattattagagataatttacttagtaaaagcttctaactcttcttgttgttcannnnnnnnnnnnnnnncttctttgtttggattgcagcattctgctcttctgatgatgcgctgtgaccctgcagtagcgcaaaggctgcgcagcgttaatgcgcattgcgtgcgaatgaacccctgtgaacggttgactagatgagtaatctgattgactggctccctcagtcctattctgtagcctttttggataaaattgggttttaacatacctcgagtccaactaatctcattaaacaaatattctccatgggcctgtctagtagattaatggatctggttggccgtttgctgcgtctaggggtgttctatgtagcgcagcagttcgcagcgattgcgcagtgcgatgctgttaggttgcgcaagcgatgtttgcgctcgcattacagggacctcaacctaggtgcaatcctgtcatgtgaggtttcagcttcagtcctccttgggagacggggcattgtgagaatgtaacttaaagcctggctttatgatatcctacttggcagaaagacatttttctcctcagtagcatagttttgatgttagtgaggaacattgttgaagagcagcatttcccaaaatgtgtttcatagtattctaataaaatgcccaatgaaagaagagttccatggtcaactaagttcagggaaccctgttacactattaaaggcttagggaagtccagtaaagaaacctattttccgaatttatttgatcatgaactccttttttttncagccatacctcttaacacctcatagaacacactttgggaaacagtgggggtaggaaaactcggcctcaagttgcgccctctagtagcacttgaaa

SEQ ID NO: 240137 - DNA, 1202 bp, Homo Sapiens
  misc_feature (915)..(930): n is a, c, g, or t
ttggacaaatatttgataagctcctattaattgtcaccccaccaagcggacagctaacatgaattgcacttcactgcagctttagagatcggtttaggctgagacattgcgcctgccttaggttgctgacttctttatttcagagctctggagacacctagtttgaaaaatgttattctgtttttttgtgagaacttagtaaacaagaaaatactcttgagtgaaatgcaatgtatttcttttgtaatcagtgcatttgaaaattcaagccagcatattcctagtagatggaagcaaaattaagttgtctttgtagaaaatgaagagcctttcttccagcaaaaatccctgctgtatgcaatagccctgattaaccctctcccttctgcatgtttcccatattacagacttgagactgtcctcattcccatatgtaatagacatccaaagaatttcaattgctttgttgaacttttactaatgatcttgtttttattttctctcttgtttttggtttttcaccattgatattgtatttagaaggtttcaggtgggtgaaacctcctattccatgcgtaaggtgcctcgctgaagggagctcgaggcctggatctagggcagacacacaacctcctcctcctcttccagcaaggaacgcaccgaaaagtcacatgatgagaaatatggtaacgggtttgtaactgccacagcaaaacaatttgcctccatgcctgaatcttctgtcttttggcttcagaaacagcttaaaataattttatttacaagcaagttatgtaagagaatgttttatactatagccacaattctgtcaaagataagtaaaagttaattgatattaaaaattattagagataatttacttagtaaaagcttctaactcttcttgttgttcannnnnnnnnnnnnnnncttctttgtttggattgcagcattctgctcttctgatgatgcgctgtgaccctgcagtagcgcaaaggctgcgcagcgttaatgcgcattgcgtgcgaatgaacccctgtgaacggttgactagatgagtaatctgattgactggctccctcagtcctattctgtagcctttttggataaaattgggttttaacatacctcgagtccaactaatctcattaaacaaatattctccatgggcctgtctagtagattaatggatctggttgggc

SEQ ID NO: 240138 - DNA, 1649 bp, Homo Sapiens
  misc_feature (376)..(392): n is a, c, g, or t
  misc_feature (1137)..(1217): n is a, c, g, or t
  misc_feature (1468)..(1480): n is a, c, g, or t
  misc_feature (1519)..(1553): n is a, c, g, or t
ttggagctctggcccggcgtgtagcgggcgcactacggggacgctgggccgggcaccgggctgtgtggagaagtgagcgcgctcgtctgacccccgtgcccgccaccccgagccactaacggcgatctcccaaggcctgcccgaggcctctgtcctctgtcctcagccccgcagcggcaacgtcttgcactcggcgagctcgccgctcccgaccctcccgcgcccccgccctgccgcgctgctccccgcccagccgcgggtctgtggtccaagccgccccgaagcagcccgaacaagatcactcaaggtgaaggataatctactaataccagcactttgaatgaaaatttgtttctctgccacaaactgaacatcnnnnnnnnnnnnnnnnnggtgggggagttgaaacctaattttgtggcgtagcagctatgcagcttgaaatccaagtagcactaaattttattatttcgtatttgtacaataagcttcccaggagacgtgtcaacatttttggtgaagaacttgaaagacttcttaagaagaaatatgaagggcactggtatcctgaaaagccatacaaaggatcggggtttagatgtatacacataggggagaaagtggacccagtgattgaacaagcatccaaagagagtggtttggacattgatgatgttcgtggcaatctgccacaggatcttagtgtttggatcgacccatttgaggtttcttaccaaattggtgaaaagggaccagtgaaggtgctttacgtggatgataataatgaaaatggatgtgagttggataaggagatcaaaaacagctttaacccagaggcccaggtttttatgcccataagtgacccagcctcatcagtgtccagctctccatcgcctccttttggtcactctgctgctgtaagccctaccttcatgccccggtccactcagcctttaacctttaccactgccacttttgctgccaccaagttcggctctaccaaaatgaagaatagtggccgtagcaacaaggttgcacgtacttctcccatcaacctcggcttgaatgtgaatgacctcttgaagcagaaagccatctcttcctcaatgcactctctgtatgggcttggcttgggtnnnnnnnnnnnnnnnnnnnnnnnnnnnnnnnnnnnnnnnnnnnnnnnnnnnnnnnnnnnnnnnnnnnnnnnnnnnnnnnnnaaaacctctgctctttctcctaatgccaaggaatttatttttcctaatatgcagggtcaaggtagtagtaccaatggaatgttcccaggtgacagcccccttaacctcagtcctctccagtacagtaatgcctttgatgtgtttgcagcctatggaggcctcaatgagaagtcttttgtagatggcttgaattttagcttaaataacatgcagtattctaaccagcaattccagcctgttatggctaactnnnnnnnnnnnnntgtatcgtacaagttaaaatgcacgggcccaagggggannnnnnnnnnnnnnnnnnnnnnnnnnnnnnnnnnnaagcttatagtaaggatacattcaagcttggttaaaaaaataataataaaaacatgcatcatttttcatttgccaaccaagcacaaagttatttta

SEQ ID NO: 240139 - DNA, 1283 bp, Homo Sapiens
  misc_feature (199)..(277): n is a, c, g, or t
  misc_feature (530)..(542): n is a, c, g, or t
  misc_feature (581)..(615): n is a, c, g, or t
  misc_feature (788)..(796): n is a, c, g, or t
ctttgtacaaaaaagttggcctttaccactgccacttttgctgccaccaagttcggctctaccaaaatgaagaatagtggccgtagcaacaaggttgcacgtacttctcccatcaacctcggcttgaatgtgaatgacctcttgaagcagaaagccatctcttcctcaatgcactctctgtatgggcttggcttgggtnnnnnnnnnnnnnnnnnnnnnnnnnnnnnnnnnnnnnnnnnnnnnnnnnnnnnnnnnnnnnnnnnnnnnnnnnnnnnnnagaaaacctctgctctttctcctaatgccaaggaatttatttttcctaatatgcagggtcaaggtagtagtaccaatggaatgttcccaggtgacagcccccttaacctcagtcctctccagtacagtaatgcctttgatgtgtttgcagcctatggaggcctcaatgagaaatcttttgtagatggcttgaattttagcttaaataacatgcagtattctaaccagcaattccagcctgttatggctaactnnnnnnnnnnnnntgtatcgtacaagttaaaatgcacgggcccaagggggannnnnnnnnnnnnnnnnnnnnnnnnnnnnnnnnnnaagcttatagtaaggatacattcaagcttggttaaaaaaataataataaaacatgcatcatttttcatttgccaaccaagcacaaagttattttatactgactgtatattttaaagtatactctcagatatggcctcttacagtatttaagatatagcaaggacatggctgannnnnnnnnataaaaattggcactaataagtgggtttattggtcttttctaattgtataatttaatttagtacaaagtttgtaaaatatcagaggatatatatatattgtttttacgacatggtattgcatttatatttttttactacagtgatctgtgacagcagcagcttcatgttgtattttttttactgaaattgtaaaatatccattttaaagacatcaactattttaaaaattgtgtacaggatattcctttagtggtggaattaaaatgtacgaatacttgctttttcaaaaaaatgtattttttgttaaaagtttaaagatttttgctttattttatggaagaaaaaagtaattgtaaatattaattttgtacctatattgtgcaatacttgaaaaaaacggtataaaagtattttgagtcagtgttttacatgttaagggggactgaaatagtttatattaagtttgtattaaaattctttaaaatt

SEQ ID NO: 240140 - DNA, 1254 bp, Homo Sapiens
  misc_feature (157)..(196): n is a, c, g, or t
  misc_feature (1054)..(1062): n is a, c, g, or t
tgttgcatagccacagtataactccacatgttcattaaaaaggcaattgacccgctaaaacttcaaagaaaaagtactcataaaaaaagtcttaccccaaaattgcaaacaaatacattaaaaagattagaagaggtgatagaaagcaccagacatnnnnnnnnnnnnnnnnnnnnnnnnnnnnnnnnnnnnnnnngtccccattcagcaaatactttgtaaagtatggcctgtatgtaaatagtgctaaatcaaggactttttagcagaaaattgctcggttcttttatctaaggcttgaatttgtaaagtgaaggcataaaagttaccaaacattaagtaactcttaaaatggcacacaggttttaaagctattggtttttccttcctaactctctgaatttttcccatggcctttgtagatcaactatttcaaacgtattttacaccagcaactctcaacatacttgtctttcagatatgtcatcagtcatgtctaacaggcaaatagcaaaataacagatttaaaacaatccttaactagctagcaggacatttactttggattctgcataactgcaaactgacatatttgtaaagctaaaaatcagttttaatacatgattaacagaaactctcatcatgctcattactttaactattgccctttcaatcgctatagaaatatcacttaatccaataagcttgatttcaatagtccaggaagaaaaggtcaaaaaggcacaatgtgaccttagctgacaagaataaccatcctgtctcaagtcttttgtcagtccctggcatgaattacaacattattttcaaaataataaaacattttaaaaattatacatattgtacattttcaaaacctgcacatgagtaaaaccatggcaatattgccctaaagctacctaactgtgactatggaaattgctactttgcattcagtgttgtgggatttgcacgggcagtactcattttccctcatacttcggattgaccacagttgttacggcactcttataaataggattttcaccctacaacnnnnnnnnngtgagaaaaattatcagttaccctactaaaattatgtagaataatttttataaatcaagactaaaagttgcaatcatcttaagaagtcatttctattttatttgtccagatatcacagttgttttaaaggcattaataatggtttatataaaaatagaaaatggaagctttgctttacaagtctaatgccaa

SEQ ID NO: 240141 - DNA, 655 bp, Homo Sapiens
  misc_feature (263)..(302): n is a, c, g, or t
ttggtgctggtgtaaaatacgtttgaaatagttgatctacaaaggccatgggaaaaattcagagagttaggaaggaaaaaccaatagctttaaaacctgtgtgccattttaagagttacttaatgtttggtaacttttatgccttcactttacaaattcaagccttagataaaagaaccgagcaattttctgctaaaaagtccttgatttagcactatttacatacaggccatactttacaaagtatttgctgaatggggacnnnnnnnnnnnnnnnnnnnnnnnnnnnnnnnnnnnnnnnnatgtctggtgctttctatcacctcttctaatcttttaatgtatttgtttgcaattttggggtaagactttttttatgagtactttttctttgaagttttagcggtcaatttgcctttttaatgaacatgtgaagttatactgtggctatgcaacagctctcacctacgcgagtcttactttgagttagtgccataacagaccactgtatgtttacttctcaccatttgagttgcccatcttgtttcacactagtcacattcttgttttaagtgcctttagttttaacagttcactttttacagtgctatttactgaagttatttattaaatatgcctaaaatacttaaatcgg

SEQ ID NO: 240142 - DNA, 922 bp, Homo Sapiens
ttggggctagtgtgtacgcggcgagcttctcccggcgccgcccgctcggctcccatagcgcccgcgacagcggtccggacgccgcccgaacatggactccgccggccaagatatcaacctgaattctcctaacaaaggtctgctgtctgactccatgacggatgttcctgtcgacacaggtgtggctgcccggactcctgctgttgagggtctgacagaggctgaggaggaggagctcagggctgagcttaccaaggtggaagaggaaattgtcactctgcgccaggtcctggcagccaaggagaggcactgtggagagctcaagaggaggctgggcctctccaccctgggggagctgaaacagaacctgtccaggagctggcatgacgtgcaggtctctagcgcctatgtgaaaacttctgagaaacttggagagtggaatgagaaagtgacccagtcagacctctacaagaagactcaggaaactctttcacaggcaggacagaagacttcagctgccctgtccacagtgggctctgccatcagcaggaagcttggagacatgaggaactctgcgaccttcaagtcgtttgaggaccgagttgggaccataaagtctaaggttgtgggtgacagagagaacggcagtgacaacctcccttcctcagcggggagtggtgacaagcccctgtcggatcccgcacctttctaagcctgtggttgcttcacccgctgcagagcacacgcaacccagcctcagcatcacagccgcagctctgttcagcggagcagccagccagggcggatgagcagagccggccctgaggacagtcctgcccatccacgcggagatgtggctgcccgcgtttgcatgaatttgaagaacacaggcttgtacacagatgttttacactcacgtttg

SEQ ID NO: 240143 - DNA, 1147 bp, Homo Sapiens
ttgggcggtccggacgccgcccgaacatggactccgccggccaagatatcaacctgaattctcctaacaaaggtctgctgtctgactccatgacggatgttcctgtcgacacaggtgtggctgcccggactcctgctgttgagggtctgacagaggctgaggaggaggagctcagggctgagcttaccaaggtggaagaggaaattgtcactctgcgccaggtcctggcagccaaggagaggcactgtggagagctcaagaggaggctgggcctctccaccctgggggagctgaaacagaacctgtccaggagctggcatgacgtgcaggtctctagcgcctacaagaagactcaggaaactctttcacaggcaggacagaagacttcagctgccctgtccacagtgggctctgccatcagcaggaagcttggagacatgaggaactctgcgaccttcaagtcgtttgaggaccgagttgggaccataaagtctaaggttgtgggtgacagagagaacggcagtgacaacctcccttcctcagcggggagtggtgacaagcccctgtcggatcccgcacctttctaagcctgtggttgcttcacccgctgcagagcacacgcaacccagcctcagcatcacagccgcagctctgttcagcggagcagccagccagggcggatgagcagagccggccctgaggacagtcctgcccatccacgcggagatgtggctgccgcgtttgcatgaatttgaagaacacaggcttgtacacagatgttttacactcacgtttgtagatgaaacagatcactgtgctgtccttcctaggggtgcaggaagtggacagggcggagggtttgaaagaatattgagccaaagcccaggctccctttgggaatcatgttagcccatcagaatgttgaaggagtgaagagttctaagcataaaataagtggcattttctgacttcttcctcctcctccttccctgactcacagaaggaatgcaatcacccagcaagtcctacctgttacgcaattttttatctcaaaatgccgaacgagaaaactgtccatttttctgagacccccagaaaggaaactgaccctcaggcagctgcctgattgttacgcgaatctagcttt

SEQ ID NO: 240144 - DNA, 2883 bp, Homo Sapiens
  misc_feature (348)..(356): n is a, c, g, or t
taaaaattaaaaaccatcaatgtacacaaatgtgtagctcatatgaaaacctcatgacaagtcattgagttctgtaaactgccatacaacttacatgtgtaatattaattgcacaaagtatatcaagacatattgaagaaacacaaaattaagtgctattttaacggttcatctttcagtatgtgaatacgtatacaaatttaactgcacagttttgttgaaaataagtttcaacaataagacttcagttgttaaaattaacccaaaatataactttaattaaattacatcactacaatattaatctcttatcttgtttacatttttggtgttttgggacttttgttnnnnnnnnntccaagttctagaattgcaaaaacttcattgttgccactgagagagcaacatatagtacagcttcttgtctattcacaccaggacaccaaggtacctcatagtgcagtgtgtacacacaacctgattttaatattctatctgctgcagaaatacttatcagctttcaaatcaaagtgaaaagaaaatgagttaatttaaatggcaaattcaaggacatttatacaaacattatattcttaattttggcaataatttttaatattttgccttaaagtcctgggaacaaagggctcttgctatccattcatttcattaggtgaactgaagatatgagtgggagaagttattctggatcacagacacacattagcatggaaataatgatgtacggaagagtctttttcatttactaattttactaatttattctttgacatacaccaatgtatgatattgaaaaacagaaagcaggtcataaagatggtcctgtccgataaaggaaatcttttaaaacactttcaaaagctaaaataactaaaactattaagcctattgatagctaagaaaataattgtcttcaataatattaggtggaaccatatgaaactgctgacagtttttaaactacaaatgcagcaatttcatatgtttcagcctaatccatggggttgtactgatctttctgaccattctcggctgaaaattgacatggtcaaagtccttgcccttcagtatatgcatcgtattagccctttcatggaagtatatctacataaatatatatgtatatatagtgggccaatgtaagcaaacacaaggtatcacaccaaatctattcttgagaaaaccattcctatttcaaacttaatgtttaaaagaatcatatattgattttgatttactccaggactgtgggggatggggagtggccatttctttatatttcttctaagttgtgatctctgtgttgactataaccatactaaatatgctatattcttatttggcctaaaatttattagattttccttgattgatcacgaataagtaaaattggcaaagcttctttcagagtcaaatcctgctttcacaaactgaaaggaaataatttactacatctgagatagagcctttttcaaatctgagaaatctgaaccaaatagaatgctttattttccaaagaaaaaaatcaagatgaaatacaaacaagtgaactaaaagccatatgaaataccctctctttagacagacccaatttcttcatatattcagttaaacccaaaagctaatccattaagttgtactattttcttcagataaatgtaattcagtgatagcagagctctgcaaaatttgaaagctcacctctctgtgtagtggggaatggaagaaattaactagtatataatccagaaatgacacaggccatttaaagtaaaattaaaggacacatttacaaaatagaaaacactaatataattaaccaacaaaaatatactgcagttccgatgaaatgaggtcaacatgacatgatccttttggaatgactttctaatttgaattacaatgtgagtgaagtattttagaagacattctatcaaataatgatagacctgcataaggaggctgtcacagaagatctgtctctggtggacagacaaaccagattaacatgaaattgtaaaggaaaaagcttttttatacttattattatggctttttgcaacatggcaaaacattacagcttaaagcagacatcatctcctcttagaggaggaaaaagttttgcagtcaaatcaaattataattaagaggtcatcgctatacaattctattcagtttaacaaaaacgatattacaccttcatgaaatccagagataataggttacttaaaaacataaacaaaaaactggtggatacactggctgaattaataaaggatatgataaggaatttaggtccacctatacctatgataataaacataaaagactgcaaaacaatttaagaacttaatcacagacctactaatcaaagttcatcatgtgcctgattaccagaaaaggaattattaaggtatacagtgaagggaatggagcagaataaaatataaaatgtctttttattcctctctgatttcaacttcctttttatctttagggaggatagggagaagatgtgcctcgctattgaagatccaatgctccagtggaagaagatcgtcgtcagaaaatattaggtacaaatatttcaatgtctctgccaggaagaaactctgctgcacatcatcataactctcatgaagaaggtaaacatcccttaggcctgaatagcctccattcactctgcaatggttttccaaggcctctacggcttcccaggcccatttcctgtactttggatcatgagtcagtctccacatatacatgtaagtctccataacttctggccgtaagatgtagtatttttcattttgtcttgtagcgatggcttcaacaccaccatcaaatctgaaagcttcccaa

SEQ ID NO: 240145 - DNA, 965 bp, Homo Sapiens
  misc_feature (191)..(199): n is a, c, g, or t
ttttaaccggttcatctttcagtatgtgaatacgtatacaaatttaactgcacagttttgttgaaaataagtttcaacaataagacttcagttgttaaaattaacccaaaatataactttaattaaattacatcactacaatattaatctcttatcttgtttacatttttggtgttttgggacttttgttnnnnnnnnntccaagttctagaattgcaaaaacttcattgttgccactgagagagcaacatatagtacagcttcttgtctattcacaccaggacaccaaggtacctcatagtgcagtgtgtacacacaacctgattttaatattctatctgctgcagaaatacttatcagctttcaaatcaaagtgaaaagaaaatgagttaatttaaatggcaaattcaaggacatttatacaaacattatattcttaattttggcaataatttttaatattttgccttaaagtcctgggaacaaagggctcttgctatccattcatttcattaggtgaactgaagatatgagtgggagaagttattctggatcacagacacacattagcatggaaataatgatgtacggaagagtctttttcatttactaattttactaatttattctttgacatacaccaatgtatgatattgaaaaacagaaagcaggtcataaagatggtcctgtccgataaaggaaatcttttaaaacactttcaaaagctaaaataactaaaactattaagcctattgatagctaagaaaataattgtcttcaataatattaggtggaaccatatgaaactgctgacagtttttaaactacaaatgcagcaatttcatatgtttcagcctaatccatggggttgtactgatctttctgaccattctcggctgaaaattcacatggtcaaagtccttgcccttcagtatatgcatctccaacttttttgtacaaagttg

SEQ ID NO: 240146 - DNA, 1475 bp, Homo Sapiens
ccaaattacaccctgccgctccacctttctacccggaagccccggattaaaacgttttaaataatgaacggcctggctggcttgcagtttgaatcctggtttatttaagtagcattcaggagttatactgtaaataaacatcattatggctaatgactaattaaaatcaccattcattacaaataccaaccaggttagataatactattaactatcttttccccttcggtctggggttcatattcttccttttctggaagtcattttcatggataaaatatttagcattttttgttacctcttccttcaccaactgtactcaacacacttctgtaaacagagtgagaacctgggttcatggacaagctcttttccacttatcttcgggttaaaccaaaactttttcagcaactttgcccctgtccaagttttgcagaacaccagctgcctcttcctgttctaggcattctagggctagatacctgtgaacggacttcaagcattaaagaagtcatcagcatttcctatacctcacacacactcatttgcccaccctgaacttcactgacattaatttaggagcctgccttttgcctttcacatgtttctatttcccccactgtactgtaaaataagatctgccctgacattaagaaaaaaggcaactgttaaatttacttttccctttaaataacgggattttttccttttctataagattagcaaaatatttcacaatacctatattttttcccttaaataaaaatgtatgcaaaattactataatagacattgctcaataggtgctggtaggtttatcagcacactcttcctcctttcattgaaatgcggagattcccttgaagttggatactcttgaatgcaccatggagtctttagaaagcaacggtgccaattattaagtattgcaggaaaattactttctccttgagagaggaagagtaacaacatttctatcatgctctgggtgttatttcaatgccaaataactatgaagcttgaggtggattacagaaattatgagaataagaattatgagaataattcttaaaaacaacttccgaggttaatgtctttcaaaacctgaaaattaacagatatccccataaaaaatccacattagccaaagaaaaatactcagtttcaataaaagcagaaagaaaaatggttctatatgaagttgaagttacacttgtcaatgcactaaaatagttttatccaaatcaactgaaaaactgtcttcatactattcatccaatgtctaaagtgaaaatttaagttctggtctttagtttgctccccaaaatactgtagcaggtattgtcttggtaactcaacgatgggctctatacagattcatcagattaaaaataagcaagggcttctatcccataccccaatgacagaataaagatcatctctgagccaacttttttgtacaaagttggctataa

SEQ ID NO: 240147 - DNA, 1924 bp, Homo Sapiens
acaaaaaagttggctcttttatacatcctcttcagggaagagagaagcaatgggcatgttagtatacaatgatcacagccacgcaggcctgcaagctgccttttggacaggctgttgactgccgttccaattagctgattggagaatgtggaatgcagagtgataatgctgcatatctgctatcaggcagcagcaaaggtttttgtcttgggaaggcaagctttccctgcaatattatctcagcagctccctagctgcttaccctgaaaacgagggatccaaacggagggtgttgcactctgctaacgctggtcctgtgcgtggctgtggcatatgagcggcaggtctgaaaaagcaggtgtgtgctgggacgggcactggactggaacgcaggcggacgctctcgggtttacctgcttcctgttaacagattgtgggctcccagggcatatgtctgcacgctgaggccgaggcggagaaggggcttcctgagcgtcccagtacactgacagagacacttggattggacttaatcttaaacctctggagttcaagaccttttaaaaagggctaaataaacaatctctacatgtaaaaggccactgactcctacttcctctgtatagagcaactgttgaactcagctgcctgtaggaaaactgaagactttaataacaaactctccaaggtgaaaatgaacacagatagcggtgggtgtgctcgcaaacgtgccgccatgtctgttacgctaacatctgtgaagagagtgcaaagttctccaaacctattggctgcagggcgtgattctcagtcaccagactcagcttggagatcttacaatgatggcaatcaggagacactgaacggagatgctacatattcctctcttgcagcaaaaggttttagaagcgttcgaccaaacctacaagataaaagatcaccaactcagagccagataacagtgaatggaaactcaggaggtgccgtgagtcccatgagttactatcagaggccgttttccccctcggcatattctctcccagcctcactcaactccagcattgtcatgcagcacggcacatccctcgattccacagacacatatccccagcatgcgcagtctctggatggcaccaccagcagctctatccccctgtaccgatcctcagaggaagagaagagagtgacagtcatcaaagccccgcattacccagggatcgggcccgtggatgaatccggaatccccacagcaattagaacgacagtcgaccggcccaaggactggtacaagacgatgtttaagcaaattcacatggtgcacaagccggatgatgacacagacatgtataatactccttatacatacaatgcaggtctgtacaacccaccctacagtgctcagtcacaccctgctgcaaagacccaaacctacagacctctttccaaaagccactccgacaacagccccaatgcctttaaggatgcgtcctccccagtgcctcccccacatgttccacctccagtcccgccgcttcgaccaagagatcggtcttcaacagaaaagcatgactgggatcctccagacagaaaagtggacacaagaaaatttcggtctgagccaaggagtatttttgaatatgaacctggcaagtcatcaattcttcagcatgaaagaccagcccctctcccaacaactccgacacctgttccaagggaacctggccggaagcctctttctagctcccgactcggagaagtcactggtagcccctcccctccgccccggagtggcgcccccacaccaagctcgcgcgccccggctctgtctcccacccggcctcctaaaaagcctctggactatgttcaagatcattcttctggtgttttcaatgaacctccttgtatcagtcctctatagacagaa

SEQ ID NO: 240148 - DNA, 1041 bp, Homo Sapiens
aactttgtacaaaaaagttggactctttctggctaaaaggaatctaatcttgttgagggtagagaccctgagacagtgtgagggggtggggactgccaagccaccctaagaccttgggaggaaaactcagagagggtcttcgttgctcagtcagtcaagttcctcggagatctgcctctgcctcacctaccccagggaacttccaaggaaggagcctgagccactggggactaagtgggcagaagaaacccttggcagccctgtgcctctcgaatgttagccttggatggggctttcacagttagaagagctgaaaccaggggtgcagctgtcaggtagggtggggccggtgggagaggcccgggtcagagccctgggggtgagcctgaaggccacagagaaagaaccttgcccaaactcaggcagctggggctgaggcccaaaggcagaacagccagagggggcaggaggggaccaaaaaggaaaatgaggacgtgcagcagcattggaaggctggggccgggcaggccaggccaagccaagcagggggccacagggtgggctgtggagctctcaggaagggccctgaggaaggcacacttgctcctgttggtccctgtccttgctgcccaggcagcgtggaggggaagggtagggcagccagagaaaggagcagagaaggcacacaaacgaggaatgaggggcttcacgagaggccacagggcctggctggccacgctgtcccggcctgctcaccatctcagtgaggggcaggagctggggctcgcttaggctgggtccacgcttccctggtgccagcacccctcaagcctgtctcaccagtggcctgccctctcgctcccccacccagcccacccattgaagtctccttgggccaccaaaggtggtggccatggtaccggggacttgggagagtgagacccaatggagggagcaaaaggagagggatgtcgggggggtggggcacggggtaggggaaatggggtgaacggtgctggcagtttcggctagatttctgtc

SEQ ID NO: 240149 - DNA, 2544 bp, Homo Sapiens
  misc_feature (455)..(479): n is a, c, g, or t
  misc_feature (943)..(984): n is a, c, g, or t
aaactgttataaaaattttcactgaaaagataactcttaaaaattctgatctgacacctgtatataacatttcttgatttgcacgattgtaagaaaaacactaagtatacatttactacgtgattctttttcacatttttggtgcagtatttatttcaaagcttcacccctatccaaattaccatgtcagtttcttttccttcttcagaattaatttcctgcagtttaataaaaagcaaatcagcttctaatggaacaagtaacagtagaaacagtggtattcatggatgtgtttaatgaaggatccaattattaagggccagtgaaaccataaaattttattgtttcaacatatataaataggctgtttttacatttgaaattgtataagcccatgcacaacttttaattttagtgcagggtttgataaataagacatagtaataaatcagggnnnnnnnnnnnnnnnnnnnnnnnnnacccatttctaacaatttttactgtaaaatttttggtcaaagttctaagcttaatcacatctcaaagaatagaggcaatatatagcccatcttactagacatacagtattaaactggactgaatatgaggacaagctctagtggtcattaaaccccctcagaaagtctaagattcagaatgtctccatcatattagaagaaaaatgtactgtattaaaatttaaattgcatttttacaagttgttttttaattagtgttctatttacattgcagaacttccaccaactgcagtagtttaactttggcacaacattaagttccatttcttttgggtattggatcctgctttttgagtgtgtatgccccaaaacgttttcaatgtcatcaaagattgggcaaattcacagtaaatcagacatcttgagttgaagaattgattctccttcaacgttttaggcagctnnnnnnnnnnnnnnnnnnnnnnnnnnnnnnnnnnnnnnnnnnccatattttaatttttactacttttagaaataaaagtgaaaatacatcttttgtattctcttgagattacctgccacatatgtcttccataatacactaggctttgtgtgcaactcatctatgtatatgttcttcatatgctagatttgcttataaacatttatcatctttatgtaataatttatttcaaactgtatgagcagggagtatatatttcattgtcagtatctgtaataagcagactatgaaatctaaagacttgtacttttttctatttctatacaaggtgcaaaagatatatatgtacctcacttcctgtaataactattttgggaaggttttggtaacttttttggtaaattgaacaatatttaaatgaagaaataactatttagagaaggctatggtgaatcctcttataagtgaaaaattattttactcagccaaggataacttgatgtttcagaaatttagacttttgtgtatttaaaaaggcatgcttctatgctatcacaaaagtatataatatggtttggctctgtgtccccatccaaatcttaccttgaattgtaattattaagggacagtgataccacaaaatcttattgtttcaacatatgtaaataggctgtttttacatttgaaattgtataagcccatacataacttttaatcagggagtgtcgggggagggagcctggtgggaggtgactgaatcatgggggtggacttcccctctggctgttctcatgatagtgagtgagttctcaggagatctggttgtttgaaagttgtgtggaacatcccctttcgctctctctcctgttcggtcatggtgagatgtgcttgcttccccttcttccccttcgccttctgccatgactgtaagtttcttggggcctcccagtcatgcttcttgttaagccggcaaaactgtgagtcaactaaacctcttttcttcataaattacccagtctcaggtcgttctttatagcagtgtgaaaatggactaatacagtgcatgtatagcatacatcatacagtcttttgaaaactgtagttttaggatgaattttctgaccagaattagtatccattacagtgttaatatataacataagaattatctatacaaaattaaaggtcaaactaaactgtacagaaaaattcacattatttttggaagactgcaactccccaaaaaaatcattgcagaggttacaacaacaacattcactgcagcaacaaatttgttgatttaatcttggctgagtgcacattcttgtgtttagcaataaaaaaaatgcctgttaaaaatattttatgtatctgggtcagaagaaagcctgctctgaagatttctgacattaggaaatggagggctgcacttcaggataaagctgtatgaaactgtttaacttcttataacctaaaatgattacattataccctataacctggaatgatatttatactgcttattaaaacaggtacatttttagtttcatctgttatcccttaaaaaatattaacaaggagaaaacgtgaaaaaggatccaa

SEQ ID NO: 240150 - DNA, 1379 bp, Homo Sapiens
  misc_feature (1286)..(1301): n is a, c, g, or t
ttggctgcgcagctctgcaaaagtttctgctcgggatctggctctcttccccttggactttagaacgatttagggttgacagaggaaagcagaggcgcgcaggaggagcagaaaacaccaccttctgcagttggaggcaggcagccccggctgcactctagccgcctgggtgtgtggctgctgttgcgggacgtcttcgcggggcgggaggctcgcgccgcagccagcgccatgcaaaactacaagtacgacaaagcgatcgtcccggagagcaagaacggcggcagcccggcgctcaacaacaacccgaggaggagcggcagcaagcgggtgctgctcatctgcctcgacctcttctgcctcttcatggcgggcctccccttcctcatcatcgagacaagcaccatcaagccttaccaccgagggttttactgcaatgatgagagcatcaagtacccactgaaaactggtgagacaataaatgacgctgtgctctgtgccgtggggatcgtcattgccatcctcgcgatcatcacgggggaattctaccggatctattacctgaagaagtcgcggtcgacgattcagaacccctacgtggcagcactctataagcaagtgggctgcttcctctttggctgtgccatcagccagtctttcacagacattgccaaagtgtccatagggcgcctgcgtcctcacttcttgagtgtctgcaaccctgatttcagccagatcaactgctctgaaggctacattcagaactacagatgcagaggtgatgacagcaaagtccaggaagccaggaagtccttcttctctggccatgcctccttctccatgtacactatgctgtatttggtgctatacctgcaggcccgcttcacttggcgaggagcccgcctgctccggcccctcctgcagttcaccttgatcatgatggccttctacacgggactgtctcgcgtatcagaccacaagcaccatcccagtgatgttctggcaggatttgctcaaggagccctggtggcctgctgcatagttttcttcgtgtctgacctcttcaagactaagacgacgctctccctgcctgcccctgctatccggaaggaaatcctttcacctgtggacattattgacaggaacaatcaccacaacatgatgtaggtgccacccacctcctgagctgtttttgtaaaatgactgctgacagcaagttcttgctgctctccaatctcatcagacagtagaatgtaggggaaaaacttttgcccgactgatttttnnnnnnnnnnnnnnnntgttttactatgtggccttccaaaatatgtagtgtttgcctatgtggaaacaacagcaaactaacaccaagtgccaga

SEQ ID NO: 240151 - DNA, 1921 bp, Homo Sapiens
  misc_feature (1657)..(1673): n is a, c, g, or t
ttagttgtgttacgagcttttatttaaaaagcacatttaatacaagtatagtttcgcagatacaagttttcactttgtatgctacaaaagtctttgaatattattctctttacaaaatggaaccttacaaaaatactgacaatttaatgtttttatacagttttctctagttgcagttatttcattataaaacaatgtttaccacagaactatgatattttagttgatatttaaaaaaattaactcaatgcttttttaagcagctaatgtaaataacacaggtcgagacacagtttataatcatagtggatatagctaaattgtttcagaaataatatcttacatagttaacttttaatgttttatacattatttatataatatttatatataaaaatcatagcttgctataagttgaaatgaaaggacggattctgtagtaaggatgtgcatgtggttgatccatatggttacatttaaccctttgaaaggtctgcatccaagatctaaacgcatttcttccttcctcctttcctcaaaggttcagtagaaggggtccctgtctatcacctagagtgggaccttgcatggaaggacacttacggatagaggatgaggaaaactctctaccgagatttaacccatatgttctgcccagcagaacctaccaagaactgccctagggctcaaccccaagacaatagtgctttacacagcaagagcaactcctacaaagaccctcagctctgtcatcctgaagggtaacctctcatgcatgagactgcctgcttctctggctccttctgatttgcaacagctaaaaggttggttcgattttcattctgcccccttcaccctcccatctgttgtacagaaggctgctttccgtcagctggtggcagaccatgccttgctcattcccgggccctcacaggaaatcctggtgggcacgcagcaaggatttcaagggagaaggcagtaaccgaagtcgaactgtttctaagagtatgcaagtgcccggtgattgacgtgcacaacatcagcatcctgcaattgacatttcaacatcacaggatgatgcgtcaaaagaagaaaagtgagggcctgtgccctcgatttcttctgaaattgtgctgtttgtgaaattcactcgtccacaaagagtctgctaatcactaatgtgaggaactatggttgttggcctatgggcaggggaggtgataaggccttagaactgggaatctagattcgggatctgatcacttgactgagcaaacttgctctttccttttatttaaaacacaaaacaaaacttcctgaactaaagtcacagtacagaatagaatgggatggacagaaagactcaagagggcagctccgcaatggctattttcttgattcagtgctatttctggcatcatgtgctgcaatgtgaatttttgcttttctcacaggcctgggattcctcaggtcacaaaaggtgaccagcagcctctactcaaatcgttttagtgtttgttcccgaacaagctgtgttcactagaacatgaacacttaaaccaattgcacatccaggactctggcacttggtgttagtttgctgttgtttccacataggcaaacactacctattttggaaggccacatagtaaaacannnnnnnnnnnnnnnnnaaaaatcagtcgggcaaaagtttttccctacattctactgtctgatgagattggagagcagcaagaacttgctgtcagcagtcattttacaaaaacagctcaggaggtgggtggcacctacatcatgttgtggtgattgttcctgtcaataatgtccacaggtgaaaggatttccttccggatagcaggggcaggcagggagagcgtcgtcttagtcttgaagaggtcagacacgaagaaaactccaa

SEQ ID NO: 240152 - DNA, 1176 bp, Homo Sapiens
  misc_feature (99)..(140): n is a, c, g, or t
ttgggtcttctctttttaaaggacctcgtgaaataaaagtgcagaaaacaaacccaggcgatcacagcagcagccgccgcggcagcagcaccaacagcnnnnnnnnnnnnnnnnnnnnnnnnnnnnnnnnnnnnnnnnnncaaagttagagttggggctggcgctccggagttgctgggctcagcgcagctcccattcattaaggaaccagctgcggaggaaggtggccgagcgcccgcgctgcccactcgctcgctcgcgcactcagacgcgcgccacaacagcgcgccccaagctgcgcagctctgcaaaagtttctgctcgggatctggctctcttccccttggactttagaacgatttagggttgacagaggaaagcagaggcgcgcaggaggagcagaaaacaccaccttctgcagttggaggcaggcagccccggctgcactctagccgccgcgcccggagccggggccgacccgccactatccgcagcagcctcggccaggaggcgacccgggcgcctgggtgtgtggctgctgttgcgggacgtcttcgcggggcgggaggctcgcgccgcagccagcgccatgcaaaactacaagtacgacaaagcgatcgtcccggagagcaagaacggcggcagcccggcgctcaacaacaacccgaggaggagcggcagcaagcgggtgctgctcatctgcctcgacctcttctgcctcttcatggcgggcctccccttcctcatcatcgagacaagcaccatcaagccttaccaccgagggttttactgcaatgatgagagcatcaagtacccactgaaaactggtgagacaataaatgacgctgtgctctgtgccgtggggatcgtcattgccatcctcgcgatcatcacgggggaattctaccggatctattacctgaagaagtcgcggtcgacgattcagaacccctacgtggcagcactctataagcaagtgggctgcttcctctttggctgtgccatcagccagtctttcacagacattgccaaagtgtccatagggcgcctgcgtcctcacttcttgagtgtctgcaaccctgatttcagccagatcaactgctctgaaggctacattcagaactacagatgcagaggtgatgacagcaaagtccaggaaggcaaggaagtccttct

SEQ ID NO: 240153 - DNA, 1053 bp, Homo Sapiens
  misc_feature (63)..(84): n is a, c, g, or t
  misc_feature (684)..(730): n is a, c, g, or t
tattgtggatttaatctgcattgtccctaagaactcagaattactgttgatgcttcaaaaggnnnnnnnnnnnnnnnnnnnnnntcagttaatccagaaattcctcccaggaaaatagaagaccccaggaggagtggggcaacaactctttatctgctacgggcagacagatcttcatgaaaacacacatgaacctccagaactcgatgtgctccaccagccggccttagcttgtcaaagccaaccttggaatttcctgctgaagcccccatggaatagctcagctagcaggaactgtagaatagaggatccttacttcagtgcatcttgatgttctgagtgaaggaacagcacagaccctctgggagaccatccctgtgtgttagtgaggtcttgcattgtaaagatcttgaagaaaggagactgtgtctgtgagtcctcaacaaagcagacacctgattggagttaggagtccaaagggtttatccgaagtggcacctctcagtcccaagaggggatgaagcctgtcacccatggtgggaactgtagaaagtgatgtcagttcttgggaactgaggctgtggtccaggtcataataaaaacaagtaaaggaatgccaaaaatggccatgccattaagcctgttttacacatagtaggcacacgtaggggttatatagagaannnnnnnnnnnnnnnnnnnnnnnnnnnnnnnnnnnnnnnnnnnnnnngtcgacctcttcccctgcacaggccttagcagtctttgtctctttctgctcacaggatcggcttcgccatcgcccggcgtttggcccaggacggggcccatgtggtcgtcagcagccggaagcagcagaatgtggaccaggcggtggccacgctgcagggggaggggctgagcgtgacgggcaccgtgtgccatgtggggaaggcggaggaccgggagcggctggtggccacggtgagctgcagggaaatgggcacagagccaggaggtggaaaacggagccagcctgagcctccttccctgctttcctccaacttttttgta

SEQ ID NO: 240154 - DNA, 1697 bp, Homo Sapiens
gaggcgcagatgttcgggacaagagggaagagatgcgccagagaccagggctggggcagctgggggtccctgagtgccaggcgccaccacacgtcctgagggtcaaggcccctcctctggggagcaggtctagggcacggaggatgcagggctgggaggggaccccacctcggggacccaaaaggagtccatttctgccctgccccccgcaaagcagcaggagagagggcctgggggtcctggggtgggggatcccagaaaaaaagacaatcctggcttgacccttgtcccaggaacaagaagctgaggagggacgacagccaggcccagagtgactcacaaggacatccaaagaagggactggattttcagagggaggtgacttggtgactgagaggcagcagaggccaaagcctgaccccagaccctcagggagggcccacccaacctgtacccctcaggagccccgtccggctccccaggcaaccactgaggacctcggggtggcctgtagaagacagaacccagccccattacaccccttgctgccgctccatccccaaccaccagagggacagggaccagagggagacctgtgggccaggcgggcaggagggaggcaggctggggccgggagaaggggatacacaggcccataaaacctcaggctccccataaccctcactcagccatctcactcactcactcccagcatcccccaggatgggggtcccctccttcactcaggacacttcccctccgcagacctgcacgttctgggcctttctcatttcaccccaggcctgcccaccccatgaggcaccccctaaatctcatctctccacccagcacccccagcctggctccagcctgaagaccccctccttccccttccctccagaacagtggggaaagcgaggctcggtccacccctaactgcggaaggagcagggccaggagggcagcagtgctccctctcccggtcctggcccagccagctcctgggtgagtgggcgggaacccactgggctcacaccagctttcacctccctctctccaggaaggatggcagcacccatgaggggatggaggccacagaaggacaggaagggaggggctttccagccccccagcagtgtccagcccttggcacaagcaggaaaaccccaaaaccagcccctgcatctgagatcatcccacagaagagaaaacagggagcaagaaagtgttgactgaacccaataaagtgactcaggtgggcccgctccctggcggtgccacacagccctgccccgcctccacccacaaggcacagaccagggtgccctccccagagctgagcctgcctgggtccggaagggaacggcctgtgccatgtgcagcagtcagggacccactggcctagaactcagtctgcacccctgcactgtcctcggtggtggtgtggagggcggggtggctgctggggctggacacctgctctccagtctcctggtcgctgggcttggggggcccaaggtccacagcctttccaggcaggagatgctggaggggtgaggcaggcggcgaggaggcctcgggggcggccttaggctggggactctccccagcgggggccccgttgagcagggggccggctggtggggggctctcaggccgcagaccttgggccagcaggcctcggatctcagtgccaa

SEQ ID NO: 240155 - DNA, 446 bp, Homo Sapiens
ccaatagtggatgtttattttgtaattaaaaattattactggaaggaagatatgtactttggtggggtgcctgcatgggtgaacaagaacatgagagtgtccaagaaataaatggccaagtcaagaagctctcatagagatttatttagtgtgagaaatatgagaacaatagttgtaaagaacaaatcaataacccgcagtgtgcattttggaaaaccaaataacttcttcaaatttctgagtacacagagggtacctgccttgaaatttaaatgtctaaggaaaatgggagatgattaagagttggtgtggcctagtcacaccaaaatgtatttattacatcctgctcctttctagttgacaggaaagaaagctgctgtggggaaaggagggataaatactgaagggatttactaaacaaatgtccccaacttttttgtacaaag

SEQ ID NO: 240156 - DNA, 2152 bp, Homo Sapiens
tgctttcatgttgaaggcataggactcaagtgaattcctggatgacaccttgtccctctgcttctcatcttcagctttgtacttctcagcttcctagaccatacgttcaatgtcttccttgctcaaacggctaggaaagaaattaactctaagtaaaagccttaaattacctgtgtatgtgtaactctagtttctcttagctagacgcccttaggcaccagtaactcaattgaaataccattatccctgtcaagaccagatgacagtgcctccttacccttgtcattagtgatagtaatcttgttctcttttcccgtactcttgtccacagcagagacattgaggataccattggcatcaatgtcaaaagtgacttcaatctgaggaacacctcggggtgcaggaggtatgcctgtgagttcaaacttgccaagcaggttgttatcctttgtcatggcacgctcgccttcataaaccttggtaggaaataaaacaaattactacaatggactccaggtctgtgacagtgctagggtcctgctaaggaagaatggtcgctcagacatccaaggaaggaactggccaacataagactttctggtggaaactacgaatggttttggaatccatcatcatagcgagtcagtcaagacttccctttatctgttatcagtaagccaaacaagagaagtacagaaacatacctgaataagcacaccaggctggttgtcagaataggtagtgaaggtctgtgtctgcttggtaggaatggtggtattacgcttgatgaggacagtcatgactccaccagcagtttcaataccaagggaaagaggagtgacatccaagagcagcaaatcttgaacattctcagacttgtctccagacaagatggctgcctggacagctagcaccataagcaacagcttcatcagagttgatgctcttattcagttcttttccattgaagaagtcttggagaagcttctgaatcttggggatacgagtagaaccaccaaccaggacaatatcatgaatctgtgacttgtctagtttggcatctcgaagggctttctctactgggtccagggtgccacggaacaggtcagcattcagttcttcaaatcgggcacgggtaatggaggtatagaagtcgattccttcatagagagaatcgatctcaatactggcctgggtgctggaagagagggtacgcttagcacgttcacaagcagtacggaggcgtcttacagctctcttgttctcactgatgtccttcttatgcttgcgcttaaactcagcaataaaatggttgaccattcggttgtcaaaatcttctccacccaagtgggtgtctccagctgtagacttgacctcaaagattccatcctcaatagtgaggattgacacatcaaaagtgccacctcccaggtcaaagatgagcacgtttctttctgctccaacctgccgttaaaaacaatctcatttaaatttacgatggatcaaattaatcttaaaataatccgaacttgcatcacaaatggtacatacctttttgtctaagccgtaagcaatagcagcagcagttggctcattaataattctaagtacattgagaccagcaatagttccagcatctttggtagcctgacgctgagagtcattaaagtaagctggcactgtgaccacagcattggtaacagtcttcccaaggtaggcttctgcaatttccttcatctttgtcagaaccatagaagacacctcctctggatagaagcttttggtctctcccttgtattctacttggaccttgggcctgccagcatcattcaccaccataaagggccaatgtttcatatcagactggacaacagcatcatcaaatctgcgtccaatcagacgtttggcatcaaaaactgtgttggtggggttcattgcaacttgattctttgcggcatcaccgatcaaccgttcagtgtccgtaaaggcgacatagcttggagtggttcggtttccctgatcattggcaattatctcgacttttccgtgctggaaaacacccacacaagagtaggtggtgccaagatcaataccaactgcaggtcccttggacatggttgctggggtgtaggcctggctccaataacgccaa

SEQ ID NO: 240157 - DNA, 1191 bp, Homo Sapiens
gccaactttgtacaaaaaagttggggcttccttcgttattggagccaggcctacaccccagcaaccatgtccaagggacctgcagttggtattgatcttggcaccacctactcttgtgtgggtgttttccagcacggaaaagtcgagataattgccaatgatcagggaaaccgaaccactccaagctatgtcgcctttacggacactgaacggttgatcggtgatgccgcaaagaatcaagttgcaatgaaccccaccaacacagtttttgatgccaaacgtctgattggacgcagatttgatgatgctgttgtccagtctgatatgaaacattggccctttatggtggtgaatgatgctggcaggcccaaggtccaagtagaatacaagggagagaccaaaagcttctatccagaggaggtgtcttctatggttctgacaaagatgaaggaaattgcagaagcctaccttgggaagactgttaccaatgctgtggtcacagtgccagcttactttaatgactctcagcgtcaggctaccaaagatgctggaactattgctggtctcaatgtacttagaattattaatgagccaactgctgctgctattgcttacggcttagacaaaaaggttggagcagaaagaaacgtgctcatctttgacctgggaggtggcacttttgatgtgtcaatcctcactattgaggatggaatctttgaggtcaagtctacagctggagacacccacttgggtggagaagattttgacaaccgaatggtcaaccattttattgctgagtttaagcgcaagcataagaaggacatcagtgagaacaagagagctgtaagacgcctccgtactgcttgtgaacgtgctaagcgtaccctctcttccagcacccaggccagtattgagatcgattctctctatgaaggaatcgacttctatacctccattacccgtgcccgatttgaagaactgaatgctgacctgttccgtggcaccctggacccagtagagaaagcccttcgagatgccaaactagacaagtcacagattcatgatattgtcctggttggtggttctactcgtatccccaagattcagaagcttctccagacttcttccatggaaaagaactgaataagagcatcaaccctgatgaagctgttgcttatggtgcagctgtcc

SEQ ID NO: 240158 - DNA, 867 bp, Homo Sapiens
tttaatgccaactttgtacaaaaaagttgggaggctcgggtcgttgtggtgcgctgtcttcccgcttgcgtcagggacctgcccgactcagtggaagcggggagaggtggtgagagatgacccctgttgaggatttcattggtgtctgccacaggccgccatggcatcagatgaaggcaaactttttgttggagggctgagttttgacaccaatgagcagtcgctggagcaggtcttctcaaagtacggacagatctctgaagtggtggttgtgaaagacagggagacccagagatctcggggatttgggtttgtcacctttgagaacattgacgacgctaaggatgccatgatggccatgaatgggaagtctgtagatggacggcagatccgagtagaccaggcaggcaagtcgtcagacaaccgatcccgtgggtaccgtggtggctctgccgggggccggggcttcttccgtgggggccgaggacggggccgtgggttctctagaggaggaggggaccgaggctatggggggaaccggttcgagtccaggagtgggggctacggaggctccagagactactatagcagccggagtcagagtggtggctacagtgaccggagctcgggcgggtcctacagagacagttacgacagttacgctacacacaacgagtaaaaacccttcctgctcaagatcgtccttccaatggctgtgtgtttaaagattgtgggagcttcgctgacgttaatgtgtagtaaatgcacctccttgtattcccactttcgtagtcatttcggttctgatcttgtcaaacccagcctgaccgcttctgacgccgggatggcctcgttactagacttttc

SEQ ID NO: 240159 - DNA, 1278 bp, Homo Sapiens
  misc_feature (690)..(1028): n is a, c, g, or t
ttttacaatggctgctcttatttggtatgtgttttctgatcctctataagcctgcctcattcaatttctgatttgtaaactctggggcaggtgatattttagtaccctaagaaatcatctcaaaagggagctttaaaagctttaaatgtgattgggtcatcacattttttttgtattccatgggtctatcaggtagataacagaaagttttttcccttttgacagataacagattaaggtgtagtaattatcaaaataatgggcagagagcagctacttaaacatccttggaaataactcctgtgaccatgatttcacaagtatttctaaataattctgagcttcctaaaacaacacgagaaaaagaattttcccttagatcagttaagggaaaactcttccattctgtagcttttgtattggcgttcctaaaacaaactatttcttcagccagagacacaattctatgttgggacactagagtccatctctgctgttgagatctctctccttcagattttagcaatatagttttgggtgtgtttcatgaccttttgtgctagcaaataagcctttggaggattaaaattaacttttctcatcctagtttaaggagtgctctgctctgggaacatcaaaaaaaggcacaggcctgaactgagccaaatacccactctagcagtgctggtnnnnnnnnnnnnnnnnnnnnnnnnnnnnnnnnnnnnnnnnnnnnnnnnnnnnnnnnnnnnnnnnnnnnnnnnnnnnnnnnnnnnnnnnnnnnnnnnnnnnnnnnnnnnnnnnnnnnnnnnnnnnnnnnnnnnnnnnnnnnnnnnnnnnnnnnnnnnnnnnnnnnnnnnnnnnnnnnnnnnnnnnnnnnnnnnnnnnnnnnnnnnnnnnnnnnnnnnnnnnnnnnnnnnnnnnnnnnnnnnnnnnnnnnnnnnnnnnnnnnnnnnnnnnnnnnnnnnnnnnnnnnnnnnnnnnnnnnnnnnnnnnnnnnnnnnnnnnnnnnnnnnnnnnnnnnnnnnnnnaaaaacaaatttttgcaggaatagtagaatacacaggaaaagaatatatattcatctaaacaacgtcttatctttaagagcaaagaagaaggaagttttataagtatttgacagtatactacttctttaagatactccaagtggtttgaagtgtaaaaggtgaatatactgcttcaaacctcttgacctacaggtctaaaatagtcgctcttttttgtggctatgtgtcctagccaacttttttgtacaa

SEQ ID NO: 240160 - DNA, 1564 bp, Homo Sapiens
ttggcagccgggtgtcctgacgctcggggttcaggacaagggcacacaactggttccgttaagcccctctctcgctcagacgccatggagctggatctgtctccacctcatcttagcagctctccggaagacctttgcccagcccctgggacccctcctgggactccccggccccctgatacccctctgcctgaggaggtaaagaggtcccagcctctcctcatcccaaccaccggcaggaaacttcgagaggaggagaggcgtgccacctccctcccctctatccccaaccccttccctgagctctgcagtcctccctcacagagcccaattctcgggggcccctccagtgcaagggggctgctcccccgcgatgccagccgcccccatgtagtaaaggtgtacagtgaggatggggcctgcaggtctgtggaggtggcagcaggtgccacagctcgccacgtgtgtgaaatgctggtgcagcgagctcacgccttgagcgacgagacctgggggctggtggagtgccacccccacctagcactggagcggggtttggaggaccacgagtccgtggtggaagtgcaggctgcctggcccgtgggcggagatagccgcttcgtcttccggaaaaacttcgccaagtacgaactgttcaagagctccccacactccctgttcccagaaaaaatggtctccagctgtctcgatgcacacactggtatatcccatgaagacctcatccagaacttcctgaatgctggcagctttcctgagatccagggctttctgcagctgcggggttcaggacggaagctttggaaacgctttttctgcttcttgcgccgatctggcctctattactccaccaagggcacctctaaggatccgaggcacctgcagtacgtggcagatgtgaacgagtccaacgtgtacgtggtgacgcagggccgcaagctctacgggatgcccactgacttcggtttctgtgtcaagcccaacaagcttcgaaatggccacaaggggcttcggatcttctgcagtgaagatgagcagagccgcacctgctggctggctgccttccgcctcttcaagtacggggtgcagctgtacaagaattaccagcaggcacagtctcgccatctgcatccatcttgtttgggctccccacccttgagaagtgcctcagataataccctggtggccatggacttctctggccatgctgggcgtgtcattgagaacccccgggaggctctgagtgtggccctggaggaggcccaggcctggaggaagaagacaaaccaccgcctcagcctgcccatgccagcctccggcacgagcctcagtgcagccatccaccgcacccaactctggttccacgggcgcatttcccgtgaggagagccagcggcttattggacagcaaggcttggtagacggcctgttcctggtccgggagagtcagcggaacccccagggctttgtcctctctttgtgccacctgcagaaagtgaagcattatctcatcctgccgagcgaggaggagggccgcctgtacttca

SEQ ID NO: 240161 - DNA, 960 bp, Homo Sapiens
caagctccttttctttttctgagtctacattcttggctattttttcaatgtacggtttgaaaggtcttctctcatgatgaactatctatgcttgtaacgtggatcactttctactttgtctttactttgctccatcgagactgactgtccaagtgatgattagataatagttcaaagaaatccgatttaatctgtattttaaaacaggtagtgggatgggagggaaaataatgtaccatgagaaattcatcatatcttaaatatttacaactagaaaaaaagttcacctaccttaaatatgagaataataacttttaaaatataggcatttagagtagaattacagtaaaagatcagaagtgttcttttactagaaatgtaaacatcgacaagcatataggctttcatctaaaatttgccaaattcaagataaataatattttataaagaaattattaaaatatagaaaaaggctttttcagattgttgataactttagatctcagaactgccatgtattcatagggaatataaatttacatcgagctgcatttctttttagctaagagtcaggcttatgaagctgacaattctttaatatcaacaaggtaaaaatgatttatttaaaaactagatggataaaaattttggccattgaaattaataggacatttaaaaatcactgcaagtcattacaaacttatactgtcaaatgtctgaaatcaaaatagggtaaaaatttatattttggtgaaaaaaaggcagctgtacaccttgatatgtgagaaagttacagaatttctatgttcataattaatcattactaaaaaattgcattcagatcttctacactttttagcattaaacatgtatgtaatgtttataacattataaactcagaatgttaagtgtttatccagtattatactcaacaactgaaataccaagttaaaaacccaa

SEQ ID NO: 240162 - DNA, 978 bp, Homo Sapiens
caaataccaatttgtgtatagactgtaatggttggctctccatgactgtctaaatgttgtgtttgttgaagaagcacattattaaatactcttgtaatatcaatctgcacatagttttctattgactggagtacggtcatgtatgctcttacacttgttagaagttctgaaggttttgcaatttcctgtgtggcttgattatacatagtcatcccaacaattgacttggtaaagcgtatttccagatgagaagtcaaatattctcgtggggtaaaggtatgttcccataccaccatgtttggtacataatttatagagaagcataactcagaaagtgcagtgtgcaatttatcaaggctgaaaaaaattaataaacagttaaaatgttcacatgtcatcacaggcaatacaaaattaattttataaatatatcaaccttatttggagataatgcttagagaattcgactttttattctcctaaactgagaaagttcaaaatctttaaggttataactaacacataagagcaatattctaaagatggcgtcatttgtttctacctttaggtagtaatgaatatactgacttaatatacaaaggtagagcttattctgcactcataaagataatcacgcccaattcctgaagtactttctgttatgagagaaggaaagttgtctataaaagggcaatggcttgctcaatttagcaagaaagtaggaactatactttaaacaaaaaatatttaccgaattattacccacctacacctcccctccaaacaatgaagcaagcaaagatccctgaatgctacctggtctgttatttctgttttataataatgacattgggtatgttctaatatatcaaaaacatgccaaaataaagtctccactatctaactttaaataaattaaaaattacagattgcttataatgtaacacacaaaattttttaaacatataattggcccaa

SEQ ID NO: 240163 - DNA, 2634 bp, Homo Sapiens
  misc_feature (42)..(71): n is a, c, g, or t
ttggcgagagaggctgctgcgaaggccgcgggcccgtgactnnnnnnnnnnnnnnnnnnnnnnnnnnnnnnaccagcaccaccatgtcgcgctcagtgctgcagcccagtcagcagaagctggcggagaagctcaccatcctcaacgaccggggcgtcggcatgctcacccgcctctacaacatcaagaaggcatgtggagaccccaaggcaaaaccatcctatcttatcgacaaaaacctggaatctgctgtgaaattcatagtcagaaaattccctgctgtagaaacccgcaacaacaatcaacagcttgcacaactacagaaagaaaaatcagagattctgaaaaatctggcattatattacttcacatttgtagatgttatggaatttaaggaccatgtttgtgaattgctgaatactattgacgtttgccaagtcttctttgatattactgtaaactttgatttaacaaagaactacttagatttaattataacctatacaacactaatgatactgctgtctcgaattgaagaaaggaaggcaatcattggattatacaactatgcccatgaaatgactcatggagcaagtgacagagaatacccacgccttggccagatgattgtggattatgaaaaccctttaaagaagatgatggaagaatttgtaccccatagcaagtctctttcagatgcactaatttctcttcaaatggtatatcctcgaaggaatctttcagctgaccagtggagaaatgcccagttattgagcctcatcagtgcacctagtacaatgcttaatccagcacagtccgacactatgccttgtgaatacctctctttggatgcaatggaaaagtggattatctttggctttattttgtgccatgggatcctaaatactgacgctacagcactgaacctttggaaactagctcttcaaagtagctcttgcctctctctctttcgggatgaagttttccacattcacaaagctgcagaagacttatttgtaaacatacgaggctataataaacgtattaatgacataagagaatgcaaggaggcagccgtgtcacatgctggttcaatgcacagagaaagacgcaagtttttaagatctgcactgaaggaattggctactgtcctctctgatcaacctggattgctaggtcccaaggcactttttgtttttatggcattatcctttgcccgtgatgaaatcatctggctacttcgtcatgcagataacatgccaaagaagagtgcagacgactttatagataagcacattgctgaattaatattttacatggaagaacttagagcacatgtgaggaaatacggacctgtaatgcagaggtattacgtgcagtacctttctggctttgatgctgttgtcctcaatgaactcgtgcagaatctttctgtttgccctgaagatgaatcaatcatcatgtcctcttttgttaacactatgacttccctaagtgtaaaacaagttgaagatggggaagtatttgatttcagaggaatgagattagattggtttaggttacaggcatatactagtgtctcaaaggcttcacttggccttgcagatcacagagaacttggaaagatgatgaatacaataatttttcatacaaaaatggtagattccttggtggaaatgttggtggaaacatcagatctctccatattttgtttttatagtcgtgcttttgagaagatgtttcaacagtgtttggagttaccctctcaatcaagatactcaattgcatttccactactttgcactcattttatgagttgcacgcatgaactatgtccagaagagcgacatcatattggagatcgcagtctttccttatgtaatatgttcctagatgaaatggccaaacaagctcgaaatctcatcactgatatttgcacagaacagtgtacccttagtgaccagttgctacccaagcattgtgccaaaactatcagtcaagcagtgaataagaaatcaaaaaagcagactggtaagaaaggggaacctgaaagggagaaaccaggtgttgagagcatgaggaaaaacaggctggttgtgaccaaccttgataaattgcacactgcactttctgagttatgcttctctataaattatgtaccaaacatggtggtatgggaacatacctttaccccacgagaatatttgacttctcatctggaaatacgctttaccaagtcaattgttgggatgactatgtataatcaagccacacaggaaattgcaaaaccttcagaacttctaacaagtgtaagagcatacatgaccgtactccagtcaatagaaaactatgtgcagattgatattacaagagtatttaataatgtgcttcttcaacaaacacaacatttagacagtcatggagagccaaccattacaagtctatacacaaattggtatttggaaactttgttacgacaagtcagcaatggccacatagcatattttcctgcaatgaaagcgtttgtgaacttacctacagaaaatgaattaacattcaatgcagaggaatattctgacatatcagaaatgaggtcattatcagaactactaggctcatatggtatgaagtttc

SEQ ID NO: 240164 - DNA, 2136 bp, Homo Sapiens
ttggctgaaattatttcgagaacactggatgtatctggtctgtgtaaaaagttagcacttaccctcttttcttcctggccaagccctctgaattcatctgttaatatcaaattgtatttttgccacatttctgtattggtgaaaagcgaatctgcagaataactgccaacgtttttcattcttgttttacaaacctattttttaaagtgagaataaggttggtttttaccaaatatttgttcctccttgacaaaagtagctctgtgtggataatatgattttattactacagttccagtcacttggttatatttatcttagcatgagcctttcacaccaagatttctatattttgtaacataggtgaaatatttaaaacatcaaaaactgtaaatctagatttttaaaaaatccaactgcaatgtcttttcctttgattgagatgatttgtgtaaactcaccagtcttgctttggagtgagcagaagagaatgactattttacgtggagcatcattgtgtgactgttgacctggacagtcccaagggctatgcagatggactccattggcacagggaggtttgacctcttccctgctattatccctcctcccaactgtacagatttgtttgttgtagtttatgtacttcttgatactgtcaaaaaattatctggaaatggttttattttgtgaagtgaacaatactttgtaatttatgatagtgtaaatggaaggcaaagcatcacatgtattaaattcttctgtctattattctggagtatgtgcaagaaagtggtttggagggatggggtggtggatcatcaaaacattgtttccagatagacgctggcaacaaattttcagtcatcactgaaacacaatgagaaaacagcatctcatcgagtccccactccttctgcaagctcccttctagagagcctgcttcaagattaaggccctgaggctccacattcactttccataagccccactgcatggatgcatcatcatacagaggtgaaccgtttagggcaaatcaccctaggccacttggagggtagcagaacaagacttttaaagtcagaaagccctgagtttgatcccagatccatccatttagtactacctgcatataaccatgggaagtttgcggctctgaaaaactgaagatgataatctgattgtgacaccttaaatgaaatttatgttctagggtaattagtaatagttatttctcattattaccattttagaaggggaaaggatataacatggaagcagggatggaagaagcgtaagaaaaggatttgtcacaggttcaatccaagtccaaatagcactaaaggatataacaggcctctataatgggtaatgaagttcacttgactccttttctcaaatgtgattccaacacttgatctcctcttcctttagtctgaagccagctcacccacacctgtcttccccaccatctggcagcctgacatagctccccttacctggcttgaaattcctgctgttagaataactctggtagttagttagaccatcaaggaggcagcactgtttccagaaacccactgttaaattgtcaacaactgagttgtgggaagtgggacaggagcagggttggtgggagaatgcagtggtgaggatgggaggagacccctttttctttcttccattgacataaatgggcattccagatgacctggtctccacagcttggaagggctgctgcagatgtcaaggataacagcctccatagctccctagtggtgatgactcctcagataaaggcattcttccatgattcaatttcatctcctagggttgctgtgagaaataaatgacaatccacagaaagcgcctgcaacggcgcctggctggcaaacagcggacttgttaattacagcctttcaactaagggcgcctgaaactcgcaaacattttgctcgggtgtggattcgctcccgttagttacaaacttgggatcccgggacccggaaagcaaggggggaaaataaatcgcgatggggccaagggacagctgctgcggcaacttttacccagcggagcccacctacagcctcagcctccgggtctcaggtctccgccgtttcttctcaaggccaa

SEQ ID NO: 240165 - DNA, 944 bp, Homo Sapiens
ccaactttgtacaaaaaagttggctaatgaatcttggggccggtgtcgggccggggcggcttgatcggcaactaggaaaccccaggcgcagaggccaggagcgagggcagcgaggatcagaggccaggccttcccggctgccggcgctcctcggaggtcagggcagatgaggaacatgactctcccccttcggaggaggaaggaagtcccgctgccaccttatctctgctcctctgcctcctccctgttcccagagctttttctctagagaagattttgaaggcggcttttggattcttcacttctcttgaacaaggaactcactcagagactaacacaaaggaagtaatttcttacctggtcattatttagtctacaataagttcatccttcttcagtgtgaccagtaaattcttcccatactcttgaagagagcataattggaatggagaggtgctgacggccacccaccatcatctaaagaagataaacttggcaaatgacatgcaggttcttcaaggcagaataattgcagaaaatcttcaaaggaccctatctgcagatgttctgaatacctctgagaatagagattgattattcaaccaggatacctaattcaagaactccagaaatcaggagacggagacattttgtcagttttgcaacattggaccaaatacaatgaagtattcttgctgtgctctggttttggctgtcctgggcacagaattgctgggaagcctctgttcgactgtcagatccccgaggttcagaggacggatacagcagaacgaaaaaacatccgacccaacattattcttgtgcttaccgatgatcaagatgtggagctggggtccctgcaagtcatgaacaaaacgagaaagattatggaacatggggggggccaccttcatcaatgcctttgtgactacacccatgtgctg

SEQ ID NO: 240166 - DNA, 1030 bp, Homo Sapiens
ccaactttgtacaaaaaagttgggtgaaattgtgaatactaaataaaatcttcagtttaatttgtaagaatgtatgtttgtatttctaggtatagactatgtgatacctaaaacagggttttactgtaagctgtgttcactcttttatacaaatgaagaagttgcaaagaatactcattgcagcagccttcctcattatcagaaattaaagaaatttctgaataaattggcagaagaacgcagacagaagaaggaaacttaagatgtgcaaggagatttaatgatttcaaagaaaataatggttctttgtttttaatgttaaccttttttaaatacaatactgatagttagaagaaaactattgtactcttttgttttagtggagaaataatagatgtctgttcatgtgttaagtgttatagcaaaaaaaatacacatatggttaagttaatgaatagtttttgttttatcagaatggcaacagacagaagtactttgtagagattgacttcctaagctacttaagacaacttgcaccactaagaaaaaaatgtagaaccatttggaaaaatgaaatttagtagttccaagtttcaaagaaatgtcaacattttattccattcaataaagaacaaaaccaatagtgtttttattactttcatctgaaacattccatgttttaatctgagccttgcagactttcatttggagtttgaacccgttttggttgcatttcatttttggagaacttaattaacgtgagattggcaattgaaatgcaggtgcagttttctgttaatgtcatgctgttgtttaggtaataagaaatattaagtaattggctttagattttgtaatttttttccctgagttcctgctagatttcgtattctagtagtcaatgtattttcagtgaaatgcaaaaatattcccattatcttttgaccagtattaattttgagatcttactgcttgtcacttgaatcccgtgattgtcatacattctctggtataagcaacatttgatttt

SEQ ID NO: 240167 - DNA, 2836 bp, Homo Sapiens
  misc_feature (1534)..(1579): n is a, c, g, or t
  misc_feature (1684)..(1708): n is a, c, g, or t
  misc_feature (1718)..(1887): n is a, c, g, or t
ttggcataatgtacccaggaagtgcccttttgataaggaagcaacttcctgagtacaatagactagaaacgaaaaatattccatcaaaacattttctcttttcatttaagggagatcggatgtggcactttgcggtgtctgtgtttctggtagagctctatggaaacagcctccttttgacagcagtctacgggctggtggtggcagggtctgttctggtcctgggagccatcatcggtgactgggtggacaagaatgctagacttaaagtggcccagacctcgctggtggtacagaatgtttcagtcatcctgtgtggaatcatcctgatgatggttttcttacataaacatgagcttctgaccatgtaccatggatgggttctcacttcctgctatatcctgatcatcactattgcaaatattgcaaatttggccagtactgctactgcaatcacaatccaaagggattggattgttgttgttgcaggagaagacagaagcaaactagcaaatatgaatgccacaatacgaaggattgaccagttaaccaacatcttagcccccatggctgttggccagattatgacatttggctccccagtcatcggctgtggctttatttcgggatggaacttggtatccatgtgcgtggagtacgtcctgctctggaaggtttaccagaaaaccccagctctagctgtgaaagctggtcttaaagaagaggaaactgaattgaaacagctgaatttacacaaagatactgagccaaaacccctggagggaactcatctaatgggtgtgaaagactctaacatccatgagcttgaacatgagcaagagcctacttgtgcctcccagatggctgagcccttccgtaccttccgagatggatgggtctcctactacaaccagcctgtgtttctggctggcatgggtcttgctttcctttatatgactgtcctgggctttgactgcatcaccacagggtacgcctacactcagggactgagtggttccatcctcagtattttgatgggagcatcagctataactggaataatgggaactgtagcttttacttggctacgtcgaaaatgtggtttggttcggacaggtctgatctcaggattggcacagctttcctgtttgatcttgtgtgtgatctctgtattcatgcctggaagccccctggacttgtccgtttctccttttgaagatatccgatcaaggttcattcaaggagagtcaattacacctaccaagatacctgaaattacaactgaaatatacatgtctaatgggtctaattctgctaatattgtcccggagacaagtcctgaatctgtgcccataatctctgtcagtctgctgtttgcaggcgtcattgctgctagaatcggtaagaaatctctttttatatattaatgaactaaagtgtctttttgtaatgtaattcagagaatccattaataaatgatctgaaatgttccctaaatgttaatttaagcaaaatccactcttacgaaattttnnnnnnnnnnnnnnnnnnnnnnnnnnnnnnnnnnnnnnnnnnnnnnagtttgaaaacctgtatttgtttactttattatatacatatacttaaaacatggttcaggcttgaaaataattttttctaaatgaatatcttaaatattacttgnnnnnnnnnnnnnnnnnnnnnnnnngagatcaggnnnnnnnnnnnnnnnnnnnnnnnnnnnnnnnnnnnnnnnnnnnnnnnnnnnnnnnnnnnnnnnnnnnnnnnnnnnnnnnnnnnnnnnnnnnnnnnnnnnnnnnnnnnnnnnnnnnnnnnnnnnnnnnnnnnnnnnnnnnnnnnnnnnnnnnnnnnnnnnnnnnnnnnnnntgccatgttgccgaaggtggtcttgaattactgagctcaagtgattactttttaaatgtaatttaatttataaaagatattagctatattaattatactgccatctagtagagtcttgatattgcaataaccttaacaaaaaaactgtagtttagaaaatattcccataggacaacactaaaaaggtaatgtttttggctttaaaagaagatgtgaaagtgataaaaaaaatccttcaaaggtcttctctagccaatatgtatttattatatagtttgccacacaaatggattttatagccctggaaggaaacataaagacttcttacaaagcaaaatttaagtaataattaatagagtactgatgaattatctctgaattcagtcttgaaatgaaactgtttttatcttgtgatacaaaacagttcattagtttattgaagatattaatttccaggcaagacagctttattgtttgggctttagaactctagcagtaatataacaatggtttaaagtttccttacactttaaccataaccatttattaggtcatttgaaacttaaaaaatactagtacttatactataataggatttattatgtctctgatttcaaagttttgtttttgtagtatgaataatcacagaaaaacagaactaagaagtttgtagattagacttctttttgtctgatgactgtaaaaatcatttattgaggccactaataacccaatatttatttatgaaaaataattcttaaggcaaggctatggtatatttaaggtgacttaaagacagtcaggctaaaatgtatattttgcatatgtcaacagatttttatctgtgatttgaaatgtatgcctgtaaactaaaatctaatctttaaaaaaatattttattatagtctttggtcctttgatttaactgtgacacagttgctgcaagaaa

SEQ ID NO: 240168 - DNA, 1682 bp, Homo Sapiens
  misc_feature (119)..(158): n is a, c, g, or t
  misc_feature (981)..(1003): n is a, c, g, or t
aaggattaaactccaaggataaagaaagtgctcatagcaacgtattgcagtctccatgaaagtgcatataaacggtaaggcaaagtaccatcttggtacagacatgttgcaaactgacnnnnnnnnnnnnnnnnnnnnnnnnnnnnnnnnnnnnnnnncttctattcttctcaaaggcatttgaaagggatacttttatgaatattcttgctgtagaacaatgtagaaataacttctgggtataaaacagtaaaaataaaaatattctacctgagtgtgttaaatcaagtgatttgtaaaacaaaaccttcacaagtgtgggctttctacatgtaacttgccaggctgaaggcttacaccctcatgttctacaacacagatcactaatgatgataacatgagttaaattgggattcttgcccttctgtgtggcttttggcttctaggttctatgaccaaactattgacatatttgaagtctgtatgcagtcattgtgtgataaatctactttacagctttgcttctacctgcagcttacatgataaccatgctgtgaagtgctacatatgcttcatacaatatgttgccccatctgataataaaaatacaaaggtgctctttaagctaaaccataaaccttattagagaattctagttaagtgttttgtttttccacatacatgtaaataccttaagatcaataggatcaataaggataatattagttatcaaaatttagtcttcatacttgaagaatttgtttttaaaaataactaagatgcaaaaaaataaattagctagtcttgaacaagagtgagttttgcagaaaactgacatatctgaattctagtacagataagaatctgtcaaatgataactgaattcacgtgactaaccactcttttacgtaagattgtatctactcatgagaaataggggaattcagtgttatcattatagtctccgtatttaaactgagnnnnnnnnnnnnnnnnnnnnnnncatgcctcaacataagggaaattaatcagttaatttctgctgacttaggtttcctaaacagcttttagttctcaaggcacagctgtggtaaaaacagagcaaaacacccagccatttattggaattctgcagtacaaaataagcacatgtgctctatataatctagtaacaggatagcaacagttaaactgtctcaaacaacagatgtatttgcttgattttccttcctaacttcttttgcatcaggaccgcaagcaaagagcttgtttcccagagtattttgggcaaatcggaaatacataatgtggcccattgccacaaaggagactgaaatcaatacgagcaagccaaaagcttcaggatttggagccaggatgaccatgatgaaatgcagaagatcaagaagatagttcatggagttctgtacaccatttataatgcctctttcagattcaattacattttcttgcagcaactgtgtcacagttaaatcaaaggaccaaagaccgattctagcagcaatgacgcctgcaaacagcagactgacagagattatgggcacagattcaggacttgtctccgggacaatattagcagaattagacccattagacatgtatatttcagccaacttttttgtacaaagttggtttttttggtaaagcattgctcatcaatt

SEQ ID NO: 240169 - DNA, 1202 bp, Homo Sapiens
  misc_feature (1071)..(1093): n is a, c, g, or t
aagattttcaaaatatttttatatagaaattttttacaaagattttacaacatagcaaatcattatgtcatactgtagaaagatgaagcaaaggattaaactccaaggataaagaaagtgctcatagcaacgtattgcagtctccatgaaagtgcatataaacggttaaggcaaagtaccatcttggtacagacatgttgcaaactgacttttaaaacaattttttaaaatatatacaaactttttttcttctattcttctcaaaggcatttgaaagggatacttttatgaatattcttgctgtagaacaatgtagaaataacttctgggtataaaacagtaaaaataaaaatattctacctgagtgtgttaaatcaagtgatttgtaaaacaaaaccttcacaagtgtgggctttctacatgtaacttgccaggctgaaggcttacaccctcatgttctacaacacagatcactaatgatgataacatgagttaaattgggattcttgcccttctgtgtggcttttggcttctaggttctatgaccaaactattgacatatttgaagtctgtatgcagtcattgtgtgataaatctactttacagctttgcttctacctgcagcttacatgataaccatgctgtgaagtgctacatatgcttcatacaatatgttgccccatctgataataaaaatacaaaggtgctctttaagctaaaccataaaccttattagagaattctagttaagtgttttgtttttccacatacatgtaaataccttaagatcaataggatcaataaggataatattagttatcaaaatttagtcttcatacttgaagaatttgtttttaaaaataactaagatgcaaaaaaataaattagctagtcttgaacaagagtgagttttgcagaaaactgacatatctgaattctagtacagataagaatctgtcaaatgataactgaattcacgtgactaaccactcttttacgtaagattgtatctactcatgagaaataggggaattcagtgttatcattatagtctccgtatttaaactgagnnnnnnnnnnnnnnnnnnnnnnncatgcctcaacataagggaaattaatcagttaatttctgctgacttaggtttcctaaacagcttttagttctcaaggcacagctgtggtaaaaacagagcaaaacccaa

SEQ ID NO: 240170 - DNA, 901 bp, Homo Sapiens
ctttgtacaaaaaagttggcggcggtcgacactgtttccaggtcccggatagcgagggcggccgcgccggctccagggccatgaagcccccaggaggagaatcgagcaatctttttggaagtccagaagaagctactccttccagcaggcctaataggatggcatctaatatttttggaccaacagaagaacctcagaacatacccaagaggacaaatcccccagggggtaaaggaagtggtatctttgacgaatcaacccccgtgcagactcgacagcacctgaacccacctggagggaagaccagcgacatttttgggtctccggtcactgccacttcacgcttggcacacccaaacaaacccaaggatcatgttttcttatgtgaaggagaagaaccaaaatcggatcttaaagctgcaaggagcatcccggctggagcagagccaggtgagaaaggcagcgccagaaaagcaggccccgccaaggagcaggagcccatgcccacagtcgacagccatgagccccggctggggccgcggcctcgctctcacaacaaggtcctgaacccaccgggaggcaaatccagcatctccttctactaagagaagccactgctccacccggagccagaccagaaactcaagagatagggtagccatgttttcatttccttttgcccaaatgagcggggtgggaagagggttagtcttatgtgagcctggctgctcagcgtctcctggccgtcatgacagctgcttggagaccccgtgccttccagatggctggggagatgcctctgtggggatgaaatgggggcacccctgggccatcactcatgtgtagtccaggtttgagaggaaactggaaagggggttgagggtgggggaggtggggcagg

SEQ ID NO: 240171 - DNA, 1176 bp, Homo Sapiens
tcctgactcactaagcccatgaaattttctgtggttggcaataagttgtattgattggattatctgttctgtctggacatgagatgaccagtgtcccagtgaaggaacgagtgaacgtgtctctgaactggagactggggcgctgccgagaggggattctgctgaagtggagatgcaatcagatgccctggatgcaactagaagatgattctctgtacatatcccaagctaatttcatcctggcctaccagttccgtccgtatggtgccagcttgaatcgtcggcctctgggattctttgctgggcatgatgaggacctttgccactttgtgctggccaactctcatattgttagtgcgggatgggatgggaagattggcattcataagattcacatcaccttcactgtcaagtactcggctcatgaacaggaggtgaactgtgtggattgcaaagggggcatcattgtgagtggctccagggacaggacggccaaggtgtggcctttggcctcaggccggctggggcagtgcttacacaccatccagactgaagaccgagtctggtccattgctatcagcccattactcagctcttttgtgacagggacggcttgttgcgggcacttctcacccctgagaatctgggacctcaacagtgggcagctgatgacacacttgggcagtgactttcccccaggggctggggtgctggatgtcatgtatgagtcccctttcacactgctgtcctgtggctatgacacctatgttcgctactgggacctccgcaccagcgtccggaaatgtgtcatggagtgggaggagccccacgacagcaccctgtactgcctgcagacagatggcaaccacctgctggccacaggttcctcctactacggtgttgtacggctgtgggaccggcgtcaaagggcctgcctgcacgccttcccgctgacgtcgactcccctcagcagccctgtgtactgcctgcgtctcaccaccaaagcatctctatgctgccctgtcttacaacctccacgtcctggattttcaaaacccatgaccgtcagggccacccctgcctctgggccagggaaaccagctactcagggacttctcttgcctggagggtgcagtgatagctccctcctcactgccccactgtgctccctggggc

SEQ ID NO: 240172 - DNA, 979 bp, Homo Sapiens
  misc_feature (306)..(314): n is a, c, g, or t
  misc_feature (884)..(892): n is a, c, g, or t
aaagaggaccaaatggtgagtttgggtaccataacagaaaatctcactaactgtaccatcattcacaggaatgaacaaacccaaacacgacaaaattcaaattctcatgtaattgctacaagtgaatgtaaatgaactaatcattttatcataaccttcctttaatcatacgaaaaagggaatttacatggcataacaaaagatatgcaaaacttaatgaaaacacaattctcttaaatttcttaaacttatttttaaaggatgcagaatgcacttgaaatgattaaatgacttaagctgattcannnnnnnnnattgcaaactgttttaacatcagcttaacccccatgcacggtattcaaaaagaacacagctttcgaattagaaagatcacttaaattaaaaagagaaattaagtactaaaattaggaaaacgctggatttcttttgaaaggaatcttcaagtaccaatacgtatagagaaatactaattttggttacagtttcctccttactgttaaatatacaaactataatacctttcaaaataaaatacccacataagatagctttaataagaaatattcaagccagaacttggaaaaacattaagcaagaaatttactgggctgataatgtcttaatttgtgatcattcaaacatttgatgatgtgtctcctcttgtagaccccaggctctctcccttttggtccccacagttaagagacattcagttggttgtgcttgagacaacctgtgataatttcattcagaggaaaaatattttgcaatataatgacagaccaagaaggaagagaaggtgggtgctctggagaaaacttatatgagaaaaacacaaaattatcacttgaaaataaaaagannnnnnnnnccaaaggaatgctgcacccatttcacttaagattagaaatccaggttaaaggcactgggatgtactcctcaccatgaatagacccaa

SEQ ID NO: 240173 - DNA, 2513 bp, Homo Sapiens
  misc_feature (2359)..(2380): n is a, c, g, or t
ttgggaaacaatatacatactctcttttttcatccccagtgaagaatttgcataaagacataataaacttaaaaaaaatctacttctaaatattcatacatgttaagagaatggctaaaaatgtttttgtagtcacctgaataaaaaagcaatagctaaatggacaaatcattttagatattctaaatgctataagaactgagctgcttctgcttcttaaaaattggaaacaggaatactgttttaatatactaaaaacattaatgtataaaatgtgtgttgtgaaacacagtgtttaccattttaacagactcagaatgaagaccacagaaaccagagcaaccaagtcctgggtaaaagattccatgctggagtgactgggctgagtcagaaccacatttactagtttctcagtgtttactgctagtcgtcctctttgtggtatattggtttgaaaatattaactgtagcatgttcggtatattcacccaaaggccatatgtcagaaaattaaaaatgcaaacctcattaaaaataagcaaggcacattaagcaatagcttcaaatcagaataaagattgcacttacatttttcatgtccacagaatatacccaaaacacttcttgtatctacaaacttgcccaagatatgcaaattatagtataacatttttaaaaagacactggacaacaaagtgcaaaacatctgagaaaaacttatgttagaaataatatgcatactgattcctgcaacgacagggggtctgcattgctgacacagtatatatttctatttcttttggtccaacagaaccactctcctgctgtttggtgtcttcaaccattggattgttgttgcagctaacaggaaactgtccactcccacctgttacaacagcaaactccctatcaacgtgcattttgtcagcatcgtcttctgtgtcgccattcgtgagtggcacggcagaatccaagctttgagcttcagttctagctttctttactccaaagtcttctgagtcttccaagcatctctttcgatttgttcccacactaatatgattaggaaatacattctgatgacccccatttaagatgccattgttatagaaatggttcagatgacaattctggaggttcaagagaaactgggcacactcttggaaaccctgggtttgtgcaatgtctgctgctgtcaggccactggcatttctcaggctgtacaacacaaaaacactgaattacaccccatccgcgtgctaacctggtctctgctcctgctgaactgactagctatctgaaggtggtatgaaagagtaaacaaattcatagcaaatcttcattaaagaagtagttaatcaatctagctctgtaactaacttctcttatatacatttgatttctaagcaagatttgggagataaactaaatatgctaaacttctaaaaaaggcatcttcctatttaacttctcaaaatcatgttttatgttagtctgaagaatctaaatttacgctaacttcagacttgaaactgaattctatattatatgcacttaattttaatacccattcctttagcgtgaataaaatcataacaaacaacatgtactgagattgtccatggcattcataactgtcttcctaaaaacaaagcaatggctcaccaacgagccagccttcatgcttacatgtgacactgtaagtggaagtttagaaggatgtcctgacattaaaaagtagcctatcatcagattccagagctgaacagctgtgtttttctgtcagattttgattgttttggccttgcttgggaaaacctgcaggagtattgtatttttggcattgtagagcatttgagtagttggttcctttaaaaaggctttgaatactgtcctaaaaactcatccctaccactcacaagaaccaaagttttacctggctaatagtactaaaaaggaaaggtctgagacctctacagtagctaaaactcagattcaagtaggaagtgatggcagagtaagtgaaagagctgaataaaatagagtaagttgaacttgtaaacctttagacactgaattaaaactgagggatcaaaagtaactccatgttgaagttcccctggaagacaagaatgtacactgctctgtgaaataaacctgtaaaaaagcagacatcctgttagctgcaggttgataaacaaacgggagaagtacttaacagcaaagacagcttccatacctgttcagcaagctacactacatacacagcaaaagcatgatgaaatcaaggccttgtgctgtgtcactcaaacaaccactccagaaccctgatgcctttcttggggttactgttaatgcnnnnnnnnnnnnnnnnnnnnnnccccgcatttgagagtgaaaactacagaattagggacaaataatattttcttatttataaggactgacaatagccttgtattcgttatttgcagacatcatagagctctgaccttggaaatgagaagtgccaa

SEQ ID NO: 240174 - DNA, 1201 bp, Homo Sapiens
  misc_feature (48)..(58): n is a, c, g, or t
agattttaggaagggaggtttaagaaatgactggctagctatggtccnnnnnnnnnnnggtgaaggcagatattattcctctgtaccagcaaagttcacagtgataggaaaattccttgtgggtgctgaggacactgagaggaggaaaggaaagacaggatagatgggaggacacaggagtggggaaggcaaggagaaaagacaggaggtgggggcaaggccccggttacaaagggtttaaacagttgctttgccagtcctatgacttttccagcatcacttacggggagagagaattcgagggagggacaggaaagggcaggcagagaggaaaggactcctctaacagcccgggactttgtattctgcagccagaggcccagtggcctctgtaaactgagagtgtagggaaggtggcagttaaggtgagaagggttgctgagtctagtgatgaaaaccagatacaacaaagaggatggcaacagcgagtcccaactggattctcacataccatcacctataatacaagtcccaataacatgcacagcatgcaggaggtggctgcgtaccaaggtagacactttttaaaataaaccttaattagtccctgggactcactgaaactaatttttagaagcaaatcatctagtctgattctaaccttgccagacattttaatatctggtgtttttaaaaaggtatcccaagctaccctgcctaaatcaaaacacacttactccaaattgcttctaatcaagagctagggagctaaattttaaggcttttacctcaaacaaggagtactggcttaggctgaagcagaaagctgagtcctggacctgctcagttcctgatgacaaaccaagtgaacctagacagaaggtgggtgagggaggactggtaggaggctgaggcaattccttggtagtttgtcctgaaaccctactggagaagtcagcatgaggcacctactgagagaagtgcccagaaactgctgactgcatctgttaagagttaacagtaaagaggtagaagtgtgtttctgaatcagagtggaagcgtctcaagggtcccacagtggaggtccctgagctacctcccttccgtgagtgggaagagtgaagcccatgaagaactgagatgaagcaaggatggggttcctgggctccaggcaagggctgtgctctctgcagcaggccaa

SEQ ID NO: 240175 - DNA, 1183 bp, Homo Sapiens
ttggctccaaaaggggaggaaattgaaactgagtggcccacgatgggaagaggggaaagcccaggggtacaggaggcctctgggtgaaggcagaggctaacatggggttcggagcgaccttggccgttggcctgaccatctttgtgctgtctgtcgtcactatcatcatctgcttcacctgctcctgctgctgcctttacaagacgtgccgccgaccacgtccggttgtcaccaccaccacatccaccactgtggtgcatgccccttatcctcagcctccaagtgtgccgcccagctaccctggaccaagctaccagggctaccacaccatgccgcctcagccagggatgccagcagcaccctacccaatgcagtacccaccaccttacccagcccagcccatgggcccaccggcctaccacgagaccctggctggaggagcagccgcgccctaccccgccagccagcctccttacaacccggcctacatggatgccccgaaggcggccctctgagcattccctggcctctctggctgccacttggttatgttgtgtgtgtgcgtgagtggtgtgcaggcgcggttccttacgccccatgtgtgctgtgtgtgtccaggcacggttccttacgccccatgtgtgctgtgtgtgtcctgcctgtatatgtggcttcctctgatgctgacaaggtggggaacaatccttgccagagtgggctgggaccagactttgttctcttcctcacctgaaattatgcttcctaaaatctcaagccaaactcaaagaatggggtggtggggggcaccctgtgaggtggcccctgagaggtgggggcctctccagggcacatctggagttcttctccagcttaccctagggtgaccaagtagggcctgtcacaccagggtggcgcagctttctgtgtgatgcagatgtgtcctggtttcggcagcgtagccagctgctgcttgaggccatggctcgtccccggagttgggggtacccgttgcagagccagggacatgatgcaggcgaagcttgggatctggccaagttggactttgatcctttgggcagatgtcccattgctccctggagcctgtcatgcctgttggggatcagcagcctcctgatgccagacacctcaggcagagccctactcagctgtacctgtctgcctg

SEQ ID NO: 240176 - DNA, 1101 bp, Homo Sapiens
tattaagggaagataatgtggtttattattttattatacaatcagtaactttatgtatgcttaattgaaaaatgttcctttattcttgtttttcaataacaatttgaataaaagtagatgtttcttgtccaattttaacaaaaaaaactttgccccttttttcatttggctgatgtgattaatggatatcactcttccttgcaggagtgtatatgacaggaaaagaacttcgccagtgtatgctaccaaagtcagcagctttatctgaaaaactcaaagtattccgagaatttctcctgcccaggcatcctcctatttttcatgagtggtttctgagaacattccctgatcctacatcatggtacagtagtagatcagcttactgccgttccactgcagtaatgtcaatggttggttatattctggggcttggagaccgtcatggtgaaaatattctctttgattctttgactggtgaatgcgtacatgtagatttcaattgtcttttcaataagggagaaacctttgaagttccagaaattgtgccatttcgcctgactcataatatggttaatggaatgggtcctatgggaacagagggtctttttcgaagagcatgtgaagttacaatgaggctgatgcgtgatcagcgagagcctttaatgagtgtcttaaagacttttctacatgatcctcttgtggaatggagtaaaccagtgaaagggcattccaaagcgccactgaatgaaactggagaagttgtcaatgaaaaggccaagacccatgttcttgacattgagcagcgactacaaggtgtaatcaagactcgaaatagagtgacaggactgccgttatctattgaaggacatgtgcattaccttatacaagaagctactgatgaaaacttactatgccagatgtatcttggttggactccatatatgtgaaatgaaattatgtagaagaatatgttaataatctaaaagtaatgcatttggtatgaatctgtggttgtatctgttcaattctaaagtacaacataaatttacgttctcagcaactgttatttctctctgatcattaattatatgtaaaataata

SEQ ID NO: 240177 - DNA, 1712 bp, Homo Sapiens
  misc_feature (420)..(429): n is a, c, g, or t
aaaaagattacatacagtaattcaccaccttggtggtttcatatttaccaagttctagctgaaaaatgtaacacgtttatttctgaaatatatattacccaaaaagtatgcacaatgcccagattagtaaaaattcaagctgtctactggtaagtacatatcaagaattcatgggaggaaacaagactcctgcaccgtgtgtagtatgtgtgcactgtaagtgtttaaaaaaatgcaaagcatcaccgaggtggacctgagacatagaagatgactgaatggaagaggtcaatgtggaaatcaacataaaaagggatgcgggggagctgatgtcattcatttacctaaaagaaatagtgtacttctggaaaagggtcagactaattggaaaaatcagccacagtcaaatgaattcaattnnnnnnnnnntcaaattagccctggtcaaataaatccaagttaaaaggaaacagtctttagtctgaaaaataatattttagtctgaaagagtctaatatttaggtagcataacactactacagttcagtggatgaaatggaaggttctaagtaggttaatttatagcacagttatttaggaaatagtcctgattatataaatttatacttgaataatttcttaaccaaatacaagccccatattgatacgagatgctaggtggaaagctgttccaggactatagtcataagcaaactaagtcacttacagatctttttttaaaaagccatgcactaatatgcaatgatgttcccggttaccttgcttgttgttttggatgttttcctgccagggttataatcgccttcattttcagagccagatgctttccttttctttgcccctcggcctttaccttaaaatgatacaaaaggttttttcttccgtggttaagtgcaatataaaaagataaatgccacaacattgtagtttatttctttggcatgcccaatcagtggagcattgcagtcctgatctcttactatgagtgattataaacaatttggcagtagcatttcaattctggggttgacatgaccaaagactttttgacaaatacatttaaactagtgggaaagtcccaaagacaaattttaatgatgaatcccttcatacataaaacatttgtatttgctatttggtccttgagcctgaaaaggaaatatcttggaagagtacttcttaaattacatgggatttaaatattttttttcatttctaatttgtcatgggccaatacttttaaaaataccatagaacacaaattactaaaaaatgtaatcacatgctgttttagtaacacattattataaaggtctaaatgtttactccgttttacttatcaaagactagtaacaaccaattgcatatcccacattaagtggcaccatatgagaaccaccagtattaactataaaatgtcaaatacatattccttctcagacctagactcagcacatgcagcattttttttcacctacctaacctcttattctcatcattggaggtggaaggagaaaaggtaatatttaagtaggggccagatgttctccatcccacaatgatgccaatgaaataaaacaactaaatagcaattttatatctttaaaatcccttgacagctagactggacaagtacgaagatagacttaaataatcttgggatgtcatatttgatcaaatgaatcagccaa

SEQ ID NO: 240178 - DNA, 873 bp, Homo Sapiens
ttttttgtgaatgtccatctttatcagagaagagaaattagcaaggaaagttctggcagtacttcctgttcttcatgaaaactcaacattattttctcagcctcagagagttccttgtcaccatttggcttggtatacttctcgtgcatgaaggagatccaggaaattttacattttttaataaagggggtcacatctacagtgcccaaggcataaccacatatgccatcttcatcttctaggacaaagcagtaatccaggctgagggaaagcagccctcctactaacctgctcagaaggaaagaggccacagtaaacttttcagttgctaatataaaattcagacttcagtgatccaagacccactgtacttgcatgaacttacggaacctacatttggtgtaagaaactagaaatgcacacatattcagattttactaaagccaaagtgggatttaaaataaataaatatatttccagtcatcacctcccctcaacctgataagcctcactatgaaaggtctactctcaaatccaaatacttatcacatacttgtctccaataagatcaggctgactttgaaagggtaaacccactccatcgtcatacatttctctgcaaatcttgtacacggatgcctgaaaatataatctagttaagcaacacatcaagaaaaatggcagcagaatctaacaatataactcacaagtcagtctggggagggagtaacaaaatggcctgtcagaaacatctatcagaaatatcacctcttctttgtaaaataaagatttattcattgagtcagatttgtaaaaccagcaaaaaacagcaaggttttaggaatactgagaattggcttttgcagaggatgg

SEQ ID NO: 240179 - DNA, 2908 bp, Homo Sapiens
  misc_feature (1028)..(1036): n is a, c, g, or t
  misc_feature (1264)..(1291): n is a, c, g, or t
  misc_feature (1315)..(1323): n is a, c, g, or t
gaaacgcaaccacactggatgcagaaaatagtgctgactacatttattgaagactctctcccctgtataagcccatgtaaaaggtctcagcactaacacaagactcaaaaaggaagcccacatctctctttcatacaggatttgctgcaatactatattcttccaaccagtgagtagtctcaaagtgtgatgggtgagttttacatagtcttctttgtttcgaatccaattggctgatttgttaccattctagaggctgaactgtatgaagacctcaactaccattcacaaggtgcagttaagagacttttggacagttcacagtgtcaacaaatgtcacaggctccgaccaagtataaccacatcctttggaaatccttccatttttgcaatttcaaaacatcctaacttgctgtaaaattccagaattcttttatcatctggtctcacttcacagaaagctccccgggagccattagccttcagtgaagacaggaggcaagccatcatgcttttggccacacttgggtcagttacttttttgtgaatgtccatctttatcagagaagggaaattagcaaggaaagtttctggcagtacttcctgttcttcatggaaactcaacattattttctcagcctcagagagttccttgtcaccatttggcttggtatacttctcctgcatgaaggggatccaggaaattttacattttttaataaagggggtcacatctacagtgcccaaggcataaccacatatgccatcttcatcttctaggacaaagcagtaatccaggctgagggaaagcagccctcctactaacttgtctccaataagatcaggctgactttgaaagggtaaacccactccatcgtcatacatttctctgcaaatcttgtacacggatgcctcatccttaggaaaataaggtctgatagtataaactttggaggtaggagtcagtggaggtggctgaaaaaagagatcattcgccccatcaattggcagcaaacgctgtgggaagnnnnnnnnnggagatggattagtttggggaaggtatccatttttttaaatgggtgtgcactgcagattaccaacttatattaactggctactgcaggcagaccaaagaagagaggtgtactatgctttactaatagaaatacctctttgctagaggagaggagtgcttctgaatagaaattacccactctgagttacagctttagtggcatattaatggggatttaaatttacagtnnnnnnnnnnnnnnnnnnnnnnnnnnnnctattccaattatgacaaatctannnnnnnnnaaaacctatcttagatagaccatctccctacgataagatggcagaacagaatgtcaggaggagaggtttggtctgaagagggttatctgtccaggagacgctttatccccaaagcaatgcgcttcagtttgctgtgcgcagcagagcacctgttggggggagaaaagtagagcacctagaaagtccatgaacaaattccagcagcaaaaaaacttcctattttgttcatattttcagcaatggacaattctttcaagcacattatatttataaaataattggataaatatccaaaagctctttcaccatttattggcataattactatcttttgttcatggagcttccactggcagacaagcatgcgcgcattgtgcattgcgggcgcagattaaaatgctgtgcgacctgcaaagaaacaatgtgaagtgtatacctagagccgctgcgcttcgcaggcgcgggggggattggcagcatctccttcagaaattactgtgaaagaggaggaaaatttgatttaaaaatccagctatgtaactaaattgaatttgggactagaaagccttcggcagaccaatccttccagccatctgatgcgcaacataaggtttctcataaaacaaagaaaatgtcaattcagttgtgaattcatattgatacctggaactctcctgctagaccacctctaaaggcccagggttcttggtctccaattaagaattgtgctgaagaatgactacgacaccctgttgagatcagatccaagcggagaacgttacgagaaaggggatttcctggggtctcaaatgtccaacaaactgacaaacacttcgtggaaataactctctaacaataatcagggtttcagggcaaggctatgataataattattattttttaaaatgttaacggcatttcaatactaatgttccttcctccaattaatgaataatcagtattatcagttctactctttaattactggaaggaaagtaagtcccaagtttgtctgagtcaactttatatattccctagatattatacaaatcaagctagctgcttgctctgtcataaaattatagtaactattaactaaaatgactgataattagacactttattatcacagcccatgaaggaattcaacctgtctgaagtcacattttacattttgaggaagggtacaggtaagggaaaagggcgggggagaaggattaatcttgtcagaaaactaaggtcagtagaataaaatacaagaaattaagttgacaaaatgaaacataatgagaaaaatttttttggacaaaaacaattcaaaatcagacttggctaataataccagtctgacagattctgagaactaaggagagccaattgatgttattttgcccagagctaaatatacttttcttaaaagtatgacagtatctggttcctctgaccagccattataataatctttgcaatacactgaacatacacatggaatacagaagtctctatttaaggtcaccagttaactaacttaataggcaataacgctagctaacagtaagacataaaggcaaatgtttggagccaa

SEQ ID NO: 240180 - DNA, 1303 bp, Homo Sapiens
  misc_feature (105)..(158): n is a, c, g, or t
ctttgtacaaaaaagttgggtttttgtaaatttttttcctctataaatgaaagggtgttggttcagaatggcactttgaataatgtaaaccagtgaaaagtggannnnnnnnnnnnnnnnnnnnnnnnnnnnnnnnnnnnnnnnnnnnnnnnnnnnnntattatttttaaagtgcctcccacctaggcgtaggccatgaccatttggggtacgagagcctaattttgtaggacttaatctgttgaaaagtgcagttacttctggaaattaacctcaatattaggtcagcatgtgaaatgttggatttgacatgtcaggtagggttcagggactgattggtcccatttgccctcaggtcagttgtttaatctcaagacctgttactactgattttattaaatcagagtctttaattcttgcatgtttgtatctaatttctgaacgaatgagcacactttaaccagttatttacagttacctttttcctttaaccggattgtgaaagcttcatgtattttaatttagattctgtgtttttaagggttctgagcatgaagctggcagatagtcggcaggactcattttttcatcatggctggctgatttctccatagattgataacagtattttgttatcttgcttctctgtagttttgcatcagctgtttaactttgagctgagtgaggggagaggggtaaagagaaagaaacttaagttttctttcacagaactccaccattgtgggctttgagagagccctaaagcattgtacctagtggtacctagtgacttccaaccaaagcctttgagtatgcactaaataggtgagaagaaaggagagaaggtttttaggttagaaacctttaaccgatagaaggatatggtatgttgtaaagctggaaccaagtttgcatttttgagggcttgagatgaagggaagactcttaccagatagtaagacagctgagttttcctcagttttctcgtcttaacactagtggacaattctagcattttgtttggaggatttcagagttaacctcatggaattcaggattttttagcaagtttgcttttggttttatcttggcttttagtaatcatgttggctggtctggtcacaggtgactgtgaaacagatgccctggtcttgctttcatcactctaggatcatgaagtgctatgctatttcctggtatgaatattaaggttggaattacatttttattgattgtttggatcaagctcagttcctgtagaaaccgactgtaaaagaccatgcagaggcaaataaaacttgaa

SEQ ID NO: 240181 - DNA, 1014 bp, Homo Sapiens
  misc_feature (252)..(279): n is a, c, g, or t
gaccataacatctttaagtatgaaactttaaaacagaggaaaaaaatgttctttgtctttattgtgttttcacctgaggaaatattacaatagtactcccaaataaaaaactgtcccaatattggggaaacagtgaaaaatgtcatgctaagaataagccataagaattctttctgcaagaaaattaatttagaaagcactaagattttatgatgtatctatgtacttttccattttagtaagtactttaannnnnnnnnnnnnnnnnnnnnnnnnnnngaccattaccatagtataattcttaacctttgtattacctcagcctcagagagttccttgtcaccatttggcttggtatacttctcctgcatgaaggggatccaggaaattttacattttttaataaagggggtcacatctacagtgcccaaggcataaccacatatgccatcttcatcttctaggacaaagcagtaatccaggctgagggaaagcagccctcctactaacctgctcagaaggaaagaggccacagtaaacttttcagttgctaatataaaattcagacttcagtgatccaagacccactgtacttgcatgaacttacggaacctacatttggtgtaagaaactagaaatgcacacatattcagattttactaaagccaaagtgggatttaaaataaataaatatatttccagtcatcacctcccctcaacctgataagcctcactatgaaaggtctactctcaaatccaaatacttatcacatacttgtctccaataagatcaggctgactttgaaagggtaaacccactccatcgtcatacatttctctgcaaatcttgtacacggatgcctgaaaatataatctagttaagcaacacatcaagaaaaatggcagcagaatctaacaatataactcacaagtcagtctggggagggagtaacaaaatggcctgtcagaaacatctatcagaaatatcacctcttctttgtaaaataaagccaa

SEQ ID NO: 240182 - DNA, 981 bp, Homo Sapiens
ctttgtacaaaaaagttgggaagatgaagatcggcatatgtggttatgccttgggcactgtagatgtgaccccctttattaaaaaatgtaaaatttcctggatccccttcatgcaggagaagtataccaagccaaatggtgacaaggaactctctgaggctgagaaaataatgttgagtttccatgaagaacaggaagtactgccagaaactttccttgctaatttcccttctctgataaagatggacattcacaaaaaagtaactgacccaagtgtggccaaaagcatgatggcttgcctcctgtcttcactgaaggctaatggctcccggggagctttctgtgaagtgagaccagatgataaaagaattctggaattttacagcaagttaggatgttttgaaattgcaaaaatggaaggatttccaaaggatgtggttatacttggtcggagcctgtgacatttgttgacactgtgaactgtccaaaagtctcttaactgcaccttgtgaatggtagttgaggtcttcatacagttcagcctctagaatggtaacaaatcagccaattggattcgaaacaaagaagactatgtaaaactcacccatcacactttgagactactcactggttggaagaatatagtattgcagcaaatcctgtatgaaagagagatgtgggcttcctttttgagtcttgtgttaggtgctgagaccttttacatgggcttatacagggagagagtcttcaataaatgtagtcagcactattttctgcatccagtgtggttgcgtttctcacctgagagtaatcaagataacatctgtcatcttccttgggtttattgagtgaaatgcctctcagtcttaggggacatggcagagatgaagaaagaaagagtgggtttcagaagtgtcaggtggagtgattccaagtgggatggttgtggcattagtttaagctgataaataatttcaattt

SEQ ID NO: 240183 - DNA, 684 bp, Homo Sapiens
ttggggcggcggtggcggcggcgactgctgcggtgaagggggaggaggagccgagcgggcgctggcaccgaggcctgaccatggacgaggaatacgatgtgatcgtgctggggaccggtctcaccgaatgcatcctgtcgggcatcatgtctgtgaacgggaagaaggtgctgcacatggaccggaacccctactacgggggcgagagctcctccatcacacccctggaggagctgtataagcgttttcagttgctggaggggccccctgagtcgatgggccgaggccgagactggaatgttgacctgattcccaaattcctcatggctaacgggcagctggtaaagatgctactgtatacagaggtgactcgctacctggacttcaaggtggtggagggcagctttgtctacaaggggggcaagatctacaaagtgccgtccactgagactgaggccttggcttccaatctgatgggcatgtttgagaaacggcgcttccgcaagttcctggtgtttgtggcaaacttcgatgagaatgaccccaagacctttgagggcgttgacccccagactaccagcatgcgtgacgtctaccggaagtttgatctgggccaggatgtcatcgatttcactggccatgccctggcgctctaccgcactgatgagtgaggggaagctgggt

SEQ ID NO: 240184 - DNA, 1047 bp, Homo Sapiens
aggggcattttttattataaatttaatatggttgattaatgaaaaatgacaatgaagtaccaagaaaatgtttgtcaatataaaaattttagcagcatttccatagtttcaggctccaacattagtcgtacttcctccctcccgctatcaaaaaaagaagagactccaatgggatggagtagagcctgggggtgtccagctttgtgtgggcctcagagaaatactccatccagcatccaggattctccctccctctcatccctgaagtgctagaatgtcaaagcacagaaaaagcctcctttgtgctgacattggagacaaggatccgttcttcaggctgcagggagaattgggatagaaactgactctggacttgacatgtagtgctcagccacacgccctcaccaacacctgtgcattctctactctgatgacaaggaaaggccactgcaaggtgggtgggatctggggtgtggtggcggtggcactgctggtgggagccacggcgtggcgcatgctgggtgacggtgtcaccgccacacactgctctggggcaggcgtgatcagtgagggtgggagacagacaatgtgaaaacgtaacactggccaatgattcccctgcttctttggtactttccaaaattctctgatcaaaaaagtataagggaagcacaccattaaaaaattacagttttacgtatttacaaaagcaatgatgatatattacacaacaatcaatacacagtatatgaacaaatcttcagtgaaagcacttgtgagctcccgtcccgctgtcatcccacagcacgcgacctctgcagggtcaggttgcctgttctgaagctcattaccttacagtatattagaaggcaaaaacatcatttggaaaaaaaatcattttccaatctacactttccttttagaaggcttaacatttgccatcgaaatagttatgtacaagatttattgaatattgacttctaggcaatgatctcccctcccaacttgaatatgtttgaaataatgctgccaacttttttgtacaaa

SEQ ID NO: 240185 - DNA, 1046 bp, Homo Sapiens
ttgtacaaaaaagttggcttttcttctccgttcaacataattcagatttagataacatccttccccttttcagccaatcagtggcggatccatattagttttccactgactctacttcagctctcaaattctttatatgtagctccatcatgcctgtaactccttttaattcagacctgtcgtctcacatttgaactttggaagatagcctcctgactggtattttttattccatactctgctttattatacacgttgttgcccagaggtctctttaaagcagatctgatcattctacttctagcaaccagtggaataaagtccaaattctttggctttccataaattattctttgccctttgaccccagattatcttttgaacctattaacagtcaactgtgtattattttgtagtcactcagaatagtttattttccatgttacttcattccttggttctttatttatgctgtctatttgcatggaattgatggctgacttcatttaacttcagtaagcacttaataggtcgcaggcaaggtactgaagataaaaagtcagttaagacttcttttggggagagttggaggacagattctgatttatcctgtaaggctcatctctgatgaaacttccttgatcgaatgatttttttctcttgttatggcttttctcttttttagaaataatatgtccccttttctttttaccttttcagttcccagctgaaaatgacattcttttaaatctaattataaaagtaatgaatgtttattgtgaaaattttaaaatatttcagaaaatgtttaaagaaagtgatttacaccattcagagatcacctcttgtttatttgcttaagtcagttattttcccaataaaagcccttttgctcacctgtgggaactcccacatgtgagttccaccaaatctttcagaaagcaatatcgatttcagctataccatggcattcaggagaagggaaagcttcctgtaaaaggggaaatgagaaaaggtgggggaacaggctaatacatcaaatactg

SEQ ID NO: 240186 - DNA, 702 bp, Homo Sapiens
  misc_feature (589)..(617): n is a, c, g, or t
gtatctgagtatgtgctgtatttttatttgttcacatttagcctatttgaggttaacactacttcatttgacagtttaaaaatcatcctgtagatagaataaaaaacaacagcagcaatagctaaaaaaaggacacaatgtataataaaataaaggaatgtgtcaaagaaatattccaaagaagcaaaggaaatgagaccatgattatgaattcaacaatcagaagaaaaaatcgtccaacatctgtaaaaagcaaaatcataacagtaataaaaaagaagcaagaattcaaagtgaggtgcgctagctttcatttccacatccattcaggaaatagagcatactattcttttatataaagtgacaagttctgtttttaaaacattcagttacattatcttgcagattttttttcagtttacattatctctacattgatttgatggaaagatggtcatatgcgatatgtggtataaatttcttcaatctatggagaatacggaaatggtaaagttgactgttttacttatgtttttgcagtaagaagctaaacatccagtatcagaagcatcagtacttttactctttnnnnnnnnnnnnnnnnnnnnnnnnnnnnncctgtcatgagccctctgtctttgctgctactttcagattctctgtgacaaaagactgttacttttcactgaatgctaatgagtt

SEQ ID NO: 240187 - DNA, 1150 bp, Homo Sapiens
  misc_feature (164)..(236): n is a, c, g, or t
  misc_feature (948)..(976): n is a, c, g, or t
ccaactttgtacaaaaaagttggcctccctcttaactgagcctgccctggtcaagtactttgacaagcccagtgcaaaaaacatccggatgatgggcaagcccctcacctcggccagtgactatgaaatctcggccatgtccggctgacacgggcgccttcccnnnnnnnnnnnnnnnnnnnnnnnnnnnnnnnnnnnnnnnnnnnnnnnnnnnnnnnnnnnnnnnnnnnnnnnnnaaattaaatatttattagtacctggcttgaagcctagtgttttcataatgtaattcaatgaaaactgttggagaaatatttaaacacctcaatgtaggtacattacactcttgttgcggggaggggatttaccagaatacagtttatttcgtgaattctaaaaaacaaaaagatgaatctgtcagtgatatgtgtgtattataacttattaatcttgctgttgagctgtatacatggtttaaaaaatagtactgtttaatgctaagtaaggcagcagtcatttgtgtattcaggctttttaaataaaattagagctgtaaggaaaatgaaaagccacaaatgcaagactgttcttaaatggaaggcatagtcagcgagggtaaatcctataccactttaggaagtattaaaaatatttttaagatttgaaatatatttcatagaagtcctctattcaaaatcatattccacagatgttccccttcaaagggaaaacatttggggttctaaacagttatgaaagtaagtgatttttacatgattccagaataacacttgtattgaccaatttagacagataccagaccaattttgcatttaagaaattgttctgattatttacgtcaactcattagaattcagtgaaaagtaacagtcttttgtcacagagaatctgaaagtagcagcaaaagacagagggctcatgacaggnnnnnnnnnnnnnnnnnnnnnnnnnnnnnaaagagtaaaagtactgatgcttctgatactggatgtttagcttcttactgcaaaaacataagtaaaacagtcaactttaccatttccgtattctccatagattgaagaaatttataccacatatcgcatatgaccatctttccatcaaatcaatgtagagataatgtaaactg

SEQ ID NO: 240188 - DNA, 1361 bp, Homo Sapiens
  misc_feature (145)..(174): n is a, c, g, or t
  misc_feature (928)..(956): n is a, c, g, or t
ttggcctccctcttaactgagcctgccctggtcaagtactttgacaagcccagtgcaaaaaacatccggatgatgggcaagcccctcacctcggccagtgactatgaaatctcggccatgtccggctgacacgggcgccttcccnnnnnnnnnnnnnnnnnnnnnnnnnnnnnnttttttatgttcttctgtgttgagttttttctttctttcttttaaattaaatatttattagtacctggcttgaagcctagtgttttcataatgtaattcaatgaaaactgttggagaaatatttaaacacctcaatgtaggtacattacactcttgttgcggggaggggatttaccagaatacagtttatttcgtgaattctaaaaaacaaaaagatgaatctgtcagtgatatgtgtgtattataacttattaatcttgctgttgagctgtatacatggtttaaaaaatagtactgtttaatgctaagtaaggcagcagtcatttgtgtattcaggctttttaaataaaattagagctgtaaggaaaatgaaaagccacaaatgcaagactgttcttaaatggaaggcatagtcagcgagggtaaatcctataccactttaggaagtattaaaaatatttttaagatttgaaatatatttcatagaagtcctctattcaaaatcatattccacagatgttccccttcaaagggaaaacatttggggttctaaacagttatgaaagtaagtgatttttacatgattccagaataacacttgtattgaccaatttagacagataccagaccaattttgcatttaagaaattgttctgattatttacgtcaactcattagaattcagtgaaaagtaacagtcttttgtcacagagaatctgaaagtagcagcaaagacagagggctcatgacaggnnnnnnnnnnnnnnnnnnnnnnnnnnnnnaaagagtaaaagtactgatgcttctgatactggatgtttagcttcttactgcaaaaacataagtaaaacagtcaactttaccatttccgtattctccatagattgaagaaatttataccacatatcgcatatgaccatctttccatcaaatcaatgtagagataatgtaaactgaaaaaaaatctgcaagataatgtaactgaatgttttaaaaacagaacttgtcactttatataaaagaatagtatgctctatttcctgaatggatgtggaaatgaaagctagcgcacctgcactttgaattcttgcttcttttttattactgttatgattttgctttttacagatgttggacgattttttcttctgattgttgaattcataatcatggtctcatttcctttg

SEQ ID NO: 240189 - DNA, 2084 bp, Homo Sapiens
  misc_feature (551)..(559): n is a, c, g, or t
  misc_feature (806)..(830): n is a, c, g, or t
ttggcaagctattaggagctcctacacacatcctcagggattgtgtgcacattatgaagctggagctgttccctgaccaagcaacacagctaaaatggaatgttcagttttgcctgacgatccctcccagcgcgccgccgattgcacctcctgggacgcctgctgtggtgctgaaatccaaaatgctatttttttcttcaactaactcagaaaacatcggtccctccccaagaacctgttagtattatagttccaatcatttatgacatggcttcaggtacaacccagcaggcagacattcccagacagcagaactcttctgttgctgctcccatgatggtcagcaacattctgaagaggtttgcagagatgaatccaccacgacaaggtgaatgcacaatatttgcagctgttcgtgatttaatggctaatcttacactgccccctggtgggcgtccatagacactattgtttttaaaccaggaaggctgacagatgagacaacaaaaaaaatctgaattcagccttcagtttaaaaaaggaaaaggacnnnnnnnnnaaactttaagagctaaatattctaaactggcaaaaattttcagggtgcacttctttcatcaaaatgatcatccatcttttgtataatgaacttgtatagtgtgtttaaatgggacacatttcaaaggaaataaatcagtgtccgtttgccagtaataaatttaatattctgttttatactataaagttatgaaaatgccaaacttgtttatttaattgttttcttatgttttgggtgtaatagtccnnnnnnnnnnnnnnnnnnnnnnnnnaaggcaggtctgtcatttttgaatactgtaaaactgtgataaactttatattgaagctgtattttaatatgaccgctttgaatccttacatgaaatgttctgggagttgttataaacacaccccaaggaagcaatatttaataaaactaggtcaaaaacaaaacaaaacagtgacactcacttgtgtgtatataaactctagagacatcttaggccctcccttcatctttaacctggtggatggagccagttattaatttataataatacatgtctgaaatttgaccaaaaacatcttctttatgtcaaggttaatatattttcttcagacattcctaacttgactagtggttaacatttagcaccttggttggctttcaatatataggatttgggtgaaaaataaggaacttagtctttgagaagggacagtatgtggttcgtattgatcaaggatcccaaataatgcaatcattctcatctgttgaggatgtgggaacttttctgtcaggaaaatttagtttacagaatacttctgcatacaacattaattaggaaacaaagaactttaatgctgtacctctgcatgaagtttctgtgagctttctttatcttgcttaacttatcctcctttccttccccaccaaaattgggattgttctaaacaatttcaatttaattcattgtcaacaaaacgatagaatgttttgcttggaagaaacctggtccattcccctcattgtgaagaatcccgaatcctgggcctgtccagggtcaaatggagtttttggtattaatacatctctgcagggtttctttttggagcactgtgctgtctttcctagtcagtcagggacttttttaagcttcaaagaacatggtctgatgcaaaggtcttctaccgacttcatggtatttaggaaaaatttttaagtgataataccatgccgagttacctggtcactgtaatactggttctccattaaaatgtagatgctttgtctaattccacttcaagatgatttaattgagcttctataactatcaactatcaaattctagtttcaagtatctcactgtacctatatcatatctgttctcaactttgtttgattctccactcattttcaatcagagttgaagccttctttgcctttcttctttgtcttatttctgccttcatctcccacttctcacccaactctgccactgttcagagcagttgactaaacttttatccttcctttaacttaa

SEQ ID NO: 240190 - DNA, 1203 bp, Homo Sapiens
aactttgtacaaaaaagttggcttatgaatacaccgcgtttgatttttgccaagcatcagaaggaaagcgcccatctgaaaatcttggtcaggtactattcggggaaagaattgaaccttcaccatataagtttacgtttaataagaaggagacctgtaagcttgtttgtacaaaaacataccatacagagaaagctgaagacaaacaaaagttagaattcttgaaaaaaagcatgttattgaattatcaacatcactggattgtggataatatgcctgtaacgtggtgttacgatgttgaagatggtcagaggttctgtaatcctggatttcctattggctgttacattacagataaaggccatgcaaaagatgcctgtgttattagttcagatttccatgaaagagatacattttacatcttcaaccatgttgacatcaaaatatactatcatgttgttgaaactgggtccatgggagcaagattagtggctgctaaacttgaaccgaaaagcttcaaacatacccatatagataaaccagactgctcagggccccccatggacataagtaacaaggcttctggggagataaaaattgcctatacttactctgttagcttcgaggaagatgataagatcagatgggcgtctagatgggactatattctggagtctatgcctcatacccacattcagtggtttagcattatgaattccctggtcattgttctcttcttatctggaatggtagctatgattatgttacggacactgcacaaagatattgctagatataatcagatggactctacggaagatgcccaggaagaatttggctggaaacttgttcatggtgatatattccgtcctccaagaaaagggatgctgctatcagtctttctaggatccgggacacagattttaattatgacctttgtgactctatttttcgcttgcctgggatttttgtcacctgccaaccgaggagcgctgatgacgtgtgctgtggtcctgtgggtgctgctgggcacccctgcaggctatgttgctgccagattctataagtcctttggaggtgagaagtggaaaacaaatgttttattaacatcatttctttgtcctgggattgtatttgctgacttctttataatgaatctgatcctctggggagaaggatcttcagcagctattccttttggga

SEQ ID NO: 240191 - DNA, 961 bp, Homo Sapiens
gccaactttgtacaaaaaagttgggggaggattcgcattcagtctagttcctggttgccggctgaaataacctgaattcaagccaggaagaagcagcaatctgtcttctggattaaaactgaagatcaacctactttcaacttactaagaaaggggatcatggacattgaagcatatcttgaaagaattggctataagaagtctaggaacaaattggacttggaaacattaactgacattcttcaacaccagatccgagctgttccctttgagaaccttaacatccattgtggggatgccatggacttaggcttagaggccatttttgatcaagttgtgagaagaaatcggggtggatggtgtctccaggtcaatcatcttctgtactgggctctgaccactattggttttgagaccacgatgttgggagggtatgtttacagcactccagccaaaaaatacagcactggcatgattcaccttctcctgcaggtgaccattgatggcaggaactacattgtcgatgctgggtttggacgctcataccagatgtggcagcctctggagttaatttctgggaaggatcagcctcaggtgccttgtgtcttccgtttgacggaagagaatggattctggtatctagaccaaatcagaagggaacagtacattccaaatgaagaatttcttcattctgatctcctagaagacagcaaataccgaaaaatctactcctttactcttaagcctcgaacaattgaagattttgagtctatgaatacatacctgcagacatctccatcatctgtgtttactagtaaatcattttgttccttgcagaccccagatggggttcactgtttggtgggcttcaccctcacccataggagattcaattataggacatacagatctaatagagttcaagactctgagtgagggagaaatagaaaagtgctgaaaa

SEQ ID NO: 240192 - DNA, 1170 bp, Homo Sapiens
  misc_feature (201)..(212): n is a, c, g, or t
agtttatcaaaagaatttattaaaaaatattaccccctacatacatatttatttaaaagtataatttccgtaaacagccctccaacttcataaaaaaaacaatatctcagggaccctggggcaatcactgggcttctgaagctacatctttttggatggaacattccagcagtacaccctggggccatttaaaggaagggnnnnnnnnnnnntgtgataattaccaaaacaaattttaaaaagcacaaaacttttggaatgttaatggataactactattagtctcaaaattctaggcatttctataaaaccattggtcaaatgggactagtaagttaacgggaccaaggtttcaaagatcaatactgaaccttgataaataataagaggaaatgtaactccacaaaatgtttctgattaagtttgtgcccatgcaaaattaacataaatttcttaactcaagaatgaggaatattaaagcaatgtattttttcaacataaagcatgcattttctaatacattcttaaacatttcaaaattttaaaagttcgaattctaatcaagtagctattaatgcagtctaaccagtgccccaaatcagacatggaacacacacttgttactgtcacggaaataattcatgggagtgctactaaagatatatgagacttcaactcttgaccacatcactttttctccaaaactttagaacttgtttgcaaaagctaaatggtataaaacacattttaaaatgtcacccaattctcaaatgtcactgaaagaaaatgcaggaaaagtatgtattgtgtgattaatcagcttaggcttaactcaaaatactttcaatgttcacaaaattgtttctagagttctaatctaaaacaactaaggaggtgtgccttgatattctgaaacactgtcttaatactttattagaagaaatatgcttgaaatttctttaccataatctaaacgcaaactttaaaaatatataccagtagaataccatattacaaatgcccagaaatgtagaataaaggtcaaaaactgcttggaaatatttttatgattacactcataacaacaaagcttatgaactagcacaatcattatgggaccaacatttcaaaatattatggcctatcaaagcccaacttttttgtacaaag

SEQ ID NO: 240193 - DNA, 1255 bp, Homo Sapiens
  misc_feature (875)..(895): n is a, c, g, or t
aatcagacatggaacacacacttgttactgtcacggaaataattcatgggagtgctactaaagatatatgagacttcaactcttgaccacatcactttttctccaaaactttagaacttgtttgcaaaaactaaatggtataaaacacattttaaaatgtcacccaattctcaaatgtcactgaaagaaaatgcaggaaaagtatgtattgtgtgattaatcagcttaggcttaactcaaaatactttcaatgttcacaaaattgtttctagagttctaatctaaaacaactaaggaggtgtgccttgatattctgaaacactgtcttaatactttattagaagaaatatgcttgaaatttctttaccataatctaaacgcaaactttaaaaatatataccagtagaataccatattacaaatgcccagaaatgtagaataaaggtcaaaaactgcttggaaatatttttatgattacactcataacaacaaagcttatgaactagcacaatcattatgggaccaacatttcaaaatattttgcctatcaaagctagcaccaggaaaagtattatgcacataaaattgagaaacagataatctttactttagaaaagcacagttctacagagtattgctctggctaaatagtttagctagtaaaaaggtcagtttatctcactgaggcatgtatctccttggatctattaacttatctgaagaactttccaggtacttggtatgtactgaaaattcttactggaatcagtttatcatggagaaaacctactgttctttcaagatgccagttaaaataatggcacaataaacattttaaacttaccttttataaaaactgagatattctagtattnnnnnnnnnnnnnnnnnnnnncccaaatccctaatccctgaaaggctaaccaggactccattatttaaatttcccctctgtttctaaaacacaggttttactgtctagaattttgcaacatggctaatggctaccacctggtcaccaaattaacacttcattcattgtaaagcatttggggattttcaagtgtgaaaatatttcatcagtgattagataaacaacaactttacgccagtgccatgagtcttgtaattcttagccccaaggaagggaggataacagcctaacagcaattctcgaattggcacaaataatttatcgtctgcaacgggtagaagaagatactatgaaagaacataatttctacaaagtcaacac

SEQ ID NO: 240194 - DNA, 2412 bp, Homo Sapiens
  misc_feature (280)..(292): n is a, c, g, or t
  misc_feature (730)..(763): n is a, c, g, or t
tttctaatatctgtcctctgccacatatttttaaataatcttttccattagcagaaatgggcaacataagcgataaatcatgttaagtctgttgctacaaatttactttgccaaaatttttgttcagagggcagatatctgcattatttaaggacatttagtcatttgtagctagcacctgaagtaaactaccctcaatcaatttttatatttcagtctagtcactgtagacaaactatttaaatcttttataatttactttgtgtagttatttggcttnnnnnnnnnnnnngagggctcacattctatttaaattaagacaatatattttataaagcccaaattatagtacactaagagccagaggggtctagggaattgatctcagtgggtatacagcaaagacaaaatttggaggcagacgctaaaggaagttgagataaataaaattcaaatcagtgtattaacagaactacacaaatgtttacaacacagtaactacacttttcaattagttcattgtgaaaactgagcaaaatattttcaacaattttgggtcaacaaaaagtatggaatattttaagacaataaagagtgactggtgttgagagtactgaggctacacagaggtactgaaattcaaatctgaaaaatactgtgctggccacacaacactacaaatttctaatggaagaattccctttttgatccgcagcttaggtggtaagtnnnnnnnnnnnnnnnnnnnnnnnnnnnnnnnnnnattaacatttaggagtctcaaaactttgtattggctgtgagtctgggggaaaaaaacataaatgtcatactaccaattaaactttcaagagtcatcagattatttagctttaaaattttactaaatcagaccttaaactacacattcaaaatgctgaactagataatcacatattaaaaaggtaatgactcattatcagtgaattacccagtctgttctatcaaagtagtagttaaggtcaccaaataatgttggtgcctttggttctggaattataactagctgtactgtaggagcatcagcgcctaagttttaagccagtgggaatactctgctgcctggcttcacaggcactgaatacacttaaaatggtaagaaactgaatggatttaataagttttgaataatacaataaccaactgtatatttattatgaagtaaaagccaatctcctacccaatccctcttctatcagctgcacatttccaagtaagtgagataaaatgactcaatctaaaccacgtgaaggaatgtattaacataatccaacaaaaatgaaataaaacaatccagagttttgagtgttttttcacacttgtaataaactgaaaaaatatttcaattaaaacaaccatatgccacaaaaagccactcccatcatccacaatactaaagtccttatacaacactagataaatttttatataaaacagtagaaactagcataccattaattagaaacctcaaaatattcagaaaacagtatcaagtactcaagagaaagctcaagaagccaaaacctcaagaatccatacatcctggttgttaccctaaattgtaattaactacccacacatttaatcataatcaactttttcaaagatatacaaatcaatgcatctatttaaaaggactactctttatagttcagaactttacattaacttttatattctactcagcagggtgtctgtctgtactccaaattagctctcatgttccaggaaataaatacaaactcatatgccttgtgatcactgatggcctgcttatgtaattctagtccactaaatgttaattccatagaatatgctcttgattatgtaaaaactctaatttcttgatgaaatactgtaattctccaaaggttacaattttgtaaagatatgcaataactgagtatcactcccatgaaagacaaaaaaagtataattttgttccaagattaacttagtctcatgtatctctattaagtctttcaaggattccagagaatcttttcatatctccatttctggaaagtgaaatcagtatagaagtaatttgggaacttgaaaatggcattcatttttttcagcagatgccaaatttttgaccgacatggttctcacaattactttgttaccaacagtccagtcagttaacaggttgtaggaaaagattcgtttttgcagacactgctaagctgttcaaagagaagagagagagattaatttagtgattataaaatgcacaaatatttaaaatattttgaacacttcttgttggattatatcagaggtgtgactacattttaacaaaagtggactttttaagataagtctggtcaaagaagtgcccaaattttttgtcaacttttttgtacaaag

SEQ ID NO: 240195 - DNA, 1435 bp, Homo Sapiens
cagtatcaagtactcaagagaaagctcaagaagccaaaacctccaagaatccatacatcctggttgttaccctaaattgtaattaactacccacacatttaatcataatcaactttttcaaagatatacaaatcaatgcatctatttaaaaggactactctttatagttcagaactttacattaacttttatattctactcagcagggtgtctgtctgtactccaaattagctctcatgttccaggaaataaatacaaactcatatgccttgtgatcactgatggcctgcttatgtaattctagtccactaaatgttaattccatagaatatgctcttgattatgtaaaaactctaatttcttgatgaaatactgtaattctccaaaggttacaattttgtaaagatatgcaataactgagtatcactcccatgaaagacaaaaaaagtataattttgttccaagattaacttagtctcatgtatctctattaagtctttcaaggattccagagaatcttttcatatctccatttctggaaagtgaaatcagtatagaagtaatttgggaacttgaaaatggcattcatttttttcagcagatgccaaatttttgaccgacatggttctcacaattactttgttaccaacagtccagtcagttaacaggttgtaggaaaagattcgtttttgcagacactgctaagctgttcaaagagaagagagagagattaatttagtgattataaaatgcacaaatatttaaaatattttgaacacttcttgttggattatatcagaggtgtgactacattttaacaaaagtggactttttaagataagtctggtcaaagaagtgcagaaacagtaagtcaatatgatagaaatagtaggtcaaaatatgatgtgttagttcaattaatgtatgaactcctgccaccatcaaaagacaaatattaaaaagctacatctttagtctagttctgtattttaccagaggcacatttagaagaaaaacaaaagggtcacccaaatactaaattgttttcaaccattacagtaaatagagccaaacctagaaatttcaaaaacaatccattttatattccagaaatctcctttatccatgtgctaatcatccagaacacaattttctaaaaatagtaagacaacagtttcacattaatcataacttttttaattaacaagtagtgaatcggacactttaagatattgtttactacatactgaaataaacagatctgtttaaattcagaaacccaaacatttacagtaaaatgtgcttacacataaatatgaccaaatttatttaaagcccctattagatagatcctaagtacatgcaattaccatgtaaaaacaagaccatgaagttgatgtaaaaaatgacaaaatcactaagtcaccaaaactag

SEQ ID NO: 240196 - DNA, 1245 bp, Homo Sapiens
  misc_feature (336)..(372): n is a, c, g, or t
  misc_feature (429)..(484): n is a, c, g, or t
gagtgactgtccgagcatattttcagccccttgtcatgggtcccatcatcgccattacgctctgtctcatcctcagagatgcgagagtcatcagcatgaagatccacaacagcctcctgccccgccaggggtttgatgtcggggatgaggctctttagtgattcagtggtgatactgatggaaggtttcttctgtgtggtggctgtgctggctccccagcgtcgtttccgaccaggctggcccccctctgtgtcactgtttccagctggcacccccttggtagctgagacaacggagatcttcctcttgaatgatttgggcagcgagctctgtatnnnnnnnnnnnnnnnnnnnnnnnnnnnnnnnnnnnnnaccccacagagaggggggaaggaggttagatggggcagtcttagcttagcctccaannnnnnnnnnnnnnnnnnnnnnnnnnnnnnnnnnnnnnnnnnnnnnnnnnnnnnnncaaaacagaagcggcaaacggcaaaaacgaagcagaatcaatgcaagttagagaaaaaaataaaactaaacatcagagcagggaaaagtcatctactccgtatcacacctgtgtattagcttaaccagaaataagctggaagaggagttcagtagcctctcagccccctaaagatgttggtcataccccctctttcaccgtctgagtcgagaggacaccaagccaaacaaactgccaaccaaactgggtcatctagtcctcccaggtccttccttgctaactcgaggaaacaaggaaaaccaactttggatggcaacttcaacaaggtaaccctcctttcttcaatggccagactgatgcccactgacaatggctttgagatgcttggacagcagactgtcatgtcaagactgcccagacccccaccacactgtggaaaagggcagcaccagacccactggagatgaggctcttgagccaagtgctagcaaaaagaactcaaaggtgtctttgataaaggaaggtttttatgaagggcagattgtccccaaggagatccttagactttccagccaccgcagggagctccagcagagtcttactgtttcctctccaaccagggctcaagccttaggggctctgccaaagaccagaagacatctttgggacaagtctctaccccaaacactcagtgggtgaatgacgaaagactatggggggcgggggagaaaagtgagagccaacttttttgtacaaagttg

SEQ ID NO: 240197 - DNA, 772 bp, Homo Sapiens
  misc_feature (652)..(665): n is a, c, g, or t
tgaacaaaaggaaaggtggatataaagtggaacctgtgggaaagaggcaagggctgcaggacagaagagactgggaactgcaggggccctgggactcaggaggagatgctgattcagctcataggtgacccagtcctggccccggctgttcccaagagaaggctgtaagtacccagggaggtggtaagcaggatggaggaaaaatcagaggactggggcacctggctgttccccatctctggccaaccacctccttgcctaacctagctcttgcctctcagacttaatgggaaatgagagggagggtcgggctaagtcccaagagataggttaagggggtgtgtttggggggaaaaggatggccacttttccatttggtatgtatgtagggataggtgatgtgaaagacccttggctccagggtggtggagactgtgcctatccctctgtggccataaccccctggggccgagtggctggtacctgcagctctagtgttttcccagctagcggcgcccaccccggtcccgcacaggtgtgctccgactccggcttctgctgtggcgcttggtgtccctgcgatccctttccctgcctcgttctcggtccctttccctatcccgatctcggtcccccctgtcccgctcccttnnnnnnnnnnnnnncctgtccctctcccgactgtgctcccgacgtttctctcgctccagctgtcggttccgttcccgctcggcttccttctcccgctccttttgctcttcttctttgtaca

SEQ ID NO: 240198 - DNA, 1503 bp, Homo Sapiens
  misc_feature (1183)..(1232): n is a, c, g, or t
ttggagatggctcccctgcatgtctccggctgatcgctgccgctccgccaatacaatagagccagccactaccagcagcctggccctcttcctccttctccagagagaccaatccagccgaactcggggtttgcctgaggagaaggaggaagtgaccatggacacaagtgaaaacagacctgaaaatgatgttccagaacctcccatgcctattgcagaccaagtcagcaatgatgaccgcccggagggcagtgttgaagatgaggagaagaaagagagctcgctgcccaaatcattcaagaggaagatctccgttgtctcagctaccaagggggtgccagctggaaacagtgacacagaggggggccagcctggtcggaaacgacgctggggagccagcacagccaccacacagaagaaaccttccatcagtatcaccactgaatcactaaagagcctcatccccgacatcaaacccctggcggggcaggaggctgttgtggatcttcatgctgatgactctcgcatctctgaggatgagacagagcgtaatggcgatgatgggacccatgacaaggggctgaaaatatgccggacagtcactcaggtagtacctgcagagggccaggagaatgggcagagggaagaagaggaagaagagaaggaacctgaagcagaacctcctgtacctccccaggtgtcagtagaggtggccttgcccccacctgcagagcatgaagtaaagaaagtgactttaggagataccttaactcgacgttccattagccagcagaagtccggagtttccattaccattgatgacccagtccgaactgcccaggtgccctccccaccccggggcaagattagcaacattgtccatatctccaatttggtccgtcctttcactttaggccagctaaaggagttgttggggcgcacaggaaccttggtggaagaggccttctggattgacaagatcaaatctcattgctttgtaacgtactcaacagtagaggaagctgttgccacccgcacagctctgcacggggtcaaatggccccagtccaatcccaaattcctttgtgctgactatgccgagcaagatgagctggattatcaccgaggcctcttggtggaccgtccctctgaaactaagacagaggagcagggaataccacgnnnnnnnnnnnnnnnnnnnnnnnnnnnnnnnnnnnnnnnnnnnnnnnnnngggcagagcagcgggagcaggaacgggcagtgcgggaacagtgggcataacgggaacgggaaatggagcggcgggagcggactcgatcggagcgtgtatgggatcgggacaaagttcgagaagggctcgttcccgatcaaggtcccgtgaccgcccgtcgcatggaacgtgcgaagtctaaagaaaacaagagtgagaagaaagagaaagcccaggaggaaccacctgccaagctgctggatgaccttttcccaaagaccaaggcagctcc

SEQ ID NO: 240199 - DNA, 1135 bp, Homo Sapiens
  misc_feature (295)..(358): n is a, c, g, or t
  misc_feature (761)..(772): n is a, c, g, or t
ctttgtacaaaaaagttggtttttgacaactttatcatttgtgctgatcgaagaatagttgatgattgggccaatgatggatggggcctgaagaaagctgctgatggggctgctgagccaggcgttgtggggcagatgatcgaggcagctgaagagcgcccgtggctgtgggtagtctatattctaactgtagcccttcctgtgttcctggttatcctcttctgctgttctggaaagaaacagaccagtggtatggagtataagaaaactgatgcacctcaaccggatgtgaagnnnnnnnnnnnnnnnnnnnnnnnnnnnnnnnnnnnnnnnnnnnnnnnnnnnnnnnnnnnnnnnnaacttgaagagaaacagaaaagtgatgctgaagaagatggtggcactgtcagtcaagaggaggaagacagaaaacctaaagcagaggaggatgaaattttgaacagatcaccaagaaacagaaagccacgaagagagtgaaacaatcttaagagcttgatctgtgatttcttctccctcctcccctgcaagagtggtcctaggagaggacctggcacaccttaggttgacattcagaaaacttcaagacatcaccatcagcaggctccagttgaacactagtctgtgtaactttaaacatctagcagtaaatacttgcagttgtgatataaaggaccctgtttctgtagaaaagaaaacatttaacataatggttgtgaaatgtaacatgaagcaaactaacnnnnnnnnnnnnaacatctttgtttttaaaatagaatgatagaactttgccagtctttaagatcttggcttaatttaatgtattaatctgtttgtgcaaacataataccaccatttaaaaatgttagggagatgagttgcagtttttataatagattttttttaaagtttggtattgtaaaacattcacacctctgtccctcaaaattgataattacgtttaaagtgcagtcatttgtggttagaatcttgttttgtttgcttccattattgagttcctcctaaggaaattgaggagagggactgaatagaagcccaaattcatataaaagttgcgtttagttgtattaaaaaatagatatataagaaaaaattc

SEQ ID NO: 240200 - DNA, 1656 bp, Homo Sapiens
  misc_feature (804)..(864): n is a, c, g, or t
  misc_feature (1276)..(1287): n is a, c, g, or t
ctttgtacaaaaaagttggctcaatgacatgactctctcctgtaaatccttcacgtgaaattgaggacccagaagaccggaggcccgaggattgggatgaaagaccaaaaatcccagatccagaagctgtcaagccagatgactgggatgaagatgcccctgctaagattccagatgaagaggccacaaaacccgaaggctggttagatgatgagcctgagtacgtacctgatccagacgcagagaaacctgaggattgggatgaagacatggatggagaatgggaggctcctcagattgccaaccctagatgtgagtcagctcctggatgtggtgtctggcagcgacctgtgattgacaaccccaattataaaggcaaatggaagcctcctatgattgacaatcccagttaccagggaatctggaaacccaggaaaataccaaatccagatttctttgaagatctggaacctttcagaatgactccttttagtgctattggtttggagctgtggtccatgacctctgacattttttttgacaactttatcatttgtgctgatcgaagaatagttgatgattgggccaatgatggatggggcctgaagaaagctgctgatggggctgctgagccaggcgttgtggggcagatgatcgaggcagctgaagagcgcccgtggctgtgggtagtctatattctaactgtagcccttcctgtgttcctggttatcctcttctgctgttctggaaagaaacagaccagtggtatggagtataagaaaactgatgcacctcaaccggatnnnnnnnnnnnnnnnnnnnnnnnnnnnnnnnnnnnnnnnnnnnnnnnnnnnnnnnnnnnnngagaagagaaacttgaagagaaacagaaaagtgatgctgaagaagatggtggcactgtcagtcaagaggaggaagacagaaaacctaaagcagaggaggatgaaattttgaacagatcaccaagaaacagaaagccacaaagagagtgaaacaatcttaagagcttgatctgtgatttcttctccctcctcccctgcaagagtggtcctaggagaggacctggcacaccttaggttgacattcagaaaacttcaagacatcaccatcagcaggctccagttgaacactagtctgtgtaactttaaacatctagcagtaaatacttgcagttgtgatataaaggaccctgtttctgtagaaaagaaaacatttaacataatggttgtgaaatgtaacatgaagcaaactaacnnnnnnnnnnnnaacatctttgtttttaaaatagaatgatagaactttgccagtctttaagatcttggcttaatttaatgtattaatctgtttgtgcaaacataataccaccatttaaaaatgttagggagatgagttgcagtttttataatagattttttttaaagtttggtattgtaaaacattcacacctctgtccctcaaaattgataattacgtttaaagtgcagtcatttgtggttagaatcttgttttgtttgcttccattattgagttcctcctaagaaattgaggagagggactgaatagaagcccaaattcatataaaagttgcgtttaagttgtattaaaaatagatatataagaaaaaattctttcact

SEQ ID NO: 240201 - DNA, 2425 bp, Homo Sapiens
ttggggccgccggcctaggaggaggaaggagcctgcggcgtgcagtgtgaggggcgggacccggctgccggcggtgggtctagctgggggaggtcgggccatgctggtgggccagggcgcggggccgctggggcccgcggtggtcaccgccgcggtggtgctgctgctgagcggcgtggggccggcgcacggctcggaggacatcgtggtgggctgcggtggcttcgtcaagtcggacgtggagatcaactactctctcatcgagataaagctgtacaccaagcatgggactttgaaataccagacagactgtgcccctaataatggttactttatgatccctttgtatgataagggggatttcattctgaagattgagcctcccctagggtggagttttgagccgacgaccgtggagctccatgtggatggagtcagtgacatctgcacaaagggtggggacatcaactttgtcttcactgggttctctgtgaatggcaaggtcctcagcaaagggcagcccctgggtcctgcgggagttcaggtgtctctgagaaacactgggaccgaagcaaagatccagtccacagttacacagcctggcggaaagtttgcattttttaaagttctgcctggagattatgaaatcctcgcaactcatccaacctgggcgttgaaagaggcaagcaccacagtgcgtgtaaccaactccaatgccaatgcggccagtcccctcatagttgctggctacaatgtgtctggctctgtccgaagtgatggggagcccatgaaaggggtgaagtttcttctcttttcttctttagtaactaaagaggatgtcctgggctgcaatgtctcaccagtgcctgggttccagccccaagacgagagtctggtgtatttgtgctacacggtctccagagaagatggctcgttctctttctattccttgccaagtgggggctacactgtgattccgttctatcgaggggagaggattacctttgatgtggcgccttccagacttgacttcacagtggagcatgacagcttgaaaatcgagcccgtgttccacgtcatgggattctccgtcaccgggagggtcttgaacggacccgaaggagatggtgttccagaagcagtagtcaccctgaataaccaaatcaaagttaaaacaaaagctgatggctcattccgccttgagaacataaccacagggacatacaccatccatgctcagaaagagcacctctactttgaaacggtcaccatcaaaattgcaccgaacacacctcagctggctgacattattgcaacagggttcagtgtctgtggtcagatatcaatcattcgcttccccgacaccgtcaagcagatgaataaatacaaagttgtcctgtcatctcaagacaaggacaagtctttggtcaccgtggagacagatgctcatggatcattttgttttaaagcaaaaccagggacttacaaagtgcaggtgatggttcctgaggcagaaaccagagcagggctgacgttgaaaccccagacatttcctcttactgtgaccaacaggcccatgatggatgtggcctttgtacagttcttggcatcagtttctgggaaagtctcttgtttggacacctgtggtgacttgctggtgactctacagtccctgagccgccagggtgagaagcggagcctccagctctccggcaaggtcaacgccatgactttcacctttgacaacgtgctccctggaaaatacaaaataagcatcatgcatgaggattggtgctggaagaacaagagcctggaggtggaagtgctggaggatgacatgtctgcagttgagttcaggcagacgggctacatgctgagatgttccctgtctcacgccatcactctggaattttatcaggatggaaatgggcgtgagaatgtggggatttataacctctccaaaggagtcaaccgattctgcctgtccaagcctggtgtgtacaaagtgacccctcgctcctgccaccggtttgagcaagcgttctacacctatgacacgtcttcacctagtatcttgacattgacagccattcgccaccatgtccttggaactatcaccaccgacaaaatgatggatgtcactgtgactatcaagtcttccatcgacagtgaacccgccttggtcttaggccctctgaagtctgtgcaggagctgcggagggagcagcagctggctgagatcgaggcccgcaggcaggagagggagaaaaacggcaatgaggaaggtgaagaaagaatgaccaagcctctcgtgcaggagatggtagatgagttacaaggccccttctcgtatgatttctcttactgggcgcggtctggagagaaaatcactgttacaccgtcatctaaagagctgctcttttat

SEQ ID NO: 240202 - DNA, 1324 bp, Homo Sapiens
ttggctccttccctggggccagctgccccgtcctggacctccgccgcccacccagtgacctctacctcccgcccccggaccatggtgccccggcccgtggctccccccacagcgaagggggcaagaggtctccagagccaaacaagacgtcggtcttgggtggtggtgaggacggtattgaacctgtgtccccaccggagggcatgacggagccagggcactcccggagtgctgtgtacccgctgctgtaccgggatggggaacagacggagcccagcaggatgggctccaagtctccaggcaacaccagccagccgccagccttcttcagcaagctgaccgagagcaactccgccatggtcaagtccaagaagcaagagatcaacaagaagctgaacacccacaaccggaatgagcctgaatacaatatcagccagcctgggacggagatcttcaatatgcccgccatcaccggaacaggccttatgacctatagaagccaggcggtgcaggaacatgccagcaccaacatggggctggaggccataattagaaaggcactcatgggtaaatatgaccagtgggaagagtccccgccgctcagcgccaatgcttttaaccctctgaatgccagtgccagcctgcccgctgctatgcccataaccgctgctgacggacggagtgaccacacactcacctcgccaggtggcggcgggaaggccaaggtctctggcagacccagcagccgaaaagccaagtccccggccccgggcctggcatctggggaccggccaccctctgtctcctcagtgcactcggagggagactgcaaccgccggacgccgctcaccaaccgcgtgtgggaggacaggccctcgtccgcaggttccacgccattcccctacaaccccctgatcatgcggctgcaggcgggtgtcatggcttccccacccccaccgggcctccccgcgggcagcgggcccctcgctggcccccaccacgcctgggacgaggagcccaagccactgctctgctcgcagtacgagacactctccgacagcgagtgactcagaacagggcggggggaggcgggcggtgtcaggtcccagcgagccacaggaacggccctgcaggagcagggcggctgccgactcccccaaccaaggaaggagcccctgagtccgcctgcgcctccatccatctgtccgtccagagccggcatccttgcctgtctaaagccttaactaagactcccgccccgggctggccctgtgcagaccttactcaagggatgtttacctggtgctcgggaaaggaagggaaa

SEQ ID NO: 240203 - DNA, 1148 bp, Homo Sapiens
ttggctcaaagtaaacccttttccatccaggaactggaactccgttctctgggttaccacggcagcagctacagccccgaaggggtggagcccgtcagccctgtgagctcacccagtctgacccacgacaaggggctccccaagcacctggaagagctcgacaagagccacctggagggggagctgcggcccaagcagccaggccccgtgaagcttggcggggaggccgcccacctcccacacctgcggccgctgcctgagagccagccctcgtccagcccgctgctccagaccgccccaggggtcaaaggtcaccagcgggtggtcaccctggcccagcacatcagtgagggcatcacacaggactacacccggcaccacccacagcagctcagcgcacccctgcccgcccccctctactccttccctggggccagctgccccgtcctggacctccgccgcccacccagtgacctctacctcccgcccccggaccatggtgccccggcccgtggctccccccacagcgaagggggcaagaggtctccagagccaaacaagacgtcggtcttgggtggtggtgaggacggtattgaacctgtgtccccaccggagggcatgacggagccagggcactcccggagtgctgtgtacccgctgctgtaccgggatggggaacagacggagcccagcaggatgggctccaagtctccaggcaacaccagccagccgccagccttcttcagcaagctgaccgagagcaactccgccatggtcaagtccaagaagcaagagatcaacaagaagctgaacacccacaaccggaatgagcctgaatacaatatcagccagcctgggacggagatcttcaatatgcccgccatcaccggaacaggtggcggcgggaaggccaaggtctctggcagacccagcagccgaaaagccaagtccccggccccgggcctggcatctggggaccggccaccctctgtctcctcagtgcactcggagggagactgcaaccgccggacgccgctcaccaaccgcgtgtgggaggacaggccctcgtccgcaggttccacgccattcccctacaaccccctgatcatgcggctgcaggcgggtgtcatggcttccccacccccacc

SEQ ID NO: 240204 - DNA, 1123 bp, Homo Sapiens
taccagaaacagcagttcctttttgggccaaacactagctccaacttcaggaaaaacagtggctcctcctgcagacacatcactcatataaaacagccatgtagcaattctatttcctgtccccagctctttgaaagcatctggctcatctttccgtgcaaaagtcaaaatggggttcatactgtcctccaactccataatttgctacctgtaattcctctgctgtggaaacatctagtcctgttagatcttgtattctcatattaattcgagacaccacaggattttcatagccagagagccaggcactaagaataagaggaatattagttttattgataatgtttcattacatggagactaatagctgttatttttaaagccataatatttaatatataggacaataaacctttactgaaggcatttagttcattttcttgcttagtatcatctttattaatggatattgtaattttttttaaatgtcacattctactgttagaggttgggaaggaaaaaactaatcaaatttattataatgcttatatgaaaacagttggattaatgtaaggaggctatattgaaagccacctacattgagaacttcaaaaaattctttaaaaaaccataccaaacaaaacaacgttctttccaggtaaggtataggaactgactatggtggaagtcatggggtctttagtctgagctacataatgctaatattttataagaaaaaaattctgcttactgcttaagttttgaaaagttacccaaacacacctactgaaggatggacaataacaggtgttggtaaggatgtgaagaaactggagccctcatacattgctaatgggaatgtaaaaggggcagccactttggaaaacagtttggtagttgctcaaaatgctaaacacagttatcaaatgacccagcaatttacttctaggtatatatccaagagaaattaaatcttatgtccatacaataacttgtacagaattttttatggcatcattacatataatagccaaaaagtagaaactacccaaatatccatcaatttatcaatggatacataaaacgtgatagatctataaactggaatattattgtgtcccaa

SEQ ID NO: 240205 - DNA, 603 bp, Homo Sapiens
ttggcctgggacaagcgtcatgtggcatctgcacctcagaagcctgctgctgttgctgtggtgacgagatgggggatgattgtaactgcccttgtgatatggactgtggcatcatggatgcctgttgtgaatcatcagactgcttggaaatctgtatggaatgctgtggaatttgttttccttcataaatatttatcttttgtttgtgttaaaactggagagtgtttaaaaatttccttttgggggggagaaaagcacattgtaagattctcatgaaacaacatggaatttgcactgttaactcattattgtaagtaatctctgaaagcctttttactttaaccaaatctacatggtttaatatgtgaaattttaactactttaactagttttataaatttcttaatatgttacaataacttagggacattttgacaccccccttcccaaatgttaaatgccttctcctttttaccgatatttctgtttcttttaaccgttctcaggagcactttgctccaaatatattatttttcagtgtgtatttaaacgaggcagtttattttgatatgtatctattcatgattgaaaggaagcagtctt

SEQ ID NO: 240206 - DNA, 2016 bp, Homo Sapiens
ttggtgaacaccattgtcatcattatatctttgtgtgtaattgcaagcattcttatttaagatttttattaaaacatttttcctgaaaaccactttataaaataatgaatgtatgtgtgattatcatcaaaactgtagcacacctttcatggcatacccctcaaaggtgcattacccgttgtttttttcttagctgaaaaaccttgcttctgtgtcgttcttcaggtgcaggcaaccatagatattttatgggctacctattcttcttgctttttatgatctgctggatgatttatggttgtatatcttactggggactccactgtgagaccacttacaccaaggatggattttggacatacattactcagattgccacgtgttcaccttggatgttttggatgttcctgaacagtgttttccacttcatgtgggtggctgtattactcatgtgtcagatgtaccagatatcatgtttaggtattactacaaatgaaagaatgaatgccaggagatacaagcactttaaagtcacaacaacgtctattgaaagcccattcaaccatggatgtgtaagaaatattatagacttctttgaatttcgatgctgtggcctctttcgtcctgttatcgtggactggaccaggcagtatacaatagaatatgaccaaatatcaggatctgggtaccagctggtgtagcgacatcttatcctatgaagcatattgctgagtggtgcctgaaaattgtgtctgtccgtgtctttctcacactcgaatccacatcctttgaacaagagcatgctatgtgtagggctaatggtgaattttacagtctttttttcaacacttttattaacaaaagtaaacatggacagaacacactgccatttctgggaagagtaaagatgataaaaaataattttaatggttcttaatgtggaaattcacaacatactcaacttttgggttttgttctcacagtatttttcacaaaaaaagggtaaacttattctattgacagacatggtgtactgatcagaaatgttcagttttaactaaaactaaatttatgttatttggctaaatgttatgatgcagtctagtacgagtattgcatctaattccaggagcattgttttaagttgattgactagttattatgtacatttcagaatgtacacataaatactgtgatgaaaatcatgtgattgggatctactgtgatgttgtcttcaaaggcaggagaaaataatgttcacaataaaatgtgctaacaatgttttgtttctatcagctgttgcaatgctgatatatttctagttcagtgaaataatttgtagtaaccttactctgaggttttacggtctgataatgaagcacttgcatgagtatagtaagtcatgtttttttgttcaaatttaaaagccctgctaattgcatgacacaccacatagaatgtatactagcagatactatccagtgaagcataaattagaatttaatttgatgttcaaaaacagttccatttttaagggttaaggtggtattttcaagaaaaggcagaacaaataatgcaaaattctcagtaatagtgatacatggatatacttccttttaaattctcagctgcaaaataattgtagacaaaataatggcatttaactaaagatggagcatgatctgtgtacatagcacatgtgaataaaagaaaagctgacagtatattctggtttcaataaaatgacctatcagaaagtagaatttcatccccaagagtatttcagtttatccaatattgagtaagttctgaaacagttttagaaaaaattttctttttgttaaatgtgatgcactgatcaatttttgtcacagcattttcataccttcatggtggactactagtcactgcttccataaatattgtttacagggtgagatttggtttattcatcttaagtgctgtagcaaactgtggttcgagcaacctgtgggaaatctgtgagagggaatgggg

SEQ ID NO: 240207 - DNA, 1020 bp, Homo Sapiens
taaacaaaagttaaaaatacgactaccatatgatccactggtaatgatgtataccactactgtgcatatatgcataaacaaatatatctatacgtcaaagagagatgtacactcctatgtttattgaagcactattcataatagctaagaaatcagtctaagtgtccattatcagatgaatgaagaaagaaaacatggcatatatacacaatggaatactactcagccatgaaaaataaacctgtcattcacagcaacatgaatgagcttgaaagacattaagtgaaataagctagacacagaaagagaaatactccatgtttctactcatatgcaagcataaaaggttgagaatggtggtaaccagaggctgggaaggacagcagagaggcagatagagattggttaacaaatacaaaattacagcaagtaagattccatttgaataagttgtagtgttctgtggcactgcagaatgagtacaattggcaataatacattttatattttcaaatagctagaaaagcagactgtgaatgtttctaaacacaaagaaatgataaatgattgagatggatatgctaattaccctgatttgatcattactcttagcacacatgtattgaaatatcacaccaaaccccataaacattgtcaattaaaaacaataaaagaaacaaaaagaataccaaaagagaaattccaaaatattctgattaaacatattaattactacgactggactcaatccatggtgacaactacctgcatatacatatgcaggttcacctgttaaaattccagtcactttaggtatagtcagccttcacacaatcttctgtaagactgaaaaatgagattccttctctgtgtttattttctgagtttatcataatcttttaacttactttagctacatgtcttatttcatttttggttccaaattgacctctagaaaattgttgaggtgaattttgaactatttactctctctaaagagcagtaaagaagctgagccaa

SEQ ID NO: 240208 - DNA, 1321 bp, Homo Sapiens
attgatgagcaatgcttttcccataaagccaactttgtacaaaaaagttggctgttcgacagtcagccgcatcttcttttgcgtcgccagccgagccacatcgctcagacaccatggggaaggtgaaggtcggagtcaacggatttggtcgtattgggcgcctggtcaccagggctgcttttaactctggtaaagtggatattgttgccatcaatgaccccttcattgacctcaactacatggtttacatgttccaatatgattccacccatggcaaattccatggcaccgtcaaggctgagaacgggaagcttgtcatcaatggaaatcccatcaccatcttccaggagcgagatccctccaaaatcaagtggggcgatgctggcgctgagtacgtcgtggagtccactggcgtcttcaccaccatggagaaggctggggctcatttgcaggggggagccaaaagggtcatcatctctgccccctctgctgatgcccccatgttcgtcatgggtgtgaaccatgagaagtatgacaacagcctcaagatcatcagcaatgcctcctgcaccaccaactgcttagcacccctggccaaggtcatccatgacaactttggtatcgtggaaggactcatgaccacagtccatgccatcactgccacccagaagactgtggatggcccctccgggaaactgtggcgtgatggccgcggggctctccagaacatcatccctgcctctactggcgctgccaaggctgtgggcaaggtcatccctgagctgaacgggaagctcactggcatggccttccgtgtccccactgccaacgtgtcagtggtggacctgacctgccgtctagaaaaacctgccaaatatgatgacatcaagaagtggtgaagcaggcgtcggagggccccctcaagggcatcctgggctacactgagcaccaggtggtctcctctgacttcaacagcgacacccactcctccacctttgacgctggggctggcattgccctcaacgaccactttgtcaagctcatttcctggtatgacaacgaatttggctacagcaacagggtggtggacctcatggcccacatggcctccaaggagtaagacccctggaccaccagccccagcaagagcacaagaggaagagagagaccctcactgctggggagtccctgccacactcagtcccccaccacactgaatctcccctcctcacagttgccatgtagaccccttgaagaggggaggggcctagggagccgcaccttgtcatgtaccatcaataaagtaccctgtgctcaaccc

SEQ ID NO: 240209 - DNA, 1266 bp, Homo Sapiens
  misc_feature (405)..(425): n is a, c, g, or t
ttgggttcgacagtcagccgcatcttcttttgcgtcgccagccgagccacatcgctcagacaccatggggaaggtgaaggtcggagtcaacggatttggtcgtattgggcgcctggtcaccagggctgcttttaactctggtaaagtggatattgttgccatcaatgaccccttcattgacctcaactacatggtttacatgttccaatatgattccacccatggcaaattccatggcaccgtcaaggctgagaacgggaagcttgtcatcaatggaaatcccatcaccatcttccaggagtgagtggaagacagaatggaagaaatgtgctttggggaggcaactaggatggtgtggctcccttgggtatatggtaaccttgtgtccctcaatatggtcctgtnnnnnnnnnnnnnnnnnnnnnataggcgagatccctccaaaatcaagtggggcgatgctggcgctgagtacgtcgtggagtccactggcgtcttcaccaccatggagaaggctggggtgagtgcaggagggcccgcgggaggggaagctgactcagccctgcaaaggcaggacccgggttcataactgtctgcttctctgctgtaggctcatttgcaggggggagccaaaagggtcatcatctctgccccctctgctgatgcccccatgttcgtcatgggtgtgaaccatgagaagtatgacaacagcctcaagatcatcagcaatgcctcctgcaccaccaactgcttagcacccctggccaggtcatccatgacaactttggtatcgtggaaggactcatggtatgagagctggggaatgggactgaggctcccacctttctcatccaagactggctcctccctgccggggctgcgtgcaaccctggggttgggggttctggggactggctttcccataatttcctttcaaggtggggagggaggtaaaggggtgatgtggggagtacgctgcagggcctcactccttttgcagaccacagtccatgccatcactgccacccagaaaactgtggatggcccctccgggaaactgtggcgtgatggccgcggggttctccaaaacatcatccctgcctctactggcgctgccaaggatgtggacaaggtcatccctgagctgaacgggaagctcactggcatggccttccgtgtccccactgccaacgtgtcagtggtggacctgacctgccgtctataaaaacctgccaaatatgatgacatcaagaaggtggtgaaaca

SEQ ID NO: 240210 - DNA, 980 bp, Homo Sapiens
ttgggtcacgtgtcagggggaagctggaaggcgtcgttctcctttcccagctctcctgcctgtccgccatgttttcaggccgggtctggcttggtcttcccccgtaaggaaatggccggggagctccaggggacccaggcgccgtcgcttcggcggagcctgggctgaccagccaggacagcggggtaaacccgaacaattctgcgcgaggtagggaggccatggcgtccggcagtaactggctctccggggtgaatgtcgtgctggtgatggcctacgggagcctggtgtttgtactgctatttatttttgtgaagaggcaaatcatgcgctttgcaatgaaatctcgaaggggacctcatgtccctgtgggacacaatgcccccaaggacttgaaagaggagattgatattcgactctccagggttcaggatatcaagtatgagccccagctccttgcagatgatgatgctagactactacaactggaaacccagggaaatcaaagttgctacaactatctgtataggatgaaagctctggatgccattcgtacctctgagatcccatttcattctgaaggccggcatccccgttccttaatgggcaagaatttccgctcctacctgctggatctgcgaaacactagtacgcctttcaagggtgtacgcaaagcactcattgatacccttttggatggctatgaaacagcccgctatgggacaggggtctttggccagaatgagtacctacgctatcaggaggccctgagtgagctggccactgcggttaaagcacgaattgggagctctcagcgacatcaccagtcagcagccaaagacctaactcagtcccctgaggtctccccaacaaccatccaggtgacatacctcccctccagtcagaagagtaaacgtgccaagcacttccttgaattgaagagctttaaggataactataacacattggagagtactctg

SEQ ID NO: 240211 - DNA, 823 bp, Homo Sapiens
ttggcctccgtcccggccgttagcccagccaagcccagccaagcccagccaagccccgccgatcgcgggcaccggagccagccccgcagcggagggaccacagagcaccagcctgcatggaacttccttcctcactcagcttcccacgttgccagctgggacaggggagatggagtaattttgctgtggaaagacttcacgtcttgccgaatgaaagtcccgcctgtctgtcacgctgatgcccgtgcagctgtctgagcacccggaatggaatgagtctatgcactccctccggatcagtgtggggggccttcctgtgctggcgtccatgaccaaggccgcggacccccgcttccgcccccgctggaaggtgatcctgacgttctttgtgggtgctgccatcctctggctgctctgctcccaccgcccggcccccggcaggccccccacccacaatgcacacaactggaggctcggccaggcgcccgccaactggtacaatgacacctaccccctgtctcccccacaaaggacaccggctgggattcggtatcgaatcgcagttatcgcagacctggacacagagtcaagggcccaagaggaaaacacctggttcagttacctgaaaaagggctacctgaccctgtcagacagtggggacaaggtggccgtggaatgggacaaagaccatgggggtcctggagtcccacctggcggagaagggagaggcatggagctatccgacctgattgttttcaatgggaaactctactccgtggatgaccggacgggggtcgtctaccagatcgaaagcagcaaagcc

SEQ ID NO: 240212 - DNA, 1122 bp, Homo Sapiens
ctttgtacaaaaaagttgggactctggatcgttaaggaaatgattttcaatgccgagagagttggaggcctcgaggaagagcgggaatccgtgggcccactgcgggaggacttcagtctgagtagcagtgctctcattggcctgctggtcatcgcagtggccattgccacggtcatcgtcatcagcctggtgatgctgaggaagaggcagtatggcaccatcagccacgggatcgtggaggttgatccaatgctcaccccagaagagcgtcacctgaacaagatgcagaaccatggctatgagaaccccacctacaaatacctggagcagatgcagatttaggtggcagggagcgcggcagccctggcggagggatgcaggtgggccggaagatcccacgattccgatcgactgccaagcagcagccgctgccaggggctgcgtctgacatcctgacctcctggactgtaggactatataaagtactactgtagaactgcaatttccattcttttaaatgggtgaaaaatggtaatataacaatatatgatatataaaccttaaatgaaaaaaaatgatctattgcagatatttgatgtagttttcttttttaaattaatcagaaaccccacttccattgtattgtctgacacatgctctcaatatataataaatgggaaatgtcgattttcaataatagacttatatgcaggctgtcgttccggttatgttgtgtaagtcaactcttcagcctcattcactgtcctggcttttatttaaagaaaaaaaaggcagtattccctttttaaatgagctttcaggaagttgctgagaaatggggtggaatagggaactgtaatggccactgaagcacgtgagagaccctcgcaaaatgatgtgaaaggaccagtttcttgaagtccagtgtttccacggctggatacctgtgtgtctccataaaagtcctgtcaccaaggacgttaaaggcattttattccagcgtcttctagagagcttagtgtatacagatgagggtgtccgctgctgctttccttcggaatccagtgcttccacagagattagcctgtagcttatatttgacattcttcactgtctgttgtt

SEQ ID NO: 240213 - DNA, 1344 bp, Homo Sapiens
  misc_feature (201)..(243): n is a, c, g, or t
tacaaaaaagttggcacaaagagccggataggaggtgtgtgagaatcaccagcactggcacacggtagtcaaagaggcatgtctgactcagggaatgaccttatatagctacggcatgctgctcccatgtggggtagaccagttccatggcactgaatatgtgtgctgccctcagacaaagattattggatctgtgtcaannnnnnnnnnnnnnnnnnnnnnnnnnnnnnnnnnnnnnnnnnntgaagaggaagactatgatgtttataaaagtgaatttcctactgaagcagatctggaagacttcacagaagcagctgtggatgaggatgatgaggatgaggaagaaggggaggaagtggtggaggaccgagattactactatgacaccttcaaaggagatgactacaatgaggagaatcctactgaacccggcagcgacggcaccatgtcagacaaggaaattactcatgatgtcaaagctgtctgctcccaggaggcgatgacggggccctgccgggccgtgatgcctcgttggtacttcgacctctccaagggaaagtgcgtgcgctttatatatggtggctgcggcggcaacaggaacaattttgagtctgaggattattgtatggctgtgtgtaaagcgatgattcctccaactcctctgccaaccaatgatgttgatgtgtatttcgagacctctgcagatgataatgagcatgctcgcttccagaaggctaaggagcagctggagattcggcaccgcaaccgaatggacagggtaaagaaggaatgggaagaggcagagcttcaagctaagaacctccccaaagcagagaggcagactctgattcagcacttccaagccatggttaaagctttagagaaggaagcagccagtgagaagcagcagctggtggagacccacctggcccgagtggaagctatgctgaatgaccgccgtcggatggctctggagaactacctggctgccttgcagtctgacccgccacggcctcatcgcattctccaggccttacggcgttatgtccgtgctgagaacaaagatcgcttacataccatccgtcattaccagcatgtgttggctgttgacccagaaaaggcggcccagatgaaatcccaggtgatgacacatctccacgtgattgaagaaaggaggaaccaaagcctctctctgctctacaaagtaccttatgtagcccaagaaattcaagaggaaattgatgagctccttcaggagcagcgtgcagatatggaccagtttcactgcctcaatctcagagatctctgtggacgtcctgggtgagctctgagggagagtga

SEQ ID NO: 240214 - DNA, 1002 bp, Homo Sapiens
cccttgcaaattccagtttacaggtaacttggtcagagaaaaatatgggtcaacgaaagtaagatctcagctctcccataagctattgctctcttcttctctttcccccttctcttaatgttagctgcctgttacagagagagatcatcaagactgtgtggacatgctagctgaattgacagggtgggttccagtgtcctgtgaagaaccagcaaggatgctttttataattccaaccatggcttcacatcactgaggtaacaagacttaatgttaagggtaaagacaccacgccaccctagtcagtgacatgtactccactttccaggaagacctgggccaaatgaccaagctttgcaaaagaaacctgggaagagcgttggaaaaagcagactctgagttggcttgagtctcctcgtgcatagaagcattcactcatccatgcagatggcaacaaggcaggacactcagaaagcataagatcaaggtactgctcttatctgcacctttcattcaagctcccctcaagtgctccaaaagaacagagctttgggtattgcttcattaagaacacagtaactgcagtttaaaagccattgcattctttagggtcagtttattataacttatcctaccagaaagaatcacagtttaaggccatttatcatgtgcactacgtagtaaacaaaaccttgtccccagctccaccaagccactcccaagggtggactgtgaatgtgacacttccagactcaccagagattagaaaaaacatttctattagggtcttaacctagcccctttggtttcctccctagaaaagagctgcttagaaaacagatgtcactggaaatgacaaaaggaacaacagtattttctatacattaaaagcaaagggatcattggctagcactagcatttattctgtgtgatagggaagccagccctctaatttggctctctggctgggcacatggcaatggctaggggcctgggcacacc

SEQ ID NO: 240215 - DNA, 973 bp, Homo Sapiens
ttctcattcaggcaaaaagggaaaccgggtaagagagagtgacattttaacactattataaaatgtttaagcttttatttacacttccccttctctcagtttcccaggttatatgaacattacagcaatagaaaggggttatcatcacagcatccccttgcaaattccagtttacaggtaacttggtcaggggaaaaatatgggtcaacgaagtaagatctcagctctcccataagctattgctctcttcttctctttcccccttctcttaatgttagctgcctgttacagagagggatcatcaagactgtgtggacatgctagctgaattgacagggtgggttccagtgtcctgtgaagaaccagcaaggatgctttttataattccaaccattggcttcacatcactgaggtaacaagacttaatgttaagggtaaagacaccacgccaccctagtcagtgacatgtactccactttccaggaagacctgggccaaatgaccaagctttgcaaaagaaacctgggaagagcgttggaaaaagcagactctgagttggcttgagtctcctcgtgcatagaagcattcactcatccatgcagatggcaacaaggcaggacactcagaaagcataagatcaaggtactgctcttatctgcacctttcattcaagctcccctcaagtgctccaaaagaacagagctttgggtattgcttcattaagaacacagtaactgcagtttaaaagccattgcattctttagggtcagtttattataacttatcctaccagaaagaatcacagtttaaggccatttatcatgtgcactatgtagtaaacaaaaccttgtccccagctccaccaagccactcccaagggtggactgtgaatgtgacacttccagactcaccagagattagaaaaaacatttctattagggtcttaacctagccccaacttttttgtacaaag

SEQ ID NO: 240216 - DNA, 877 bp, Homo Sapiens
gcagagagattctctgtaaaatgagatccatgtacaaaactaggcaacagatataaaagtttcctttcatatttttcatccatcaagaaaagaaatcatgtgacaagaaataaaaccaaaatgtggctctttcagaagaataacatgtctgtggtcaactatgacttctaatgagatagttcatatttcatctttatatggatgtatatagttttaatacttcttagctactgtagcatgttggttcagatgaagaaaaaataaactctattgtttggactagataatctagaaaccatcaattatgcatgtctttataatgcgacatcaaaatttacccaggagatgacactgattggccagcagtatgcatttatcctgaacattgcatagaaagttccctttaaaaaattcattatcttcttcacaagctaaagtatgagcctctaatttggctctcttatttaaagaaatagtttaaatgatcaatttagaagcttaaaagtatctttgaaactaaagttgcttttcttaaaatgaatgctgatttaacagttcatagacttggagcattatcactaggagacggaggcactactgccactaacgagaaacagcatcaccagaggataattacatggtacaaaatgcccaggggcctgaaactcactattaatataattttggcagcagcatcatttgaaagttaaccatttattacatagtattaacacaccagcttcaaagaagtgcactccctttaggacactcgggagctacaaatgtattgtgattgcataattcgtattgcacagttttataaaaaacataaatactgttttattaggagttttaaatccaacttttttgtacaaag

SEQ ID NO: 240217 - DNA, 1312 bp, Homo Sapiens
  misc_feature (174)..(188): n is a, c, g, or t
gtttaaactacaggttcccctcagtccccccgtttgcaatataaacaattcttctccacaggaacttacattttgaaaacatttaggccattatactttctaagccacattactacagttcctaaaacttatgaaaaaaaggtgtatagtttacttgtactttcttgagtcaannnnnnnnnnnnnnngaagatggctgacctcaaatcttatatcctaaatattaacgatatcccccaagttaatatacagaaaaacatgattctaaaataaatacacaggctttttaaaaaaaacttaattagggcctgtctagtgatgccctgggccggtgctgcactgctttagggaagcccctggctggatctatgtttcctatagcacctctaggcactgggaaggagcctggaggagagctctggcttctaatgacccacgtggcccccagtgaaaaattttttagaggctccccaaagaagtctcatccagaccttaagggaaataaaatgaatgcatgaaataaataaataatttaaccacaactaaatttcatgttctttggtgtaattcaaggatgtctagaaacaaaataatctgattgcattatacagtccatgatgattcaattgcccaaatagccaggaattgaagatttatctgactcactttaacaataaggtactgacacactactgcaatacatttttttaaattcaatattatttaaaatacttgatgcaaattcaaatccagtggttgactaaaggcaattaagttaaagggcctcccatatttaaagtatctagatacaagagacttttttccattctacactcttttgccctcatgatttaataagtacagtaattaaacatctgggtactgattcatagcagattaaaaggaaaaaagcatcctctgagattaactctctcagattataaacagcagtggaagctctaccacaatggcaatcacccagttactataaagcaggtttcaaaaacatgccgccaagtgaaacaatgttcctactgtctgccatcctatgctgccttcaaatgtttattgtagggtcatataagaaagacagggtcaccaaacccaagtgtttgggatctgtaatggtctttctagtaagcgttttattaaattatgattcccttctcctgtaattcaaaagcacaagctaaatttaaaaaatattttagaaagtattaaatttctggttgagaattataacaacattgaaacttaaaagaaaaaatacatctgataataaggaaataaggaatagggaaacatactccaa

SEQ ID NO: 240218 - DNA, 1144 bp, Homo Sapiens
ttggcttcaagggccaggaggcaggagccctggtgatggaagtggaccatgaccggcaggtggtgcatgtggagacactggggctcactctgcaggagcccgaaacactgctggccgccatgcggcccagcgaggagcatgtggccagtcgcctcacctctcctatcgtctccacccacctggacactcgtaatgtggcctttgagaggaacaaatgtggtatctggggctggcggtctgagaagatggaaactgttagcggctacgaggccaaggtgtacagtgccaccaacgtggagctggtgacacgcacacgcacggagcacctctctgatcaggacaagtcgaggagtacttcgaccccaacttcagcctggagtcacggaacattggccgccccatcgagatgtccagcaaagtacagaggttcaaggcaacactgtggctgagtgaagagcacccgctctccctgggtgaccaggtgacccccatcatcgacctaatggccatcagcaacgctcactttgccaagctgcgcgacttcatcactctgcgccttccacctggcttccccgtcaaaattgagattccccttttccacgtgctcaatgcccgcatcaccttcagcaacctgtgtggctgtgatgagcccctgagctccgtgtgggtgccggcccccagctctgctgtcgccgcatcagggaaccctttcccgtgcgaggtggaccccaccgtgtttgaagtgcccaacgggtacagcgtgctgggcatggagcgcaacgagcccctccgggacgaggacgatgacctcctgcagttcgccatccagcagagcctgcttgaagcgggcactgaggcggagcaggtgaccgtctgggaagccctgaccaacacccggcccggtgcccgccctcctccccaggccacggtttatgaggaacagcttcagctggagcgggccctccaggaaagcctgcagctgtccacagagcccaggggcccaggatcccctcccaggacacccccagcccccggtccacccagctttgaagagcatctgcgcctggccctggagttgtcttcacgggagcaggaagagcgggagcggggcgggaagcaggaggaggaggacttacaggcggat

SEQ ID NO: 240219 - DNA, 1353 bp, Homo Sapiens
  misc_feature (111)..(120): n is a, c, g, or t
  misc_feature (556)..(564): n is a, c, g, or t
tccggaaattaatgttgatattattaactaatctatagatctcattcacattttaccaattatctcccaaagtgctaggattacaagcatgagccaccacgcctgtcctannnnnnnnnncttaacagcttttttgagttatagttcacacaccacacaattcatccatataaagcgtacaattcagtgacttagtatgttcacagaattgggcaaccatcaccacaatcaatttagagcacttttctcactccaaaaaagaatacccattagcagccactcacaaatttctcctgactccccagccctagtcatctgctaatgtactttctgtttctataaatttgcctcttctggacatttcatataaatagagtcataaaatgtgtagtcttttgtgactgatttctttcacttagcataatgcttttgcagtttatccatgtggtgccatgtgtcagtacatcattcctttttattgttgagtagtgttccattatatggatataccacattttgtttatccattcatcaaatggacatatgagtttccacnnnnnnnnnaagagacacaaacaaaatgttattaggttcttaagaaattcagaacaccaatttgtgaggataaattccattcgttagggcagacacagatcacaggtagccctggagctgaggaatagctttgatttttgctaaaacttgtgagtccacagctttctgataaatcttgcgctgctctgtaatctatttctctttttctgtgtcgaagatctcaccttcctggtgtttaggcttccgcagcttcttttaaagtaagcatcagtaagatgttttgggatttttacattgctgatatcgattttggttgaagtggcaatgacaaatttctggtgtgttcttcgtagaggaactcgattgaggaccagaggtccagtcacaagtaataagccactagccagctgcttcaggaaaaccaccctcttgcccctgtggcgtccagtgaggatgatcagaatggtcccgggggtaatgctggctcgcagttttctcacgtgctgactgaagggttttttgccgtggctcaacagctttcgaggcacatcttcagtaggataatatctaggcattttgcgaagtttaaccacccgggtaccgccgttcttgtcaccaccaactggttttgtaacagttgcgagaaccttctccttctttttcttttcaaccttggatttagcggctgagtacttcctcttgtacatggcctttctggaatacatggcagatcgggaatacctgccaattcctctgacaaggacagggccaacttttttgtacaaagttggcttttat

SEQ ID NO: 240220 - DNA, 1142 bp, Homo Sapiens
ttggcaagtacacaaagatagctgtggatcgagtgaacgctgctgatgggagataccatgtcctgtttctcggaacagatcggggtactgtgcaaaaagtggttgttcttcctactaacaactctgtcagtggcgagctcattctggaggagctggaagtctttaagaatcatgctcctataacaacaatgaaaatttcatctaaaaagcaacagttgtatgtgagttccaatgaaggggtttcccaggtatctctgcaccgctgccacatctatggtacagcctgtgctgactgctgcctggcgcgggacccttattgcgcctgggatggccattcctgttccagattctacccaactgggaaacggaggagccgaagacaagatgtgagacatggaaacccactgactcaatgcagaggatttaatctaaaagcatacagaaatgcagctgaaattgtgcagtatggagtaaaaaataacaccacttttctggagtgtgcccccaagtctccgcaggcatctatcaagtggctgttacagaaagacaaagacaggaggaaagaggttaagctgaatgaacgaataatagccacttcacagggactcctgatccgctctgttcagggttctgaccaaggactttatcactgcattgctacagaaaatagtttcaagcagaccatagccaagatcaacttcaaagttttagattcagaaatggtggctgttgtgacggacaaatggtccccgtggacctgggccagctctgtgagggctttacccttccacccgaaggacatcatgggggcattcagccactcagaaatgcagatgattaaccaatactgcaaagacactcggcagcaacatcagcagggagatgaatcacagaaaatgagaggggactatggcaagttaaaggccctcatcatagtcggaaaagtagaaacaggaggaatcagttgccagagtcataatattttcttatgtgggtcttatgcttccattaacaaatgctctgtcttcaatgatcaaattttgagcaaagaaacttgtgctttaccaaggggaattactgaaaaacgtgattactccttgaagtgagttttacacgaactgaaatgagcatgcattttcttg

SEQ ID NO: 240221 - DNA, 1046 bp, Homo Sapiens
aaagaaaaaagtccagaacttggtgcttcactgcaaattctaccaaactttcgaagaactaacaccaattctcaaactattcccaaaaattgaagagaagggattctccctagctcattctaagaggccagcattaccttgagaccaaaaccagacaaggatgcaacaactacaaaaaactagaagccaatatccctgatgaacatagatgcaaaaattctcaacaaaatactagccaaatccaacagcacatcagaaaggtaatacaccatgaccaaatgggatttatcccaggaatgcaaggatagttcaacatattcaaatcaataaatgtgatacatcacataacagaatgaaggaaaaaagccatatgatcacctcaatagatttcaaagcacttgatgaaaataaacatcctttcaagataaaaactctcatcaaactaggcatagaaggaacaaacctcaacaaagtaagggccatatatgacaaacccacagctaatatactgaatgaggaaaagccaaaaggctttcctctaagaattggaacaagacaaacatgcccactttcaccactcctattcagcacagtactggaagtcctagccagattaatcaggcaagataaataaataaaagacatccaaattggaaaggagaaaatcaaactgtccctctttaccaatgatatgctcttatttctaggaaaaactaaagaatccacaaaaaactcttagatctgatgtagccaaaaaaccaataggaaagcaatcctgaacaaaaacaacaaagctgaaggcatcacactacctgacttcaaaatatattacaaggctatgataaccaaaacagtatggtgttggtataaaaccagacacacagaccagtggaacagaatagagaacccagaaatgaatctgtgcatttataaccaactgattttcaacaagggcaccaagaacatgtacaggggaaaggataccctcctgaatacatggtgctaggaatattggatatgcatatgcagaagaatgaaattgccaa

SEQ ID NO: 240222 - DNA, 1344 bp, Homo Sapiens
  misc_feature (344)..(427): n is a, c, g, or t
  misc_feature (444)..(660): n is a, c, g, or t
ttggatgtatttgctcatttcttcctagcaaccccatgaaggtaggtatcactgttgtaacacctgttttagagacaaggcacagaggtaaagatgttatcctgtgtgcctgaagtcacaaaactaggtaatacgtggcatagctggaatctgaacctgaatttctaacatctgtacactccaaaccacctcgctaatgactgcgaactgtcctaggaattctcagaggccagaagttctgtcttgtttgctattttattttttgagacaggtctcattctgccattcaggctgaagtgtattggcacaatcatagctcactgcaaccttccaactcctgggannnnnnnnnnnnnnnnnnnnnnnnnnnnnnnnnnnnnnnnnnnnnnnnnnnnnnnnnnnnnnnnnnnnnnnnnnnnnnnnnnnncgcacgcacgcgtgccnnnnnnnnnnnnnnnnnnnnnnnnnnnnnnnnnnnnnnnnnnnnnnnnnnnnnnnnnnnnnnnnnnnnnnnnnnnnnnnnnnnnnnnnnnnnnnnnnnnnnnnnnnnnnnnnnnnnnnnnnnnnnnnnnnnnnnnnnnnnnnnnnnnnnnnnnnnnnnnnnnnnnnnnnnnnnnnnnnnnnnnnnnnnnnnnnnnnnnnnnnnnnnnnnnnnnnnnngtgtgagctactgtgcctggcctggtttttcaattgaggtgggggaatggggaaggctagagggcttccccacttccagagtagctgtgcgccttgtacttgctttattcactgatggtccttctaataatgcctgcggaaacccattttgtcaactgtggccacatgtaatctgtttgctctgtctgcagtgggctcgggatgagtttgaaggcctcttcaagcagccagcagaaaatgtcaaccagtacctcacagaccccaagtttgtggagcgaacactgcggctggcaggcactcagcccttggaggtgctggaggctgtgcagcgcagcctggtgctgcagcgaccacagacctgggctgactgcgtgacctgggcctgccaccactggcacacccagtactcgaacaacatccggcagctgctgcacaacttccctcctgaccagctcacaagctcaggagcgccgttctggtctgggcccaaacgctgtccacacccgctcacctttgatgtcaacaatcccctgcatctggactatgtgatggctgctgccaacctgtttgcccagacctacgggctgacaggctctcaggaccgagctgctgtggccacattcctgcagtctgtgcaggtccccgattcacccccaagtctggcgtcaagatccatgtttctga

SEQ ID NO: 240223 - DNA, 1737 bp, Homo Sapiens
  misc_feature (242)..(647): n is a, c, g, or t
  misc_feature (650)..(671): n is a, c, g, or t
  misc_feature (973)..(1000): n is a, c, g, or t
  misc_feature (1342)..(1350): n is a, c, g, or t
ttggctgctttcccaggaatttggggtttatcccttttttaaaaaaatctggtcatttatcagctttccaaaatgaaagtccttaaaccttgattatttattttacatgtttcatagcctacttatgttgtactgctttggaaaatatcaactttcctaattttttacatcattttaatgtaggtatgtggataataatccatgttattaacaaagccagtaggcttgtttgctgtagggannnnnnnnnnnnnnnnnnnnnnnnnnnnnnnnnnnnnnnnnnnnnnnnnnnnnnnnnnnnnnnnnnnnnnnnnnnnnnnnnnnnnnnnnnnnnnnnnnnnnnnnnnnnnnnnnnnnnnnnnnnnnnnnnnnnnnnnnnnnnnnnnnnnnnnnnnnnnnnnnnnnnnnnnnnnnnnnnnnnnnnnnnnnnnnnnnnnnnnnnnnnnnnnnnnnnnnnnnnnnnnnnnnnnnnnnnnnnnnnnnnnnnnnnnnnnnnnnnnnnnnnnnnnnnnnnnnnnnnnnnnnnnnnnnnnnnnnnnnnnnnnnnnnnnnnnnnnnnnnnnnnnnnnnnnnnnnnnnnnnnnnnnnnnnnnnnnnnnnnnnnnnnnnnnnnnnnnnnnnnnnnnnnnnnnnnnnnnnnnnnnnnnttnnnnnnnnnnnnnnnnnnnnnnttctgcagctctaaaataatttaaatatgaaaactaaagtataaagttaagatttatgaatgtgacatagtttatcttaaatatttacgccaataaaaacatgtattatactgtcctaagttacgacttttccaatgattctctggttaagaacgagaacttcttacttaatcattaataaaggtgggtagactgcagatgttactgaaatgcttttgtttcaacctcgttgatttaattttctgttatcctttggcagaagttctgggaaatggtataaatatgtataagtacatacatannnnnnnnnnnnnnnnnnnnnnnnnnnncagtagcttttggggtacaagtggttattggttacatggatgaattgtatagtggtgaagtctgagattttagtgcactcgtcacctacctgagttttgtttttaagattgaaacattatttgatatatccatcatcctcctcttggtgccctttgttcctatatctgaaaaatttttttactgaatttctaggttgtgataattttaattcccattgttagtaccttagtacctagtcatatattttccagttctgtaggattttaagcagaaaaattaagcaaatatgctttcaagtgtctaatatgaagagaaaatttgatcgcttttatgataatagnnnnnnnnnctcttcctaatataggagatttttcaagagcttgggatgttcttcttgaccatatacagtcagcagcactcagcaaaaacaatgaagtatctctggctgctctgaaaagcttccaggaaattttacagattgtgtcccctgtcagagactcagataagcctgagacaccacctgtagttaatgtacctgtgcctgttcttatagggcccatatcaggcatgagcaggccatttgtaagaacagattccattggagaaaactaggaagatatagtagctctgagccacccattgttactgatgagcttgaagatttgaatctatggtgggctgcgtggaatacctgtataaattggatctgaaagtactaagcctctattacttttga

SEQ ID NO: 240224 - DNA, 1210 bp, Homo Sapiens
ttggcattgatctctaagctgtcttgtgtggaagggagaagctgcatgacttgctagaagttttacatgtgatggaatttaacctcagtttatgtctctccctgcacagtcccttcagtctgaatatgttcattactaaggccttgccactccagtgaaagctgttcttctcttagacacaatttcttcatctggacgagcagtggagagggaaagcaacttcttgctggaagaatatctctgccttcttaccttaaattaaaaagagcactaagataacaccttcaagagacttgaaaacagaaaactggttaatgactactataaatgcactgaaactatgtttatggagatttccatacttttaaagacagttttaatgttgaatttggtactttgaagggttatttttaatgtattttggtaatacatttattattatatttacatgtacagtgttacattatatatgtattgtgaactttaaaagactattttgataaatttataaatatataaaattatgtaaaaactacactatattttgatttagattttcctgctgtttgctaccaaaaatttgtattttaaatctgtttagttttagtatggttttgtctctaatgaataaataattccttcttattaagaagaagtaagggagaaagtttttagaaagtgatttttatgctcgcactataaatatggcaggtcagttcattcttttgggaagtcagtttaattacactgagtttatccaagtttatctctaccaagagtataatggcatgggatggcttatttaggacaattccctttcccattgtttttgttgctgagccaatttgagttagttttgcatcctggggggctttaaaatacagcatgcagtgaaagatcagaattcactgaatatttcttctgagagcatggtttcatggtttttctctatgaaatgactcaatattccaaatgtttttctttccttcctcctttcaaaagagttcttaacccaattaggatatcctgctttgggtatgaagttgttgttgcctgtaatcacacatggtttgacatcagttttaaatcaatggagagaaaaaactgaaaaagatgctgctaagtagttctctgtattaaaggagatatttttaaaacaggtacaactccctgctgcacacgctagcatatctggaacctactatgaaaa

SEQ ID NO: 240225 - DNA, 901 bp, Homo Sapiens
aaattctcttttcttttattcttgtctgttctgcctcactcccgagctctactgactcccaaaagagcgcccaagaagaaaatggccataagtggagtccctgtgctaggatttttcatcatagctgtgctgatgagcgctcaggaatcatgggctatcaaagaagaacatgtgatcatccaggccgagttctatctgaatcctgaccaatcaggcgagtttatgtttgactttgatggtgatgagattttccatgtggatatggcaaagaaggagacggtctggcggcttgaagaatttggacgatttgccagctttgaggctcaaggtgcattggccaacatagctgtggacaaagccaacctggaaatcatgacaaagcgctccaactatactccgatcaccaatgtacctccagaggtaactgtgctcacgaacagccctgtggaactgagagagcccaacgtcctcatctgtttcatcgacaagttcaccccaccagtggtcaatgtcacgtggcttcgaaatggaaaacctgtcaccacaggagtgtcagagacagtcttcctgcccagggaagaccaccttttccgcaagttccactatctccccttcctgccctcaactgaggacgtttacgactgcagggtggagcactggggcttggatgagcctcttctcaagcactgggagtttgatgctccaagccctctcccagagactacagagaacgtggtgtgtgccctgggcctgactgtgggtctggtgggcatcattattgggaccatctttcatcatcaagggagtgcgcaaaagcaatgcagcacatcgcaagggggcctctgtaaggcacatggaaggtgatggtgttttcttagagagaagatcactgaagaaactt

SEQ ID NO: 240226 - DNA, 1335 bp, Homo Sapiens
tcacatttataaaaggatcatgaggctgccaagtgctaaaaatggagatggtctagtaactagaaaactccccaccccagggagcacacctacatatctccctacaacctaataatgtgatgtgttttggaacacagacattagaacttcatgaagttttaactgttgattctttcccaagcatcatcaagttatgatttaggcaatgtatgattgaaatgcattcattcatcatgcataggcacaatcacagaaatattgcacaaagtatgtccctgactgaaaatgagaggtacaaaaacgtatttcactcttcgtaaagaagtttgtgaggaaatacaactctgcgatcgtatagacatgtttcctgataatacagacattcacaaacagtagattgcaccacagtgtgtaaacattttaagttgcataaacttctccttgattttcaaagataatataatactgtctactaaaattcctttttgtttcaactaagtactctcacatatattagtttataataatgtttgttattactttctaaagtgttttccactcaaggaaaagaagtaaattcctatgtcagagtaaccgaggtggttgaagaataggtattagccagagaggtctagatagtaaaatcaaacttcaagcctcaaagaagctccatgaacagagaggaatgccaggtgtcacacagctttccttcactctaattcattcttgactagagcctgtatgcctgtttcagagacatttaaactcttaaaggatttcttatgatcttcactaaatacattaagaagaatgccaaccagcgccctttcgtgtactgggacaggtagtcatgtgattaaaacagggaacacgaactctgactttaaaatgtattgtagatacaaatgctctaagctaggaaaggtttttcacacccacagccaatgatggcagcctttcattcctcggaaataagccatttttaggtcactgaaaaagagtgcaaaagatgcagctcacgatgcaatatcttcatgagcccagagcacatacaaatccaaagggaactgccacagtacagtgctcattcttggcaccggaacagatgaaacacactgtatcctgcacatacctgccagagcaggccactttcctcttctgcgagatttagaaagctcccccaaaaggttatcactcccatcaccaatacacagaaaatggaggaaaggctgtttccagttctcggcctttaaacagctctaagtgtcagtactcatagtggcatattacaaagtaatattacagggcacacttgagccaacttttttgtacaaa

SEQ ID NO: 240227 - DNA, 540 bp, Homo Sapiens
  misc_feature (116)..(148): n is a, c, g, or t
aatataaaagtaaaagagtacattgttgagtagaggattaaaggagtgacgaccctttctaaagtggggtctcccatcccggatccctaagactgtaacatctgctacatacattnnnnnnnnnnnnnnnnnnnnnnnnnnnnnnnnnttatgacctgacttcactccacccttcatgcctgcattatgacagaaacacgtcccactgctcctacttatgtatgtacatccagagctccaaacctaagctgtggccccctcctcccagccctacccacatccaccctacttcccaaaagcctgtagaagcccccacttagaaaaaaaggcagacatacacatacacagaaacacatatctatctgcagctcctccatgtgaagcccctgaaacatacacaccctggaactttcctctccttatgcacagatggacaggctgccttcccctgtctctgggctcccccaatagccagaatcccttccgactggtcccttgccctgaatatctgggaaccccccccggcacacacacacccaa

SEQ ID NO: 240228 - DNA, 1431 bp, Homo Sapiens
  misc_feature (973)..(1039): n is a, c, g, or t
aactttgtacaaaaaagttgggtcactctgggcatcctcatcgctggccaggtctctggggcccacctgaaccctgccgtgacctttgccatgtgcttcctggctcgtgagccctggatcaagctgcccatctacaccctggcacagacgctgggagccttcttgggtgctggaatagtttttgggctgtattatgatgcaatctggcactttgccgacaaccagctttttgtttcgggccccaatggcacagccggcatctttgctacctacccctctggacacttggatatgatcaatggcttctttgaccagttcataggcacagcctcccttatcgtgtgtgtgctggccattgttgacccctacaacaaccccgtcccccgaggcctggaggccttcaccgtgggcctggtggtcctggtcattggcacctccatgggcttcaactccggctatgccgtcaaccctgcccgggactttggcccccgcctttttacagcccttgcgggctggggctctgcagtcttcacgaccggccagcattggtggtgggtgcccatcgtgtccccactcctgggctccattgcgggtgtcttcgtgtaccagctgatgatcggctgccacctggagcagcccccaccctccaacgaggaagagaatgtgaagctggcccatgtgaagcacaaggagcagatctgagtgggcaggggccatctccccactccgctgccctggccttgagcatccactgactgtccaagggccactcccaagaagcccccttcacgatccaccctttcaggctaaggagctccctatctaccctcaccccacgagacagccccttcaggatttccactggaccttgcccaaatagcaccttaggccactgcccctaagctggggtggaaccggaatttgggtcaatacatccttttgtctcccaagggaagagaatgggcagcaggtnnnnnnnnnnnnnnnnnnnnnnnnnnnnnnnnnnnnnnnnnnnnnnnnnnnnnnnnnnnnnnnnnnnttcccagatattcagggcaagggaccagtcggaagggattctggctattgggggagcccagagacaggggaaggcagcctgtccatctgtgcataaggagaggaaagttccagggtgtgtatgtttcaggggcttcacatggaggagctgcagatagatatgtgtttctgtgtatgtgtatgtctgcctttttttctaatgggggcttctacaggcttttgggaagtagggtggatgtgggtagggctgggaggagggggccacagcttaggtttggagctctggatgtacataacataagtaggagcagtgggacgtgtttctgtcataatgcagggcatgaagggtggagtgaagtcaggcataaatttcatgtttgctttgttttgttt

SEQ ID NO: 240229 - DNA, 1158 bp, Homo Sapiens
tatagtaaaacactttaagaaatgcagtccaattttatacacttccaggcatccctagacaagtgtgtcacaatgcacaatgtggaaatataggtatcactactacattttacataaaagggaagtatcaataaactttagaaagtagtaaattcacctgtcccttaaaatatgggtatgcaattgttacaaagccatagtaaatggtttataaaatgtacttttattttatgttactctgctgttacatagggcataacattttcacaaggcttttttgggactacagtcaatgattagcaacacacaatagtggtccaactctctaaataacaatcactagacaaactggacaccctctcacatgtgcacaaatctgcatggaaaagtactaaagttttagacttggacttgtgtactttaatttatttcccctttctagtgtattaagaaatgacatgcactttaatttgccaaaagcaatgcttgtattctggcagcaacatgctacttctatcacatagtaaagtgaataccagaactacaaaggcaggaggtgtaagtgaatttttattgggaggggaggttggcaacttaaacagcagcaaataaagagtgaataaggaaactccctgttgccacagatacacaagacctccgtatgtgatacaggagccatttcaatttgtgacccctagacagagatggcaagtgcttttccattcaatctaatacttccggattcctactaaaaaggaatacattaagagcatggaaaagttgcttactgaaaggaaacccccgaagagtaagggagggaatgtagaaattaagaagttatgtggaatactctttaaattgtaattaactacattttcttattttcacagtaatacaaaacacagtcacttgcagaactggttcagattacttaaataccagatacatttttagtcctctacataagtgtttgggagttacttatgtttatatgaaatgaagctattaatacttttctacagcagtactgcacaccaggaaggccaagacaaacacaaatcaaggaatgaagttttcccaaagctgcagtgtgaaaagactataaacagttgattccatacacatgaatgggtttctttgctccaacttttttgtaca

SEQ ID NO: 240230 - DNA, 1158 bp, Homo Sapiens
  misc_feature (1007)..(1020): n is a, c, g, or t
ctttgtacaaaaaagttggctattctgcctggaacttttcatagctaagtataacccccaaatgcatggttcctgggtcaggagacaccaaaatcaattatagctgttcccactcaagttaataaagtaaatgatttcctccactttgcatggaggggtgtaaggaaagcctattttatctgtgcctgggagaactgtgcctattttcagtcttttagaggaaatttcaactcaaaatttttaagtgtgaaaggtttactggtgtcacataaacattagcagtgagaccaaataatgaaacattgctttataccttagtgctttccagttcactgttacctctagtcatggtagatgacaattttcctccctcatcttttgtagcaaagaagcaaattaagagccttttgcaagttagattaggggactgaaaaatccagggagataacctgattcttctatactatgactggagtaaagctgccaagagttaggttgaatttggagccttttaaaagttggttccataagtgagaaggggggctaacatgtgaccactgtgcccctgagaatccatgagatggaaaagtacagacaagaaggcacttaacgctgttctcagttggaaaatgtcagccctccacacctgtttggatgtgaagtgcattattaattttaatgacaaaatgaaactgctaattagtttaaatgtaatgtttaaatggtattgaatttcctattgcctgattaaatatatctgtaattgtaacatcatgtttctgagagctttaactacttccttatttttatgcaatcattttaaagattgtggctatatctaatttaaatttgctgatgattgaatctaaattcaagtgaagaccacagcattaatcccaaaggagattttttttatgtttagaggtggagatattagggtaaatcagtatattgctcctgtcatcaaagtttttgttcatttgtgtgccacatcgagtagcagcacnnnnnnnnnnnnnngtcaactggaaaaaagtgtttaaaactgttcctttcttaaccagatttggtgatgtcatcaatatctatgatatcgattggtaaaaggtctttctttgttgaggatttgagctctctttttaagagtttattttattt

SEQ ID NO: 240231 - DNA, 863 bp, Homo Sapiens
tcagatgcaaggcccagcaatgaggctccccattatccccacccctttggtccccagtcccttctctgcaatgggcacgcatagaggagagacaaagggtattagacgcaacatcattggcccaggagagtccgagaagagctgccattggctgacagagcattttcaggctctgtcattggtcagggagcacaccccagcctgaagagtgatgccattggccaggagagtggttttgtcatagccgttggctgtgaagtggaaggaaaagatctgggaatgaagccctgtggccaggaagatagacagggcagcaacttctgggcctccaggccctcttcccaccatagcaatgtgggcaaaactggtgtcaggccccagccagaaaaaggagcccaagccagagggcaagtgacaaaggatgtaccatgtccaatctcccacaccctggggctgcccttcccaatgtctttcttgatagccaagttgggctgggagcagctcactgctcctctagccaggagggtttctcagctcctggaggccgcagcttgatgttgaactgctgcagggtctgctccagctgtttctggttcccagcaaagtaggcggacacagcattgtggaagagcagcagctgcttgtgcatcaccttgatctgggggtccagcagggtcagctaaggctggactcaggcgcccttcttgagggtctatgagcctgagcccaggcacagaccaggggcacaaggactctgctctgatggtgcttttggggtaggggctgaactctacccagggagtcaaaggagaagggtcagtatgatggaagaaacctcactggatttgtgccaacttttttgt

SEQ ID NO: 240232 - DNA, 1392 bp, Homo Sapiens
  misc_feature (904)..(912): n is a, c, g, or t
gaaatttaagttaattacataaaagcatttctaataaaatatgaaatacactaacttaatgtcgcttttttactgaagaaaggtaaatgaacatgttagaacgtgttctagttagtttgagggaaaggtgacttacttcagcctgttcttgtgaattatttaccacaatcacagttctgacatacaaggtgtttaacaatttcacttggcaaaactctcatcagcttactctaaaattttccttcaatacaccttcataagtgcaataaaagcatgttctaatacatttcagaccaaaagaatcaaaaggtagtctattttactaccaccatcccaaatatgaaactgtacagctaattcttccttttatgatattcttaaatccctatatgcaaataaggctactcatctctcacctcaccttttcttcagaagaaaagggaggggcagacagagggaggaaaagttcaaaatataataatagttgctgacaacctactcctttactctgaggataatcagatcaacaagttaacaagtatgttttaattcttgccatagaatcatataggctctttaccaaggttatgctaaaaatcactacaatgtaagtaacaggttttattattttctatcccagagttagctaaatttagcatatggatcaaataatccttagattaaacccagatctttcttaatgaaaggcactaaaaaaaatgcaacttagtctaacagtatatccactcatactttatagctcagcagctttagctacactaaatgctggggcatttaaaatgccaaataattatgatctttactccaaggaaagaaaatataaacttctgcctatgaaataatgttttaaaaacccatacttgcctggttattctttcaaagnnnnnnnnngacttataaattgtacatatacagaaaacagaaggtaaaccatagccaaaagtgacagaaaagccaccaaggaaataaagcaaaaaagaaagcagcggacaaagggcacaccatagaagaacagctagtgaggtacagcaggcagaagctccacaatcgtgaaagtcaagttaaaatatttcagggagaggctggtcagtaaagaagctgagtcaggggcttttttcttctaccttgtacccaggaactgacttggacagtacagaacgtttgggaccatcttttcttggagtggcagctttgtcttttgatttctgtcttccctggaaagagtcctcctggctgtcaggagggctttccccttcagatacattgccagaggagctgtcctggagtttaaaaggcaaaaacaaagattctttggaattaagacaaatttgagtctggattttgaaaactatggaaaatattcaaagccaa

SEQ ID NO: 240233 - DNA, 1761 bp, Homo Sapiens
ttggcgcacagatagaacccaaagaaaggcaaagagtcctgcccggcaccggcgccgcgtgggccaaacctgcgcccgtggaggggcgcgcagagggcaccgggcgccgggagcaggcggcgcagcaccagcattgtgttagtgccgggaggccactgtgtcagcaagctgagagggaaactgaagcaagatgtcgggccggagtgggaagaagaaaatgtccaagctgtcccgttcagctagggcaggtgtcatctttccagtggggaggctgatgcgttatctgaagaaagggacgttcaagtaccggatcagcgtgggcgcccctgtctacatggcggcagtcattgagtacctggcagcggaaattctagaattggccggcaatgccgcgagggacaacaagaaggcccggatagccccgagacacatcttgctggcagttgccaatgacgaggagctcaaccagctgctaaaaggagtgaccatcgccagtggaggcgtcctgcccagaattcaccccgaactgctggccaaaaagcgagggaccaaaggcaagtcggaaacgatcctctccccacccccagagaaaagaggcaggaaggccacgtcaggcaagaagggggggaagaaatccaaggctgccaaaccacggacgtccaaaaagtccaaaccaaaggacagcgataaagaaggaacttcaaattccacctctgaagatgggccaggggatggattcaccattctgtcttctaagagccttgttctgggacagaagctgtccttaacccagagtgacatcagccatattggctccatgagagtggagggcattgtccacccaaccacagccgaaattgacctcaaagaagatataggtaaagccttggaaaaggctgggggaaaagagttcttggaaacggtaaaggagcttcgcaaatcccaaggccctttggaagtcgccgaagccgccgtcagccaatccagtggactcgcagccaaatttgtcatccactgtcacatccctcagtggggctccgacaaatgtgaagaacagcttgaagagaccatcaaaaactgcctgtcagcggcggaggacaagaagctaaagtccgtcgcgttcccgcctttccccagcggcagaaactgctttcccaaacagactgcggcccaggtgaccctcaaagccatctcagcccactttgatgactcgagcgcgtcctcgctgaagaacgtgtacttcctgctcttcgacagcgagagcatcggcatctacgtgcaggagatggccaagctcgacgccaagtagccgccgcactttccagcagggatcggaggacgacccgagtcccaagagtggggttttgctttttaaaaggagagaggaggggtgatggcaggggagtggagggtggccgggcaggtcctgccggcgcagggagccctctgcccttcacactctcctccaaaagagcctccatctgtaaggaagcaggtctccgcgaggggtttctttccatgtgttttcctcctgttgttttagaacttttttaaaaaaacagacctcgttttagatttatagcattgacttttacacacattcacacaagaaaaaaatcctttcaaatttcttaaatcttctgtttcctcctttttccagggaagagggcaaaaagtggcctgggctctgttggtgtgcgtgttccgtggcgagagtagaaatgggaaagacatctcactggtgcttttctccttttgttt

SEQ ID NO: 240234 - DNA, 2035 bp, Homo Sapiens
  misc_feature (548)..(574): n is a, c, g, or t
  misc_feature (787)..(796): n is a, c, g, or t
  misc_feature (898)..(921): n is a, c, g, or t
  misc_feature (1126)..(1200): n is a, c, g, or t
  misc_feature (1846)..(1855): n is a, c, g, or t
gggtttcaaagaaagatgcacaaaaaggtagtccagacggattaaacctggattaaccaagcacttagcattttgaggatccctagataaacaaaccaaacatattatactgccaacaggagggatatttttttctcccgtggtctctctttaactgatgaatgaaaatctttctaattgggtcttgaggaattatcatagcaagcagtcatccactaaggttgtggagattatgtggttgtttcacaacacaaagggaaggttcttatgtgttagttttgttttgtttttaacaaatgcattttcagagaccagtatctagaggaactactggctaggagaaagggtggttttaggattagctgttattgaactgaaatagtaatgccagttcatttcacaaaggtataactggtatttttgtaagaaagaaaataaagttggatttgatttaatggaaagcgatttaaagtacagtactaaatatttaaatgcagtgtgacaaccagatcaaagatgtttcatattgacatgatttataaaatgtnnnnnnnnnnnnnnnnnnnnnnnnnnnattttaagcaattgtgcaaatattctgtaaaaagggtcatttcacattactaaattttagtggtccagaaatgcagaatgcattcattaaaattcatttaaacattagcaagtagtgtttagatcaccggaaatcctttttagcagtcagggatttaagtagcctattactgatccatgatccactagattaaacatcatagaggaatgcaannnnnnnnnnaataaatgggttccaactgtcaaaatggcagttcaatataaaaaagagtgctttgccaaacaaatattctcccatttgtggaattttatggctcaccaaagnnnnnnnnnnnnnnnnnnnnnnnntcccactaaaacagtataatttctgctcttcctatgaaatatattacttggttccctcccttcatttaattttttagatgtggatttaattcatcattgcaatatgcccacgtctcatgttatcctgttgaaaacataaaaacacacagtatttaaacatttcctatttgagacattattctagatcatagtcaatctactgtgnnnnnnnnnnnnnnnnnnnnnnnnnnnnnnnnnnnnnnnnnnnnnnnnnnnnnnnnnnnnnnnnnnnnnnnnnnntacctatgataatatcagatcaacaaatgttaactttatacaagtatttgcaagaaaaaatagggcattttctccaccattcacaagcttatgttattttcttcttgaggcagtccctgataaaataaaataatcattaaaccataaaataattttgccacttcaaattttcagaaggcaacaggcactttgatgtatattggtgtgtaacaaatataatctctcttcatatagtctactatatctcttctaattgggtatttttatctgttaaatctttggtccttgagcacactttctttgttacagctgtttttgcttgcatttttacattttaaaaatgtgatctatgcacgcagctggaattaatggattgtgtcatcataagttctgctgattgttacgagaactgcaccaacctactactgttcatttggagcaagccgtttgttagcaaaacaagatcattccacagaaagcacttgctacaagcctcagacagtaatcccaacgttggagttcccctttttcctgtattgttactattaatatctgaactcctaaactgattcacaagttggagtgagaccttttttcctccgtattttcccttttatgaattccatcttaaaagaaactttccacnnnnnnnnnncctatggcaaagctatgggagcagatacagcaaacccatattgtcatcacacatttcttctcttgtatcaggagaacctggttgcttctaatgacaggtctctctttttttgcaggatagaatccaattgggtaggagaataagagaagggaaaaggatcctttggagatcatgctccaa

SEQ ID NO: 240235 - DNA, 1863 bp, Homo Sapiens
  misc_feature (1556)..(1582): n is a, c, g, or t
  misc_feature (1795)..(1804): n is a, c, g, or t
ccatccaataccaagtgagcagatacttgatcccatttctgggaaaggaaatgtccatcttggtgtaggagttcttgaggcagctggatttactgcaaattaagtaaacctttaaaaacggcattgtcacaggctatgtgttctctgacatgccaggctggacaggtgagaagagcctccaaaagacaaaacttcttcctggtttaaagaaacagcacactaggccagataaacacaaaaggaaacaaatcacaggcgctaatagggagtcgggagctgttcttttctctgacctatacacatggctctctctcaccagacattcaaatttttaggccgcacatccacaaagagagacatatatttcactgtgtgttcaactacatatgcacaagactatagtacacacaaaatagaaataaattatataagtcttaaagtaaatgctagaagttgtcttgagtacagcctgttctatatgaataggtgccaggtgctggcacttccaactaagctaccaaccctgaagtaagcaagaaaagaatataaatatttaagaaaataaatcaaagtgtatttcaaataaggctcttccaaacaaaaatctgtgttataaattaacagcaggttattgttatggcagagtcagagacctccagactctttaaaatagtagacgactcatttgtcaagagttagggtaagaaagcagatcaccagctgctcctgtgttcacaagtgctcccctagttttctttcagaaaactttgaaacaactaagcaggcggagctctggtttctgataggtgagtgccaggcttaatctgcaaactgaacaatgtttcctgggaagttgcaattaatttttcaaacccagggcttaagtgagggagactgagccaagatggtagtaggaggagttccttagaaaactgagtggcagtgcagcggctgttgcagctctgacagaattcacaaggaagctgctacagcaaacccatcaggttcccattaaggcttcaaagaaagatgcacaaaaggtagtccagacggattaacctggattaacctagcactaagcatctgaggatccctagataaacaaacaaacaaattatactgccaacaggaggatatttttttctcccgtggtctctctttaactgatgatgaaaatcttctaattgggtcttcgaggaattatcatagcaagcagtcatccactaaggttgtggagattatgtggttgtttcacaacacaaagggaaggttcttatgtgttagttttgttttgtttttaacaaatgcattttcagagaccagtatctagaggaactactggctaggagaaagggtggttttaggattagctgttattgaactgaaatagtaatgccagttcatttcacaaaggtataactggtatttttgtaagaaagaaaataaagttggatttgatttaatggaaagcgatttaaagtacagtactaaatatttaaatgcagtgtgacaaccagatcaaagatgtttcatattgacatgatttataaaatgtnnnnnnnnnnnnnnnnnnnnnnnnnnnattttaagcaattgtgcaaatattctgtaaaaagggtcatttcacattactaaattctagtggtccagaaatgcagaatgcattcattaaaattcatttaaacattagcaagtagtgtttagatcaccggaaatcctttttagcagtcagggatttaagtagcctattactgatccatgatccactagattaaacatcatagaggaatgcaannnnnnnnnnaataaatgggttccaactgtcaaaatggcagttcaatataaaaaagagtgctctgccaa

SEQ ID NO: 240236 - DNA, 1326 bp, Homo Sapiens
  misc_feature (258)..(284): n is a, c, g, or t
  misc_feature (497)..(506): n is a, c, g, or t
  misc_feature (608)..(631): n is a, c, g, or t
  misc_feature (836)..(909): n is a, c, g, or t
aacaaatgcattttcagagaccagtatctagaaggaactactggctaggagaaagggtggttttaggattagctgttattgaactgaaatagtaatgccagttcatttcacaaaggtataactggtatttttgtaagaaagaaaataaagttggatttgatttaatggaaagcgatttaaagtacagtactaaatatttaaatgcagtgtgacaaccagatcaaagatgtttcatattgacatgatttataaaatgtnnnnnnnnnnnnnnnnnnnnnnnnnnnattttaagcaattgtgcaaatattctgtaaaaagggtcatttcacattactaaattctagtggtccagaaatgcagaatgcattcattaaaattcatttaaacattagcaagtagtgtttagatcaccggaaatcctttttagcagtcagggatttaagtagcctattactgatccatgatccactagattaaacatcatagaggaatgcaannnnnnnnnnaataaatgggttccaactgtcaaaatggcagttcaatataaaaaagagtgctttgccaaacaaatattctcccatttgtggaattttatggctcaccaaagnnnnnnnnnnnnnnnnnnnnnnnntcccactaaaacagtataatttctgctcttcctatgaaatatattacttggttccctccttcatttaatttttttagatgtggatttaattcatcattgcaatatgcccacgtctcatgttatcctgttgaaaacataaaaacacacagtatttaaacatttcctatttgagacattattctagatcatagtcaatctactgtgnnnnnnnnnnnnnnnnnnnnnnnnnnnnnnnnnnnnnnnnnnnnnnnnnnnnnnnnnnnnnnnnnnnnnnnnnngtacctatgataatatcagatcaacaaatgttaactttatacaagtatttgcaagaaaaaatagggcattttctccaccattcacaagcttatgttaaaatcttcttgaggcagtccctgataaaataaaataatcattaaaccataaaataattttgccacttcaaattttcagaaggcaacaggcactttgatgtatattggtgtgtaacaaatataatctctcttcatatagtctactatatctcttctaattgggtatttttatctgttaaatctttggtccttgagcacactttctttgttacagctgtttttgcttgcatttttacattttaaaaatgtgatctatgcacgcagctggaattaatggattgtgtcatcataagttctgcttgttatggtacgagaacccaa

SEQ ID NO: 240237 - DNA, 961 bp, Homo Sapiens
gtacaaaaaagttagccccgacgacaaccactaccgtaagggaaagttgaaaagaactttgaagagagagttcaagagggcgtgaaaccgttaagaggtaaatgggtgggggacgggccgaggcgatggcggagaagtttgaccacctagaggagcacctggagaagttcgtggagaacattcggcagctcggcatcatcgtcagtgacttccagcccagcagccaggccgggctcaaccaaaagctgaattttattgttactggcttacaggatattgacaagtgcagacagcagcttcatgatattactgtaccgttagaagtttttgaatatatagatcaaggtcgaaatccccagctctacaccaaagagtgcctggagagggctctagctaaaaatgagcaagttaaaggcaagatcgacaccatgaagaaatttaaaagcctgttgattcaagaactttctaaagtatttccggaagacatggctaagtatcgaagcatccggggggaggatcacccgccttcttaaccagctcaccctccctgtgtgaagatcccccgggactgcgatgcggcgtgaggctgggactgcgagtgctgacgccaccttcctgctgaggtgggactgggccctggacacacccctcagcccctctgtcctcattgtttggcctcatgggaccgaggggctggaggagaggcggagctgtgccccagctgttccagcagcttgtctggcgtcaactggctttcagagtgctgacccctcatcactgtggggatcattctctctgagggcagatgaggcgcaggaaaatagtcttggaaatgttaaatatgatgggtaaattaaaagttttacaacattctacctaatatttttcttttaacatactttttctgttctattgtattatggtgtccgaaagcttaataacgactaggaaaaattttttt

SEQ ID NO: 240238 - DNA, 921 bp, Homo Sapiens
ttggcgagcaactgagaagccaagactgagccggcggccgcggcgcagcgaacgagcagtgaccgtgctcctacccagctctgcttcacagcgcccacctgtctccgcccctcggcccctcgcccggctttgcctaaccgccacgatgatgttctcgggcttcaacgcagactacgaggcgtcatcctcccgctgcagcagcgcgtccccggccggggatagcctctcttactaccactcacccgcagactccttctccagcatgggctcgcctgtcaacgcgcaggtaaggctggcttcccgtcgccgcggggccgggggcttggggtcgcggaggaggagacaccgggcgggacgctccagtagatgagtagggggctcccttgtgcctggagggaggctgccgtggccggagcggtgccggctcgggggctcgggacttgctctgagcgcacgcacgcttgccatagtaagaattggttcccccttcgggaggcaggttcgttctgagcaacctctggtctgcactccaggacggatctctgacattagctggagcagacgtgtcccaagcacaaactcgctaactagagcctggcttctccggggaggtggcagaaagcggcaatcccccctcccccggcagcctggagcacggaggagggatgagggaggagggtgcagcgggcgggtgtgtaaggcagtttcattgataaaaagcgagttcattctggagactccggagcggcgcctgcgtcagcgcagacgtcagggatatttataacaaaccccctttcaagcaagtgatgctgaagggataacgggaacgcagcggcaggatggaagagacaggcactgcgctgcggaatgcctgggaggaaaagggggagacctttcatccaggatgagggacatttaaga

SEQ ID NO: 240239 - DNA, 1038 bp, Homo Sapiens
ttgggcagcgagcatctgagaagccaagactgagccggcggccgcggcgcagcgaacgagcagtgaccgtgctcctacccagctctgctccacagcgcccacctgtctccgcccctcggcccctcgcccggctttgcctaaccgccacgatgatgttctcgggcttcaacgcagactacgaggcgtcatcctcccgctgcagcagcgcgtccccggccggggatagcctctcttactaccactcacccgcagactccttctccagcatgggctcgcctgtcaacgcgcaggacttctgcacggacctggccgtctccagtgccaacttcattcccacggtcactgccatctcgaccagtccggacctgcagtggctggtgcagcccgccctcgtctcctccgtggccccatcgcagaccagagcccctcaccctttcggagtccccgccccctccgctggggcttactccagggctggcgttgtgaagaccatgacaggaggccgagcgcagagcattggcaggaggggcaaggtggaacagttatctccagaagaagaagagaaaaggagaatccgaagggaaaggaataagatggctgcagccaaatgccgcaaccggaggagggagctgactgatacactccaagcggagacagaccaactagaagatgagaagtctgctttgcagaccgagattgccaacctgctgaaggagaaggaaaaactagagttcatcctggcagctcaccgacctgcctgcaagatccctgatgacctgggcttcccagaagagatgtctgtggcttcccttgatctgactgggggcctgccagaggttgccaccccggagtctgaggaggccttcaccctgcctctcctcaatgaccctgagcccaagccctcagtggaacctgtcaagagcatcagcagcatggagctgaagaccgagccctttgatgacttcctgttcccagcatcatccaggcccagtggctctgagacagcccgctccgtgccagacatggacctatctgggt

SEQ ID NO: 240240 - DNA, 922 bp, Homo Sapiens
tttgtacaaaaaagttggctagttatctccagaagaagaagagaaaaggagaatccgaagggaaaggaataagatggctgcagccaaatgccgcaaccggaggagggagctgactgatacactccaagcggagacagaccaactagaagatgagaagtctgctttgcagaccgagattgccaacctgctgaaggagaaggaaaaactagagttcatcctggcagctcaccgacctgcctgcaagatccctgatgacctgggcttcccagaagagatgtctgtggcttcccttgatctgactgggggcctgccagaggttgccaccccggagtctgaggaggccttcaccctgcctctcctcaatgaccctgagcccaagccctcagtggaacctgtcaagagcatcagcagcatggagctgaagaccgagccctttgatgacttcctgttcccagcatcatccaggcccagtggctctgagacagcccgctccgtgccagacatggacctatctgggtccttctatgcagcagactgggagcctctgcacagtggctccctggggatggggcccatggccacagagctggagcccctgtgcactccggtggtcacctgtactcccagctgcactgcttacacgtcttccttcgtcttcacctaccccgaggctgactccttccccagctgtgcagctgcccaccgcaagggcagcagcagcaatgagccttcctctgactcgctcagctcacccacgctgctggccctgtgagggggcagggaagggaggcagccggcacccacaagtgccactgcccgagctggtgcattacagagaggagaaacacatcttccctaaagggttcctgtaacctagggaggaccttatctgtgcgtgaaacacaccaggctgtgggcctca

SEQ ID NO: 240241 - DNA, 868 bp, Homo Sapiens
aaagtttaaatcagcattttataaaaactagaaacaaaataattgctttcacaatgtagtacttgaaactaaagttctccagctatcaacagatgtgactccagcatcaagggcctagcaggaaaattctgaatggtttacaacagtgcacataagttgcaggtggctggggccgtgtgtctatttgatgcttcccagaatgtgtgctgctagtcaccatttccaccattcacatatttaacatttttattagacttttatttagcctcatcataagaatataagggagatcatagatttgatgtatgaaatttttaaattcacactaaaatacattacgattaaaatgaattatcttcaaccacccgttttgctatcttttgctgagtaatctgtgccagtcattgtgaaaaagtctttattttaagaaaaaaatttagttaacaaaaaatttaacaagtttcacttagcaaaatacacccaaaaggaaatcacagtacaaagaaagttttaagtcaaggcctcaccaattcctacagtattagtattgtgtctcaattctcaaaactaacttttaaaaagcttaaacttaacctaaaggattttaaatgaaaatataaactagaatgaacaaacatgagaaatatttctttgaatcagggagctagcacctttgagttttccaaaaaagcacgtctccccagtgtgttcactgtgatgtggtgtaaaagatccacatttaacatacttaaactacttaaacttagataacatcactctgaagtatactaccaaaatgttaattgagaaaagctgaaaatagttttagtttactctattatcacatgctagccaacttttttgtaca

SEQ ID NO: 240242 - DNA, 1276 bp, Homo Sapiens
  misc_feature (187)..(211): n is a, c, g, or t
ttgggaattctcgcctcccgcgttgcgggcgagaagtctaccactacaccaccaatgctaatgtcgatgaaagagctgcagtgtcatctcttaaagctgattatctctggccattccttaaggaaacaggcactgtcttaaatcgtggtttggaaaatattttgttcaagataaaactgttttaagnnnnnnnnnnnnnnnnnnnnnnnnnctgtattcgcatggtaacatatcttcggccttcctgagccgctgggctctcagcggccctccaaggcagcccgcaggcccgtgctcgcctcagggatctgacctcccacagccccggggagaccttgcctctaaagttgctgcttttgcagcctctgccacaaccgcgcgtcctcagagccagccgggaggagctagaaccttccccgcgtttctttcagcagccctgagtcagaggcgggctggcctggcgtagccgcccagcctctcggctcacggcccgatccgcccgaaccttctcccggggtcagcgccgcgctgcgccgcccggctgagtcagcccgggcgggcgggcgggaggctctcgactgggcgggaaggtgcgggaaggttcgcggcggcggggtcggggaggtgcaaaaggatgaaaagcccgtggaagcggagctgagcagatccgagccgggctggcggcagagaaaccgcagggagagcctcactgctgagcgcccctcgacggcggagcggcagcagcctccgtggcctccagcatccgacaagaagcttcagccatgcaggccccacgggagctcgcggtgggcatcgacctgggcaccacctactcgtgcgtgggcgtgtttcagcagggccgcgtggagatcctggccaacgaccagggcaaccgcaccacgcccagctacgtggccttcaccgacacggagcggctggtcggggacgcggccaagagccaggcggccctgaacccccacaacaccgtgttcgatgccaagcggctgatcgggcgcaagttcgcggacaccacggtgcagtcggacatgaagcactggcccttccaggtggtgagcgagggcggcaagcccaaagtgcgcgtatgctaccgcggggaggacaagacgttctaccccgaggagatctcgtccatggtgctgagcaagatgaaagagacagccgaggcgtacctgggccagcccgtgaagcacgcagtgatcaccgtgcccacctatttcagtaactcgcagcgccaggccaccaaaggacgcggggg

SEQ ID NO: 240243 - DNA, 1299 bp, Homo Sapiens
ttggccctcctcctcaggttctctatcgacgagtctggtagctgagcgttgggctgtaggtcgctgtgctgtgtgatcccccagagccatgcccgagatagtggatacctgttcgttggcctctccggcttccgtctgccggaccaagcacctgcacctgcgctgcagcgtcgactttactcgccggacgctgaccgggactgctgctctcacggtccagtctcaggaggacaatctgcgcagcctggttttggatacaaaggaccttacaatagaaaaagtagtgatcaatggacaagaagtcaaatatgctcttggagaaagacaaagttacaagggatcgccaatggaaatctctcttcctatcgctttgagcaaaaatcaagaaattgttatagaaatttcttttgagacctctccaaaatcttctgctctccagtggctcactcctgaacagacttctgggaaggaacacccatatctctttagtcagtgccaggccatccactgcagagcaatccttccttgtcaggacactccttctgtgaaattaacctatactgcagaggtgtctgtccctaaagaactggtggcacttatgagtgctattcgtgatggagaaacacctgacccagaagacccaagcaggaaaatatacaaattcatccaaaaagttccaataccctgctacctgattgctttagttgttggagctttagaaagcaggcaaattggcccaagaactttggtgtggtctgagaaagagcaggtggaaaagtctgcttatgagttttctgagactgaatctatgcttaaaatagcagaagatctgggaggaccgtatgtatggggacagtatgacctattggtcctgccaccatccttcccttatggtggcatggagaatccttgccttacttttgtaactcctactctactggcaggcgacaagtcactctccaatgtcattgcacatgaaatatctcatagctggacagggaatctagtgaccaacaaaacttgggatcacttttggttaaatgagggacatactgtgtacttggaacgccacatttgcggacgattgtttggtgaaaagttcagacattttaatgctctgggaggatggggagaactacagaattcggtaaagacatttggggagacacatcctttcaccaaacttgtggttgatctgacagatatagaccctgatgtagcttattcttcagttccctatgagaaggactttgctttacttttttaccttgaacaactgcttggaggaccagagatttt

SEQ ID NO: 240244 - DNA, 929 bp, Homo Sapiens
  misc_feature (875)..(888): n is a, c, g, or t
aaacctgcttccccactgctcagcctggccatcagccatcccagctgcagagcagtggagagtaggtctcaccagttttgtgcagatgcttctaacccagagtccttctgcttacttcattggacaatattgccctttctaagaaaacccttttagatcctgtactccacttagcaaatgccctgccagcaaagtcacagatgacttttttacccaatcttaggtaaatctggattatctgcccaaccgtgcaagtcaataagccacccttgaaaactgtgtcaagatttgaggaaacaggtcttaagaacctatccaacacatgattccataaccaatacatcttaggttgttttaggcaaataggtgtatctcttgaatcactgatggattcaatatcaagatctataattttcacgtttaaaatttactctgccgaggacattttattggtaaagcaaaaaccagttagtttgacacacacgaaaaagaaaacaaatgttcacagtcctatcttcgtaggattctgtgctataaaattgctccaggttcaagtcttagaccactcttctaaggctgctactgaatataatattaacactggagccaagctaaaactacatgacttcccctagggacagaaaacaagggatgtgtttgaactcatacacttgcagcaaactttactgtcagatataaaattagggctttctcttaaagggcttctttaagagaaatacagagtgtttggtatatgagagaaaaaaagttaaaacaggactttcaacttaatccagacttcctaacagtgtttacatgtgagggaaactcctttaagtaatgcgtagtttttatttttaccatcattggagacnnnnnnnnnnnnnncataaacatctgaagtggaaattataaagatccaacttttt

SEQ ID NO: 240245 - DNA, 1495 bp, Homo Sapiens
  misc_feature (203)..(256): n is a, c, g, or t
  misc_feature (1223)..(1253): n is a, c, g, or t
gaataagaactgcatatatgtaaatgtgctcgagtattcatagactttccctggaaagatactcaagaaacttgtaacagtggttccctctagggaggggattggaagctgggggtcgggagcgggagggggaaactgttcatggtacactacttttcactgtggtctattttataacatgcacatttattacttctttaatnnnnnnnnnnnnnnnnnnnnnnnnnnnnnnnnnnnnnnnnnnnnnnnnnnnnnnacttcctagtatccacggttgtccccagctctgacatcctgcatcctcacagtctgacttctaccttttaacctcccaggtgctctgtcccaaagctctggggccttgaccagggctgggagtgggttggggtgaagagtgcaccaggatccaggaggcagctgaaactggggctgagattcagagtggagtccagttgggggccaaggggctgctgccctagcagagggcaacctcctagccagcatcctgtccctggcttggagcctgggaggggctgctcccagccatgccacatcctacctgacttccagatgtccaggtgggcgtgcagcacatccccacccaggggcgagcgctggcggaactgctcctccgacatggcgcacagctccttgcccgccagctcctggaaggccttgcccatggggggcagccggtattggtgctctgtccacaggagccacttctgcacattgctggggctccagtccatgggatctgggcaagaggcatcccctcagctcaggggtggcctgagagcaccaccctgctgtgatggggcacccatgggaacctgtggcctgagaccatgtgctcttggggatggggataggtcagccccagacaggcccctgagggcccctgtggaagtgggtacccaagaagagagtggggcgagaggaaggaaccagggccctaaaaaatgaacttggttcagggcagggtaacctggtgcatctgtactgcccgcctcacccaggccttgggtcctcccagatccctccagcctctccaaaggacctttcgagggagcctcagccctagagggacagtgacactctaccagaaacacctgggcttctccatcaggtacttcttgcctttcccaaacccctcaaggaaccagagaaacacctacctgggaattagtcttagaaccccaccattctctccagcccctgtnnnnnnnnnnnnnnnnnnnnnnnnnnnnnnncactccatccccttgtcctccacggaataaagggctagacgcacaggagctgctccaggcacatgtgttgaataagtaaatggcagggcacagggtggccatggggcagccacaggccccagaggccaggaggggagcccttggctaggtcctagatgtccccctggggtgctgctctggggtgagcctcataggcctataggtgggggataggctggtgggcatggtcacaatggggccaa

SEQ ID NO: 240246 - DNA, 1210 bp, Homo Sapiens
  misc_feature (69)..(117): n is a, c, g, or t
ttggctcccccatcgctccgcgccccacgccccatccctccctcgctgtcctctccgcgtcccacccgnnnnnnnnnnnnnnnnnnnnnnnnnnnnnnnnnnnnnnnnnnnnnnnnncgtgtattccctcccgctagcctgtggtcccctcacctctgcgtgaccgcctcgtcctggcccagtcttgcctgtggtccccagtggagccccgctggcttcatcagtgcccctgattagttaaggcctggaggtcctagacatgggcatctctgccaccacccagaggcagctgctttcttcccctcccatctccatcagaagtacgtggcatgcctggatgtccctgccctggctgtggcatggcgggcccaaggctcctcttcctcgctgcccttgccctggagctcttgggaagggctgggggttcccagccggccctccggagccgggggactgcgacggcctgtcgcctggacaacaaggaaagcgagtcctggggggctctgctgagcggagagcggctggacacctggatctgctccctcctgggttccctcatggtggggctcagtggggtcttcccgttgcttgtcattcccctagagatggggaccatgctgcgctcagaagctggggcctggcgcctgaagcagctgctcagcttcgccctggggggactcttgggcaatgtgtttctgcatctgctgcccgaagcctgggcctacacgtgcagcgccagccctggtaagtgaggccacacgccaggggcaagacagtgccaggagtgggggcctggtgcccacgcccagggatggccaggatgaccaggagagggattctgggtttctggcaggagcttgcctgggagggagggagggtcattgtcctggtctctgggccctggtcccagtgggagttctgggccccagctgcccaacccacccttgtcactgccctggtgccctggatgagatcccattccaaatggccccctcctatggccctggcttggcttggcctggcctggcctggcattgccgccccctgcaagtggtgaggggcagagcctgcagcagcagcaacagctggggctgtgggtcattgctggcatcctgaccttcctggcgttggagaagatgttcctggacagcaaggaggagggaccagccaggcccccaacaagaccccactgctgctgccgccgcgctca

SEQ ID NO: 240247 - DNA, 1731 bp, Homo Sapiens
  misc_feature (680)..(712): n is a, c, g, or t
  misc_feature (1198)..(1324): n is a, c, g, or t
  misc_feature (1499)..(1574): n is a, c, g, or t
tttttttagaaaacactgagctaaaacacagaatgtgtatttgttggatctgaaccaaatccttttgagatcccaactaccctgaagaacactgaagacatttacggggcatattaaatggtatcttaaatactagttgtatacctcataatgtctaaggcagctattatatttctaaagaaagtagcatttcattcagaggctgcccagagtttaaattacaccatagttttctttctttctgcaaatcattctttctgatttgcagttttttccaaacagagccatattagtggaacaaaagtttgatgttcatgcccaacaagctctgatattttatggatacatttgtataaagcaagacttcttgctctgaaccctgggtgaccacaaataaattgaggggccatgattattggatgctgagagaaagtagcatacttaaacccacagtacagataatcaggaggcaagcaaaaacaaagctataacttagcagtggtattcacccaccacttattccaaaaacatattttgcttattaaataagggaaatatggtccagttttgcaatgttaatagctgccagtctctcatattttttataaatatcatttcctgactagcaatgagctaggaaactggcctcaaattctgaccaaatctctcagtattagttnnnnnnnnnnnnnnnnnnnnnnnnnnnnnnnnncagccaacaggggttaaaagttgcacaattaaacttgaatgtaaattatactatatacagattggtataaacatcactgaaatggttttgaaaggatgaaacacttctattttaacacaatttcttctatattatcccaattttcattaaaggacaactgatatgtaatttttttctttacagatatgaaaaagcaagaaggcaaagctgagagaaacagatgctaccccacagggcagcggtggcatttggttgttttggtctttgtaccagcaattcccactcccgaggcagataatccacttcctgccagactacacagtttttcttgcagtcaagacacgaacaatggaccctactcctccagcagcaagtgcctaaaaacaaaccaagatgtaaatgttgacagaataataaaaggtcaattctcatatttggtaaaacatttttcttaaagaaggaatgggcactgctatagaccctgannnnnnnnnnnnnnnnnnnnnnnnnnnnnnnnnnnnnnnnnnnnnnnnnnnnnnnnnnnnnnnnnnnnnnnnnnnnnnnnnnnnnnnnnnnnnnnnnnnnnnnnnnnnnnnnnnnnnnnnnnnnnnnagatactagtttacattttagtacattaattctaaataatgttttaaaaaatctgcagcataggccgggcgcggtggctcacgcctgtattaggtattataagcaatctagagatggtttaaagtatatgggcagatatgcaaaggtaatatgaaaatatgtatatttacataannnnnnnnnnnnnnnnnnnnnnnnnnnnnnnnnnnnnnnnnnnnnnnnnnnnnnnnnnnnnnnnnnnnnnnnnnnnataatggctgaaacttcccaaatttgatgaaaaacattaatgtacatattcaagaagcccaagaaactccataacccaattaaaatgggcaaaggatctgaacagacatttcactaaagatatacaaatggccaataaacacatcaagagatgccaa

SEQ ID NO: 240248 - DNA, 685 bp, Homo Sapiens
gcaggtatcaaaaacagcaaagagtttatagaatttctgcaccagtttgcacataagtcagtgattacaaaactggcatccaatgtaaatactaagcacaagctcacttccctcttggtcaggtggtttgttttagagctactcgatatttataactttttataagcaccggtcattttttgagaactgatttggtttgtccaacaaagtaaacaattttttgctgtgtggcagtttctttttttagaaaacactgagctaaaacacagaatgtgtatttgtttggatctgaaccaaatcttttgagatcccaactaccctgaagaacactgaagacatttacggggcatattaaatggtatcttaaatactagttgtatacctcataatgtctaaggcagctattatatttctaaagaaagtagcatttcattcagaggctgcccagagtttaaattacaccatagtttttctttctttctgcaaatcattctttctgatttgcagttttttccaaacagagccatattagtggaacaaaagtttgatgttcatgcccaacaagctctgatattttatggatacatttgtataaagcaagacttcttgctctgaaccctgggtgaccacaaataaattgaggggccatgattattccaacttttttgtacaaagttggctttta

SEQ ID NO: 240249 - DNA, 738 bp, Homo Sapiens
acgaaagtggtggctttcttgtgcttttattcattaattcaacagtgacagattatgttctgaagttttatcatttttacaaaacaaaacaaaatgaaacaaaaagcaggtatcaaaaacagcaaagagtttatagaatttttgcaccagtttgcacataagtcagtgattacaaaactggcatccaatgtaaatactaagcacaagctcacttccctcttggtcaggtggtttgttttagagctactcgatatttataactttttataagcaccggtcattttttgagaactgatttggtttgtccaacaaagtaaacaattttttgctgtgtggcagtttctttttttagaaaacactgagctaaaacacagaatgtgtatttgtttggatctgaaccaaatcttttgagatcccaactaccctgaagaacactgaagacatttacggggcatattaaatggtatcttaaatactagttgtatacctcataatgtctaaggcagctattatatttctaaagaaagtagcatttcattcagaggctccacagagtttaaattacaccatagtttttctttctttctgcaaatcattctttctgatttgcagttttttccaaacagagccatattagtggaacaaaagtttgatgttcatgcccaacaagctctgatattttatggatacatttgtataaagcaagacttcttgctctccaacttttttgtacaaagt

SEQ ID NO: 240250 - DNA, 1628 bp, Homo Sapiens
  misc_feature (588)..(600): n is a, c, g, or t
  misc_feature (1187)..(1209): n is a, c, g, or t
  misc_feature (1394)..(1404): n is a, c, g, or t
ttggagtagaccttacagaaatagggggcacggcagacgcggtcctggatatacttcagaatctgaccacagagacgaactcagtgattggtcattagctccaacagaggaagagagggagagcttcctgcgcagaggagacggacggcggcgtggagggggaggaagaggacaaggaggaagaggacgtggaggaggcttcaaaggaaacgacgatcactcccgaacagataatcgtccacgtaatccaagagaggctaaaggaagaacaacagatggatcccttcagatcagagttgactgcaataatgaaaggagtgtccacactaaaacattacagaatacctccagtgaaggtagtcggctgcgcacgggtaaagatcgtaaccagaagaaagagaagccagacagcgtggatggtcagcaaccactcgtgaatggagtaccctaaactgcataattctgaagttatatttcctataccatttccgtaattcttattccatattagaaaactttgttaggccaaagacaaatagtaggcaagatggcacagggcatgaaatgaacacaaattatgctaagaannnnnnnnnnnnnggtattggccataagcaacaattttcagatttgcacaaaaagataccttaaaatttgaaacattgcttttaaaactacttagcacttcaggggcagattttagttttattttctaaagtactgagcagtgatattctttgttaatttggaccattttcctgcattgggtgatcattcaccagtacattctcagtttttcttaatatatagcatttatggtaatcatattagacttctgttttcaatctcgtatagaagtcttcatgaaatgctatgtcatttcatgtcctgtgtcagtttatgttttggtccacttttccagtattttagtggaccctgaaatgtgtgtgatgtgacatttgtcattttcattagcaaaaaaagttgtatgatctgtgccttttttatatcttggcaggtaggaatattatatttggatgcagagttcagggaagataagttggaaacactaaatgttaaagatgtagcaaaccctgtcaaacattagtactttatagaagaatgcatgctttccatatttttttccttacataaacatcaggttaggcagtataaagaataggacnnnnnnnnnnnnnnnnnnnnnnncactgaagtttgataaatagtgttattgagagagatgtgtaatttttctgtatagacaggagaagaaagaactatcttcatctgagagaggctaaaatgttttcagctaggaacaaatcttcctggtcgaaagttagtaggatatgcctgctctttggcctgatgaccaattttaacttagagcnnnnnnnnnnnaattttgtctgccccaagttttgtgaaatttttcatattttaatttcaagcttattttggagagataggaaggtcatttccatgtatgcataataatcctgcaaagtacaggtactttgtctaagaaacattggaagccgttaaatgttttgtaaactttgaaatatatggtctaatgtttaagcagaattggaaaagactaagatcggttaacaaataacaac

SEQ ID NO: 240251 - DNA, 1309 bp, Homo Sapiens
  misc_feature (213)..(227): n is a, c, g, or t
cacttctcaaatcatgaatttgtatcaatttattccccttgcctcattatggacggaaagtgttcttggaaaacggcaggacagttttgggctactgaagaagatgccaaaagcaaatgttcagagatgaaacctgaacagttctgtaatgacaaagcatactaattgaaattagtcacatagttaagagaattcagaggatggaggatcacnnnnnnnnnnnnnnngcctttccggctcatgaatataaaatgtgcttgtaatcttaatactattccatattccagatagagcaggctttaaattcacacttcacaagactccagggaaaataagttactaatgaatggtatttacagtggcagcatcgaagcatgctttcatttactcttctaaagttactgtgtaaactacaagtaattaaaagaaacgcagaaagtagtttctcctattaaatctggttcaggctaaaaataaataaatataattactgaaatgctaaggccagtgaatctgcctctaaactgaaactgggtaaatggcctatcatcaattcccaggagccttaagactattctgggcctgtagggtacagagtcgtgctccataaatatctgtttaatgtccataaatatctgtttaatgcagagcaagacccagggctcctgtcagtatctcctccttcctcatcctgttcccatcatactaaaggtctcaactgttttttcattattgtccctttttagacttttgtttctctctttctgccctcaccccaagaaatgttcatatttgctcaagtattatggtcctttggaaggacacaagacattgcagtatctcagaaccaatctaggggtgatacagcccccattgagaatgtatgctgcagaggactgcaatggtattggatgacaaatgtcagatttatctatagaatatgcttctcgaacagtctgggtaggggcaaaaacaggaccactggccaaaaggatactgcttacttatgaactcttgaggggggacttgagtactacacccaggtactttaatgaaatgacactggagtagccttcatttaagaactgaaatgtgcaacatgtaaaaagtttgctagaagctgggctgcctcaggtagctcctttttgggtggtaatctcgctcctgctcaaaacccgcgtcttcatctcctggtaccattggtgatgtaacaagtacttggtttgtcagtaggaaataaatactccgtgtgattatcatgtaatcttgaacaatctgcaggaaaactaaagagtcttcttaaacccaa

SEQ ID NO: 240252 - DNA, 1157 bp, Homo Sapiens
  misc_feature (224)..(244): n is a, c, g, or t
tcttgttaagaactctgatacaaagcacagtaaaaggccacaaaccagtaaataaacaacgtggcttttggctactttacaactgctgctacagcactatcagcaaaacactctatcactttgaacgaaggcatccaaatggcaaataaaagctttactcacttatctgattaaaatgtttaataaagctttaagtatttgctggtttaaatattaccaatctnnnnnnnnnnnnnnnnnnnnntttcagttaacacgagatttatagagaaagttactaggtcttgaaggcaaggcagttggttcctatgccatagaattttttttgaatttatgaattagtaaagtagcagattgtattataggcctcaagtcacttaaatttatataggttattagcagtatctttaaatatacaatataaacaaaactgtacatacatggcatattaactgttttccataacaataggcaattcattagctaaagacgtcatagtctgcaaaaacaaaaggcacatctgaatgagatacatgccctttttccctccatcattgggttatgtagtctttgtttacattttgacaaaataataaacacttacagtgccattctattattttcatcctacttttcatttttgtcttcagcagcaaataccggcatttaagacatggcattaaagagtttaagaacagttggtgttattcacaattctcctagatgtaaaaactagaagtaaaaactagaagatggtcaaagaggtttaaaaatcagtaacaccatatacccctcccatatttgtgtaaattcactgccttaaaaaggcatctattactcaaatttgaaaaatttcacaaaagcactatcccttttcagtgcaatcatgtcactttaaaccatatttttgcagagtttacagtgcaaatataaattctttatactggccttttggcagcactgaggatccaagacaaggcaatgctactgatcacctgaggataatggtgaaggacttttgtatttttatttttccaattcttaaaagcttatttgatcagtagcatttttgtaagagcattatttgtaaaaagtactaaaatccaacttttttgtacaaagttggttttttataggaaaagcattgctcatcaatt

SEQ ID NO: 240253 - DNA, 1476 bp, Homo Sapiens
cctgcctgggtctgtgtggggtcaggtaaggacacagaacctccaggaccagtggtcactgggcacccttccctctgtgcaccatgaggctggcctggagccctggctggccacctggaggtgaggggtggcttcactccatgagggaggagaggggctagcacgggcagcacagtgggcaggggccatcagaggcaaaagcagcttcccacagaagctcaggagcgcagcacattctaaggactagctctgggccgggaggaggccggagtcgcttctgggacctgtgattgctctccctcctgcagtctcctagccctccttcaggtgtttgtttaataaaagacacaaaacagaaggaaggcaggtttagaaaataaagtttgttgggatcttaaacattttggataaaactaacaaaaaaatatgaacacacattcaggttgtggtgctatgaggagtagcgtcatcttatttagttccttgagatacacgcacggctgctcggtgatcggtgccgccctgggaaaggttggtcaggaggtgacaggggtctccaggaggagctcgggaggtgacaagggtctccaggagggagcaggggctgctcggccaggctgccctggagcttgaggataaggtcaaggttggtatgtgttgctccgacttgagaatgaattaggtgtgtgactgtgtggcatcgtgaacatcagtagtgacgcagccgtggcctgggctttgcctgcagcgcacttaggttacacggagcgggatcagaagcaagcgattcggcacacaggcgtttggccacagcaattaggaaatacatattctgcggcagggacacgatcatattttggcgtgaagaagagggcaagagaagcagaaggagaatgggtcggtaggtgtgaaaagtgtttggcatgcatgggattaaacagaaaaggtgtggctgagatttcccagtggtgctcacagtgcatggacagcgcggggtggggcacggcgggcttcacacagttctgtccgtccctgagtgcttcctcaccaccttgcctccgttcacctggtcgaccgccagggtcttcacctcgggctgggcctgcggcggggtggcgtggtggatccgatgtgccaccccgacgtgggccttgtgcggcttttcgcgggccgggctgtgctgctcgccgcttcggtcggaggcgatgggggggatgacgaggggcctctctttgatgaggtggacctcggcggactccctagccagcagaaatggggtggggtcgggcatagcatccactggttcccgcaaaaggagtttcctgctctctgccccgaatctgtagacctcttcaaattccgggtgcaagggggctgagaggctctttttcatgcggcggcgaggcgtttcgggtagcttgtctttggggggcgctggcttgtagctggccagcacggggctccctgacgggccaa

SEQ ID NO: 240254 - DNA, 1034 bp, Homo Sapiens
  misc_feature (400)..(459): n is a, c, g, or t
ttgggttacggccgaggcggcggcggcggcgagcccgggggcgaggcgcggacgggaacaggaaaagcctccggcagcccctgcgggcggcggcgcagccacggccgcgctccgaggtgaagccgcgcgcggagaggaagcgggtgttttcccctctgcctttcggcccccgcccttcctttcagtttctgcccgctcgctcggaagttggcggttgacaaaaatggcaggagccggggcccgggccggttgccgcagcgccgcggggaccttctgagttggcccggtggcagggagactcgtgcaggggcgtccgatgcgcggggcccggggcctcgggagagctcagctgctgcgggccccagacgaggcgacagggatggacttgcgtagacagccnnnnnnnnnnnnnnnnnnnnnnnnnnnnnnnnnnnnnnnnnnnnnnnnnnnnnnnnnnnntctgtgaaccggcgaggcgggaaggggccgccgtggtgctcggcacgcccgggcgtgtggcgggcgggcgagagcttgagcgcgatccgggcggccgctgtgcgcaatcagtgcaggctcccgcccgactctgactcggcgcggccgcgacagtgccggccacaccctctgccccgctgccgccggcgccgcttcccaagagctggaggcaggagatgcgcccggggcggccgcgcgtcccagagagccagccccggccgccgtcgcggggaagtgccgcctggtggggtcacggcgcctgaagcccacgtgcgccgccgagcccgaggtggcctcgagcgcggcggctgacagcacagcccgcctgagctgcctcccgcgctcctccccgaggaaaggattttgatttcaaagaaaggaaggaaggaatgacaactcccagcttccccgtcccgccctccccgctccgagggccgcgccaggccatgcccaagaatgcggcggcggcggcgaaccaccataaaggactttcctggcagcccggcgactaggagcgcggacagtgagtttgctct

SEQ ID NO: 240255 - DNA, 1246 bp, Homo Sapiens
  misc_feature (519)..(544): n is a, c, g, or t
  misc_feature (688)..(710): n is a, c, g, or t
ttggaattaacctggtattacatgtgttatttcctgatctactattgcaaattgtcacctgttgcaatataaacattctttggcgtatatgttcaaaaatcttaaagtacttcccgagggatattcgggggttattttcgatgaaaaaaatacgatgattattgattttttttccttttattatattaaaaaagttgccaataattcgctgattaacaagcacatgggtttttccttttaagtactaatttggtgaggctctcttcgctggctgggctgctgcttctctctgccttctgggaggtgccctactttgctgttcctgtccccgaaaaacaacctcttacccaacaccaaggccctatccaaaacctgcaccttccagcgggaaagactacgtgtgacacagaggcaaaaggagaaaatcatgttgaaacaaaccgaaaatggacattgagatactatcattaacattaggaccttagaattttgggtattgtaatctaaagtatggtattnnnnnnnnnnnnnnnnnnnnnnnnnnccatgtgttaaaatactcagtgctaaacatggcttaatcttattttatcttctttcctcaatataggagggaagatttttccatttgtattactgcttcccattgagtaatcatactcaaatgggggaaggggtgctccttaannnnnnnnnnnnnnnnnnnnnnncatgtttttctattaaaaatagacagtaaaatactattctcattatgttgatactagcatacttaaaatatctctaaaataggtaaatgtatttaattccatattgatgaagatgtttattggtatattttctttttcgtccttatatacatatgtaacagtcaaatatcatttactcttcttcattagctttgggtgcctttgccacaagacctagcctaatttaccaaggatgaattctttcaattcttcatgcgtgcccttttcatatacttattttattttttaccataatcttatagcacttgcatcgttattaagcccttatttgttttgtgtttcattggtctctatctcctgaatctaacacatttcatagcctacattttagtttctaaagccaagaagaatttattacaaatcagaactttggaggcaaatctttctgcatgaccaaagtgataaattcctgttgaccttcccacacaatccctgtactctgacccatagcactcttgtttgctttgaaaatattt

SEQ ID NO: 240256 - DNA, 1604 bp, Homo Sapiens
  misc_feature (735)..(791): n is a, c, g, or t
agcacgtcctcaagcagctggagcgggtcaagatcagcggacagctctcccctcgcctcttccggaagctgcctccccgggtgtgcgtgtccctcaagaacattgtggatgaggacttcctctatgcaggacatatcttcctgggcttttccaaatgcggccgctacgtcctctcctacaccagcagcagtggggatgactacttctccttctacatctaccatctgtactggtgggagttcaacgttcacagcaagctcaagctggtccggcaggttcggctattccaggacgaggagatctacagcgacctgtacctgaccgtatgcgagtggcccagcgacgcctccaaggtcatcgtcttcggcttcaacacccgctcggccaacgggatgctcatgaacatgatgatgatgagtgacgagaaccaccgtgacatctacgtcagcaccgtggccgtgccaccgccaggccgctgtgctgcttgccaggatgccagccgagcccacccaggagacccgaatgcacagtgcctacggcatggcttcatgctgcacaccaagtaccaggtggtctaccccttccccaccttccagcccgccttccagctcaagaaggaccaggtggtgctgctcaacaccagctactccctggtggcctgcgccgtctccgtccactcggcaggtgacaggagtttctgccaaatcctgtatgaccacagcacctgccccctgnnnnnnnnnnnnnnnnnnnnnnnnnnnnnnnnnnnnnnnnnnnnnnnnnnnnnnnnnttctgccctgaggcggccccagcccgttcttctgggtctcctgagccctcgcccgccattgccaaagccaaggagtttgtggctgacatcttccgccgggccaaagaggccaagggcggggtccctgaggaagcccggcctgccctgtgcccaggaccctctggcagccgctgccgtgcgcactctgagcccctagccctgtgtggagagacggcaccccgggacagcccccctgcctcggaggcacctgcctccgagcctggctatgtcaactacaccaagctgtactatgtgctggagtccggagaggggacggagccggaggatgagttggaggacgacaagatctccctgcccttcgtggtgactgatcttcgtggccgcaacctgcggcccatgcgggagcggactgctgtccagggccagtacctgacagtggagcagctcacactagacttcgaatatgttatcaatgaggtcatccgccacgacgctacctggggccatcagttctgttctttcagcgactatgacatcgtcattctggaggtctgcccagaaaccaaccaggtcctcatcaacattggcctgctgctcctggccttcccgtcccccactgaggagggccagctccgaccaaagacctatcacaccagcctcaaggtggcatgggacctcaacacagggatcttcgagacagtcagtgtaggcgacctgactgaggtcaaagggcagatcaggtgaggcagggctgggggggcagggtcaagggcgcggccaaagcgacgagagccactcaccccctggccccgc

SEQ ID NO: 240257 - DNA, 1477 bp, Homo Sapiens
aaaaacaaacttttaaagtatcatatttcaattgactaaaaatatagccaaatctgtcacaacacaacataaagtaatggacaattatagaatattttaaattaacagtaacaagccatctacatcaaatttatttccaactaaaaccaaacaaaagcacaacaatcccgtagtgtaccaagtgtgtatttcaatttactgtatgcaatctaacaaaaatttggtcataatttaccagatatacataaatgatttaagtagtaaaagaaaattcagcttcaagagagtaagttcatatcttgaggaaaagtaaaagtacattaagaatgtaaagccaagtccagtttctatgcaataagtgaactgtagtctaataaagcagatttaggtgatttttagatatatatctttgttctttaatatatatttatatatagacagatctaccaattgtaaactagtttatttaaaggaaggggataaatgggatgaaagaaatctttatactatacttacatattcacaaagaacattttacgtttaaaatactttttcattcatagtatctttgcccaactaatttctaccagaaatacattttactcatttgtctagaacattaagaagtactcatctgttttaaacaaaaatcaaaccgaaactattcttatctgtcaggtttacagttatgtagaaactacaatatagatgacaaaagatgcatctaaccatgtaactgtaatttatctttgatttatccaagcagaaacatcattgtctaacaataaaccattattctactgaaatcagagacaatgataaagcttgtctcttaaaaaacatcaacttttcaactttgatcagatggagcaccaaagggattatatctgtcaaagcatctttgcaattttttccacataactagcataatttagttacctgatataaaataggaaaatatactcaatttttatttaaaagaaagctgaaaatatgacatccctcaatcttatataatatacaatatgctaataaatgccatacatgttaacaatacgtgaaatgctgctgagagttccacaatcagctaattcatgtcaccaggctaagtaaatctgacaatttcacctcaatgtgtcaccctttgtaccctgaagaatttatagaataataaagcttctcagaattttatttgtaagatttttgagactgttgaatcatggtgactactagaaagactgtatcaaggtgtagtgacttcaaggacagaaaaaaataaattaagtattgatcataatttcaaaacaatcaatatcccgctaagtatgaaacaaaagagaatgcacattttgtgttaattttcatgataaaagggacacgggtaaaaacctgatatttcacttatattgcataacaagctaaccaaactggacatggtggataaattataaaacaaatcattttacttatttgtaca

SEQ ID NO: 240258 - DNA, 1511 bp, Homo Sapiens
  misc_feature (1058)..(1081): n is a, c, g, or t
  misc_feature (1090)..(1127): n is a, c, g, or t
  misc_feature (1174)..(1249): n is a, c, g, or t
ggaataatttatttctggtaatttatggattatctacaaaaccaatataagtggatgttattagagacctttaaaaacctataattttactcatatttgctgcaaataagagtaatgcaaatgtaatgctgaatggaacttttgaggcattaaagatttttttcctatatagtgaggaataaaactaagacttgattgaaataacttttttaaaaaaaaggatttgagcacaacaggacaacaaaaattggccctttgtacacttcggtgcaatttctgtcttagctgctgagaagcagaggaaaagcaccaccttgctcagaaactaccttctccacaatactgagaaacacaccaaacaggggcaaggctttttgaagctaggaataaagaagctgcccatctttactaataggaaacaacgggttttaaggtacccagtaagagtctttcttcaaaacagacatctcacttaccttttcagtatacttcctaaaaacattaaagacagatgtaaggcttagctggtaatttccatgaactcagtcttttcctctgactgtggtggagcagacacgattaagcaggtttggaaatgctagaaatgaattcctacttccccttgtattcttcagatctcattttcccccaaatttctgcagtggttggcttccatttcagcatcagtcacgaaatcataaaatcaggcagttatccttgctgactggtcctggattccaaatgacacattccttctcaatgtattcaatccatcagcagctcagaagcaatccacactggagaccatttaaaaacgtgcattttgcaataaccattatctatcttagcagctagaaaggcaaaacaaaagttagcatatcaaactatctttaggggctagagcagaatatgaattcattaacgataaatataattactagaaacaatgaaaactgatccagaggaattttaagaaaacaaaaaaaccctcaaaatgtctattatgccaagtacggtcaaagtattcaagcatcctcctccctctccacaacttctannnnnnnnnnnnnnnnnnnnnnnnaaggggtgnnnnnnnnnnnnnnnnnnnnnnnnnnnnnnnnnnnnnntattcacaagtacagtcattgtgcactacagccttgaaggcctgggnnnnnnnnnnnnnnnnnnnnnnnnnnnnnnnnnnnnnnnnnnnnnnnnnnnnnnnnnnnnnnnnnnnnnnnnnnnngttagattccagaagtgtaagaagtataaaatatcatggatgatatttagtattcactaaactggaaggagagccaatgaatttacttatactgcccaattaaataatcaacattgaactcatcttcaatcccagaaaaatccatgaatgaaaactggacatagcaacaattgctactgatgccagactgaaatagcaaagggcaagaggaattcatgctacctactcttcactttataaagaaaaatccaacttttttgta

SEQ ID NO: 240259 - DNA, 1698 bp, Homo Sapiens
ttggctccccagaaggtgatgtgtgtgagcatgggctccaccacggtccgggtaagttgggtcccgccgcctgccgacagccgcaacggcgttatcacccagtactccgtggcctacgaggcggtggacggcgaggaccgcgggcggcatgtggtggatggcatcagccgtgagcactccagctgggacctggtgggcctggagaagtggacggagtaccgggtgtgggtgcgggcacacacagacgtgggccccggccccgagagcagcccggtgctggtgcgcaccgatgaggacgtgcccagcgggcctccgcggaaggtggaggtggagccactgaactccactgctgtgcatgtctactggaagctgcctgtccccagcaagcagcatggccagatccgcggctaccaggtcacctacgtgcggctggagaatggcgagccccgtggactccccatcatccaagacgtcatgctagccgaggcccagtggcggccagaggagtccgaggactatgaaaccactatcagcggcctgaccccggagaccacctactccgttactgttgctgcctataccaccaagggggatggtgcccgcagcaagcccaaaattgtcactacaacaggtgcagtcccaggccggcccaccatgatgatcagcaccacggccatgaacactgcgctgctccagtggcacccacccaaggaactgcctggcgagctgctgggctaccggctgcagtactgccgggccgacgaggcgcggcccaacaccatagatttcggcaaggatgaccagcacttcacagtcaccggcctgcacaaggggaccacctacatcttccggcttgctgccaagaaccgggctggcttgggtgaggagttcgagaaggagatcaggacccccgaggacctgcccagcggcttcccccaaaacctgcatgtgacaggactgaccacgtctaccacagaactggcctgggacccgccagtgctggcggagaggaacgggcgcatcatcagctacaccgtggtgttccgagacatcaacagccaacaggagctgcagaacatcacgacagacacccgctttacccttactggcctcaagccagacaccacttacgacatcaaggtccgcgcatggaccagcaaaggctctggcccactcagccccagcatccagtcccggaccatgccggtggagcaagtgtttgccaagaacttccgggtggcggctgcaatgaagacgtctgtgctgctcagctgggaggttcccgactcctataagtcagctgtgccctttaagattctgtacaatgggcagagtgtggaggtggacgggcactcgatgcggaagctgatcgcagacctgcagcccaacacagagtactcgtttgtgctgatgaaccgtggcagcagcgcagggggcctgcagcacctggtgtccatccgcacagcccccgacctcctgcctcacaagccgctgcctgcctctgcctacatagaggacggccgcttcgatctctccatgccccatgtgcaagacccctcgcttgtcacgtggttctacattgttgtggtacccattgaccgtgtgggcgggagcatgctgacgccacgtggagcacacccgaggaactggagctggacgagcttctagaagccatcgagcaaggcggagaggagcagc

SEQ ID NO: 240260 - DNA, 1393 bp, Homo Sapiens
ttggtgtgtctgtacttcatgaccactccatctacacacttggtgcccgggatgacgatggctgtgagtctcccatggtgactgccaccggtgaggggcaggagggctgtctgcaggcagatgcgatggagcccagctcctgtcacgtctgctgccaccgacctgggcgtcccacccctcctgggaggaaggaagcctctcttccatcttgagagacctgccaggcagggcctagtgcccccactcagcaccccgccaccaaaacaggctccacatgctcatggcacaacaccgccctctgtcctctcccaccctccgccatccctgtcgccgcatgtgctgctgtctccatgccaccagttccaagtgctccatggtcacacatgttcacatgtgcacatacatgcgttggggctttctctgccacactgctcaagcctcacactaatgctgcctgtgtatgccctacctcccctaggtatgcgagaccacccacccatccccatcaccgacctggcggacaacatcgagcgcctcaaagccaacgatggcctcaagttctcccaggagtatgagtccatcgaccctggacagcagttcacgtgggagaattcaaacctggaggtgaacaagcccaagaaccgctatgcgaatgtcatcgcctacgaccactctcgagtcatccttacctctatcgatggcgtccccgggagtgactacatcaatgccaactacatcgatggctaccgcaagcagaatgcctacatcgccacgcagggccccctgcccgagaccatgggcgatttctggagaatggtgtgggaacagcgcacggccactgtggtcatgatgacacggctggaggagaagtcccgggtaaaatgtgatcagtactggccagcccgtggcaccgagacctgtggccttattcaggtgaccctgttggacacagtggagctggccacatacactgtgcgcaccttcgcactccacaagagtggctccagtgagaagcgtgagctgcgtcagtttcagttcatggccttcctacgacgggtcaaggcctgcaaccccctagacgcagggcccatggtggtgcactgcagcgcgggcgtgggccgcaccggctgcttcatcgtgattgatgccatgttggagcggatgaagcacgagaagacggtggacatctatggccacgtgacctgcatgcgatcacagaggaactacatggtgcagacggaggaccagtacgtgttcatccatgaggcgctgctggaggctgccacgtgcggccacacagaggtgcctgcccgcaacctgtatgcccacatccagaagctgggccaagtgcctccaggggagagtgtgaccgccatggagctcgagttcaagt

SEQ ID NO: 240261 - DNA, 909 bp, Homo Sapiens
aaaagaatattttcctattgatattgatatcttttctctgtgcaaactgcaatcttaccaaatcttgaatcctcaagcaaactactgatatgaaatttttgtagaaagatagagcttggagcattactgctgataaattctaacaacattatgtatttttcttttaagtgataaattgtgtgcgtagtagtagtagtgagccgatagataaataaaaggccagatatcgtgattctgatatatcttgctgcatttaaaattttttatgtcactttctcattatttcttctgtttttttctctgatcactggtgtctgtaatgtttaatgaccaaacatcaaaatcttagaatttagctcttcttctcattagctcttttattaagtgtctgggagataaggcctcatgtaatgcaacacagataaataatttttaaaatatttatcatatagcttttttcagtggctcttgtgcttcagtgtgtggagaggcattcagaaatgtaccaaacctgcaatgttacactcctgtttactatagtgaaaacaaaaacatttttaatttagatgtttagagtgagttaatgaaaacctttcaagaatgggctgtttaagactactcccagcatttcaagcccctttagctatattgcactgagagggataaccatgcagcccctgatgaaaatgaaaggagggttttcattctctgagctgctgctcatgcactgcttgtcctaggagggcaacagagttgacgtgagcaacagatgattaattccctgcagtggcaaagggctactcttctcatctacagaactatcatcctttaattagttaataaaacctaataggcaaggacatttttttccttttctttagagacagagtcttgctctgttgcccccaa

SEQ ID NO: 240262 - DNA, 1184 bp, Homo Sapiens
  misc_feature (406)..(440): n is a, c, g, or t
  misc_feature (697)..(717): n is a, c, g, or t
ttggctcatgggggcaaggtcttgagcatggcccctggcctcacctctgtggaaatcattccattccgagtggctgcctacaacaaagccaaaaaagccatggacttctatgatccagcaaggcacaatgagtttgacttcatctcaggaactcgaatgaggaagctcgcccgggaaggagagaatcccccagatggcttcatggcccccaaagcatggaaggtcctgacagattattacaggtccctggagaagaactaagcctttggctccagagtttctttctgaagtgctctttgattaccttttctatttttatgattagatgctttgtattaaattgcttctcaatgatgcattttaatcttttataatgaagtaaaagttgtgtctataattaaaaaannnnnnnnnnnnnnnnnnnnnnnnnnnnnnnnnnnaagtcaaactgaagaccaaatcttagcaggtaaaagcaatattcttatacatttcataataaaattagctctatgtattttctactgcacctgagcaggcaggtcccagatttcttaaggctttgtttgaccatgtgtctagttacttgctgaaaagtgaatatattttccagcatgtcttgacaacctgtactcttccaatgtcatttatcagttgtaaaatatatcagattgtgtcctcttctgtacaattgacnnnnnnnnnnnnnnnnnnnnnctcactctaaaagaggtgtggctcacatcaagattcttcctgatattttacctcatgctgtacaaagccttaatgttgtaatcatatcttacgtgttgaagacctgactggagaaacaaaatgtgcaataacgtgaattttatcttagagatctgtgcagcctatttctgtcacaaaagttatattgtctaataagagaagtcttaatggcctctgtgaataatgtaactccagttacacggtgacttttaatagcatacagtgatttgatgaaaggacgtcaaacaatgtggcgatgtcgtggaaagttatctttcccgctctttgctgtggtcattgtgtcttgcagaaaggatggccctgatgcagcagcagcgccagctgtaataaaaaataattcacactatcagactagcaaggcactagaactggaaaagaccacagaaaacaaagaatccaaccctttc

SEQ ID NO: 240263 - DNA, 1042 bp, Homo Sapiens
  misc_feature (182)..(210): n is a, c, g, or t
  misc_feature (473)..(492): n is a, c, g, or t
ggcaagattattacatggtccctaggagaagaactaagcctttggctccagagtttctttctgaagtgctctttgattaccttttctatttttatgattagatgctttgtattaaattgcttctcaatgatgcattttaatcttttataatgaagtaaaagttgtgtctataattaaaaaannnnnnnnnnnnnnnnnnnnnnnnnnnnncttacaaagtcaaactgaagaccaaatcttagcaggtaaaagcaatattcttatacatttcataataaaattagctctatgtattttctactgcacctgagcaggcaggtcccagatttcttaaggctttgtttgaccatgtgtctagttacttgctgaaaagtgaatatattttccagcatgtcttgacaacctgtactcttccaatgtcatttatcagttgtaaaatatatcagattgtgtcctcttctgtacaattgacnnnnnnnnnnnnnnnnnnnncactctaaaagaggtgtggctcacatcaagattcttcctgatattttacctcatgctgtacaaagccttaatgttgtaatcatatcttacgtgttgaagacctgactggagaaacaaaatgtgcaataacgtgaattttatcttagagatctgtgcagcctatttctgtcacaaaagttatattgtctaataagagaagtcttaatggcctctgtgaataatgtaactccagttacacggtgacttttaatagcatacagtgatttgatgaaaggacgtcaaacaatgtggcgatgtcgtggaaagttatctttcccgctctttgctgtggtcattgtgtcttgcagaaaggatggctctgatgcagcagcagcgccagctgtaataaaaaataattcacactatcagactagcaaggcactagaactggaaaagaccacagaaaacaaagaatccaaccctttcatcttacaggtgaacaaactgtgatgatgcacatgtatgtgttttgtaagctgtgagcaccgtaacaaaatgtaaatttgccatt

SEQ ID NO: 240264 - DNA, 1481 bp, Homo Sapiens
  misc_feature (59)..(73): n is a, c, g, or t
ttggtcttctcctcccactccctcctttggtgtgaatattggcttcccaattaagaccnnnnnnnnnnnnnnnccagtttgttttagcttattataggttttggaggaactttgccattttgtaatctttcaaatcattcttcacccttcctcacatcagcttcctgcttttcccagtgttttactgtaaattgtgtagcatatgacaaatcttgagctgactttcctcttcacctgttatggctggagtattttccaaacctgaagggactcacacttgttttgatacttggatcacatctccgtgaggttaggaaggtaaatctaccaacaggaagccctgtactctgtattccaaggccattggtaaatgtgttggtgccactgatcggactgtatgaccttaaacaagtcaccttagttttcagtgaaatgggaatatcattgtctcctctttcatgaatgctgtgaaaatcaaatgtgcaacaggtacatacttgccctttgaaatctatacctctggatacattaaaggcattttattaacaaaggcccttctaaatgtgctatttatttgacaataactatcagatttgccttaattttgtgtttatagcatttatcaaaacgtatcctcatagactttatgcagattaatatggtcaattgatttggataaaagaaagtaatttcagggtttgtttttaagccaggacaagaagtgcaaatgcctctttgaagcaatttaggctaaactgattttgaaatttcaaaatgttttattttactttgttttattaagccaggacaagaagtgcaaatgcctctttgaagcaattcaggctaggtaaaccgattttgccatttcaaaacgttttattttactttgttttatatcagagtcttataaaacctgctgcaaatatttctgaatgtctttgtaaaagtgtttgttagtgtacctgtgattatagtacttcacttttttcctttggattaattggttaaatgaatgagaaatgtgttatgttttttactaaaaagtataaattaaaattttggaaagaaaaggcaatattatctggctccccaattaaagtttgattttattgtcacaaaagcagtctataactttttattcctttaaagaatttcagcaattatgaaatcacaagttgatgctgaaagaatatcccacttttcacacatatagcgtgtaagctgatgtgcataaatatgactagaagttgcttagaacatttaaagaatgtagcttgttttgaggtggtgggagggtacaactgacagtaataactagctaattgtctacatttctgcattaaaagtggaacatctttatacttctactttttaatctattcttggagtggggaggggagaaagtgttctaaattagaaaaccaaagctatagatttagctctatctttccctacctgtaccatcagattgggtctttcag

SEQ ID NO: 240265 - DNA, 1298 bp, Homo Sapiens
  misc_feature (1056)..(1068): n is a, c, g, or t
ttgggtcagcaagaccatggggacttcaagagcctgtggtcaggaaatcaggtccagccttccctgtagccagacagtttatgagcccagagcctcctgccacacacatgcacacatatctagcattctttccagacagcatcctccccgccttccaccttggtagatgcaaggtctatctctcccatcagggctgccaaagctgggctttgtttttcccagcagaatgatgccattctcacaaaccaatgctctatattgcttgaagtctgcatctaaatattgatttcacgttttaaagaaattctcttaaattacaattgtgcccaatgcagggtggctctggggggcaagtaggtggtacaggggattggaaacatgctccgcgcctccagagaaaagttgctcccgaggtccatgcccctggaacgtgttcctatcactctggctggttggggtccttagactgggtgcttatgattaaagggtcttggttagcccactttccctctccatgtggagatggaaggtagagaaggatacagtgtctatcctcaagttgctacggttcagtgagagaggcagacatctgaacaggcaggtaggattcagtgtgctcagtgcactggggatttggagagagatgggcttgctctctctgtgcacccaggagggccacgcacttaaaactgtgtttgtggatcagagaaggctttatagcacagggggcattcagatgagtcttagaggaagagaagaaacatggcaagcagattacatctgagccgtttgaattgtgtttttctttcttcccatgtttattttctaagatctacctgaacttagagactcaagatatttttttaggaaacctcctacccatgtctgaggtagcaagtgcagcctcacgacagataccaggcaatccagagccacaaaacgtgattcctccaggctctgcctggcctgaccctgtcctgtcagctgggtttacataccagtcccattcttccttttcaatacctacccccaaatcttctcctaaccaccatctgnnnnnnnnnnnnnaaagcattttttgctttaaaagcatcctgaccccaatttctttgagctcacgggccttttgctgaaggtctctcagggtgtagtggtgtggctctctggacttaacgtcactctcagaggtcagagctttggagatcagaactgattctcaccaggtgtgagaggtgtggtagcagattgcaatgctctgcacctcttccttgcaagtgagcaacttcacgctctctggg

SEQ ID NO: 240266 - DNA, 1140 bp, Homo Sapiens
  misc_feature (104)..(116): n is a, c, g, or t
  misc_feature (761)..(849): n is a, c, g, or t
ttggtctgcctggcccgaccctgtcctgtcagctgggtttacataccagtcccattcttccttttcaatacctacccccaaatcttctcctaaccaccatctgnnnnnnnnnnnnnaaagcattttttgctttaaaagcatcctgaccccaatttctttgagctcacgggccttttgctgaaggtctctcagggtgtagtggtgtggctctctggacttaacgtcactctcagaggtcagaaccttggagatcagaactgattctcaccaggtgtgagaggtgtggtagcagattgcaatgctctgcacctcttccttgcaagtgagcaacttcaggctctctgggcagaggctggcccactgtagtttgcagacatgctctccagatggttttactaagtcccctctccctgatagggaatcctgctggaccagcgcagccctggtgtggagaggttaaaagacttgcacaggatcaccaagtcatgctgtagagccaggattcctagacccagggctctgcactctcaaggctggccccatgtgctcaaggggatctaatgtttgggctccaaactaaccatctcggagctgggctcctcatttactgccaaaccctcagcttatgtagctagaaagggccctggagtgagaaagcctggattttcaaattgatgctcccctactgactagctgtgccactctgggcaaatgctcttccttgagcctgtttccacacctgtaaagtggggatgatgatnnnnnnnnnnnnnnnnnnnnnnnnnnnnnnnnnnnnnnnnnnnnnnnnnnnnnnnnnnnnnnnnnnnnnnnnnnnnnnnnnnnnnnnnntccttcctgcctttagtagggacctgctctgtgctcacacctcggctgcatgcaccctgctgtgacggaggctagtgtggaagaggtcctgtcctcagggaattaactgtcttattgggagacaacaactgtcctccttggaacacccaagaaaccatgcaaagcagtggacaacacagaacacgccctcctcctcgctgcctgcagctccaatctgattctgcttgggatgggcggagcacgtgggctgcttactgctgtatagggacagcccctaccctctctgggccc

SEQ ID NO: 240267 - DNA, 286 bp, Homo Sapiens
ttgggagcaggccggccccgggctccaccgcgcccgcagcccacggtgtcacctcggcaccggagagcaggccggccccgggctccaccgcgcccgcagcccacggtgtcacctcggccccggacagcaggccggccccgggctccaccgcccccccagcccacggtgtcacctcggccccggacaccaggccggccccgggctccaccgcccccccagcccacggtgtcacctcggccccggacaccaggccggccccgggctccaccgcccccccagcccacgg

SEQ ID NO: 240268 - DNA, 1652 bp, Homo Sapiens
  misc_feature (233)..(251): n is a, c, g, or t
  misc_feature (536)..(562): n is a, c, g, or t
  misc_feature (1318)..(1330): n is a, c, g, or t
ttattgctgtctattggagcagcatcgtggcacatcagcaggcaatgatgatgttgagaacagcagcaaaaataaacaatcgtatgctcatgaagaacccaagctacaaaatggatacctttcagaaaagtatatacttaaaagacccaagacgtcaggataataaagctctgtatttataatcttttatatgtcctattgtggctattatgcttaagtaaaatagctaaagnnnnnnnnnnnnnnnnnnncagaaaagatgacaatatcataaaaatgtagctgtctattttggcagctatattgcagaatttcttgactatcttttaatcagctgggaaaaagtcaataactgtatgcaaatgaataaactgtccatatcaaaatacaaaagtactatcaataatcacctctgactttcagatttaaattcagtgcaattgacaaatgcatcactaaaggaaaatgcagcttaaaagatactcaaaacatttgtgtctattcctgggagcacattttaaaattattgcacagannnnnnnnnnnnnnnnnnnnnnnnnnnaaacaataacagaggtcaaccacagatgtggacctccagcaataaaagcaggaattcaagtgccagatactcagcatattaggtttcctacgtaagtcacagggtaatatgttctaaatatctctaatgtgatccaaaaccctaaaaagagctggcacaaaaccatcgtgaatgactgcctctcttgatgtaaatttttaaaaatattattacagtatcatagtccccactaacaacaactggggtacatataacaatgtattgtgaaattaagtgtatttattctctttaccaatagcaaatgctaccctaccttagtaaaaccaagacttgcttcaatcaatgctgttttgtaaaaatagcaaagcaacgaatgctgaaatcaatcaaagctgcattacttgggttaaatcagtttctacttagaacacaggttaaaattttagtactaaaaggcctcaaaataattagtgacagaaatagtgttattaatttgctaagctcaacaataagcaattccttaattaaaatcttcgagatataaatttgatgactattctcttcagaaatgacatacctggattatgttaatcatgacaagccttattagtcacacatataaacatggcctcatgcaatcatttgtctgtatatgttactctaagttgcatgagcacaaggtttaatatctatatctttaagaaaatacttgatattataaacagagtaaaagacatgatatagtagtgattactnnnnnnnnnnnnnttagcagcttaaatctatctatatttgaaaaaacgtagtcacaagtaccacaaatgcagaatcagagcagcaggaagaaggttagtgcaattatactttcattaaaaaaaattctgaatcactgctatttaaaaacaccttgaagcaagtcttttgtttgagattgttttttaaactaaggtagcaaacattttgccatgtaatggcagtgttatatgccgttatcttgctttgtataaagaaaacaacatgagagatttttaatactggagtttggttacattacatatttaagcttctacacagaatgatggacacccaa

SEQ ID NO: 240269 - DNA, 1123 bp, Homo Sapiens
taaaacttgtcatttttgctcacttaagtatgatcatttgtgattcctttaaatagcaaaaatgcacagtcctctttaggcctctactcaataatagtttacattactcttaacaaaatcattctacataaacagatagctcttaaaaatagtactctctcattaaatctaatttgacagaaagaagtttaagggaaaaaggagtgctttgtaagtgaaaaagtacaaatctttggcctttctcttgacattttcgtatgtcaaaaagcaaaaaaccttcatgtatttcaatctagtgattactttttgcaccataatttgttttttacaccacaaaaggaggcactttcagtatctgtaaaaggtatttaatcctaaaacatacttacctagagaataattaaaacagaattcaatacaatctagtatctattaggaaattaagagttatcacttctaaaagtcatttgaaagtcaatgatgttatctggtcaatggcaggaaatgggaactggaacaaatataagaacttatgggatttcctacacggagacaaaaaaagatattcctttatgttgtttaaaagtggcagctgctctttctttattccattttaatcaatgagtattgattcaagttttcctttctatttttccttatgataagtttcttacagtagcttatacaacaacaaatagcatagaaaaactactggattcaattgatcatcaggaataagttctcagaaaaacacaggcggaaaaataagcaagaatcccaaatacagaactttacaagctgtgaaacttggtctcttgcaatcatgttactgctcaaattagagacaatcttattgctgtctattggagcagcatcgtggcacatcagcaggcaatgatgatgttgagaacagcagcaaaaataaacaatcgtatgctcatgaagaacccaagcctacaaaatggatacctttcagaaaagtatatacttaaaagacccaagacgtcaggataataaagctctgtatttataatcttttatatgtcctattgtggctattttacttaagcataatagccacaataggacatataaaagataataaagctctgtatttatccaa

SEQ ID NO: 240270 - DNA, 2069 bp, Homo Sapiens
  misc_feature (933)..(945): n is a, c, g, or t
  misc_feature (1225)..(1252): n is a, c, g, or t
taaaatttgtaattttatatgggcctaaagtatatatctgggaaacaatacgtttaagaaaaacagtggtttgggttctgatggcagttattaatcagtaacaccagtatgggagagaatgaatgtgttataggttatgaaggctaacttggaaaaaaaggtttattctacaatagaacactggagaagtaaaagcaattaaaatgtaaacaaactgtaaacaagaaataccatccctctctctttacctgactagtaaatagtctatataaactacatagacatcaaaggttttatatatgtacacagccaacataatatcaaaatatattttattctggacctctttcagatctgattcaaattacagttgtcaaagcaatacaatgcaaaggggaactgcaacaacaacaacaacaagaaatgtgcctagaaaggataaaagggtcactggggacaaatcattgtgatgtggaactaaaatacgtcgtaagtgtaattaacatggtccaggacagcacagaacatctacatcagtcttccttacacaataatcatgaaaactgaacaatgaagttctttaacatgtacaaaaacctgtcatgggctggtttacacttttacaacagttttaaagttaactggataactaaagaaatgatgcagacattttaatccagtgctataggtaggctcacagaattagacccaaaggatttgtaaaaacaaaaatggaaacagtatagctacaatgtcaaagtcaggaaagaagaaaatttacttccgtattcaaggattacagagctacaaatgcagtctgtgtgtttttgtttgtaatgagatggataagtacatcagactagatacaacatgcagaatgttttcctgaacttatccggaaattccaaagaaaacatcatgaaacagcttacnnnnnnnnnnnnntatatgccctagttattcaccctgcttcaacactgtcaacgtaaaggcagaaataaagcaagctatcaatacctcagaactactgatataagacatcaaatttctaaatcagtgtattaaaaaagtgaacacttcctctttcttctctcttctacatttaactagaatcatgtttaaaaaaaactgatattaaatgtgacacttcagagctactactggaaggagtaattcataacttccctaccctccttccatccctgctgattcaggagaagggggnnnnnnnnnnnnnnnnnnnnnnnnnnnncaaccagggtctcttgtagatttgctgctattccacaaaatgttggcatttgctgccatgccacaatgttggtccactgaaataggatttctgcggaaactgtcaacagtagtaattcaccatatgcaagtaccatccttatcatgcgagaataatcacaggttctgtagaaatgtacaatgtgcttaagataatgaaaattgtagcgctgcatttgagatttatttctctacttagctagtaaaacttgtcatttttgctcacttaagtatgatcatttgtgattcctttaaatagcaaaaatgcacagtcctctttagccctctactcaataatagtttacattactcttaacaaaatcattctacataaacagatagctccttaaaaatagtactctctcattaaatctaatttgacagaaagaagtttaagggaaaaaggagtgctttgtaagtgaaaaagtacaaatctttggcctttctcttgacattttcgtatgtcaaaaagcaaaaaaccttcatgtatttcaatctagtgattactttttgcaccataatttgtcttttacaccacaaaaggaggcactttcagtatctgtaaaaggtatttaatcctaaaacatacttacctagagaataattaaaacagaattcaatacaatctagtatctattaggaaattaagagttatcacttctaaaagtcatttgaaagtcaatgatgttatctggtcaatggcaggaaatgggaactggaacggaatataagaacccaacttttttgtacaaagttgcctttaaagaaaagcattgctc

SEQ ID NO: 240271 - DNA, 906 bp, Homo Sapiens
gtcagagtcttcacgaagatctgcattgtctaacaaaaaagccaaaaacggccagaatttagcggacaatttactagtctaacactgaaaattacatattgacccaaatgattacatttcaaaaggtgcctaaaaaacttcacaaaacacactcgccaaccccgagcgcatagttcaaaaccggagcttcagctacttaagaagataggtacataaaaccgaccaaagaaactgacgcctcacttatccctcccctcaccagaggtccggcgcctgtcgattcaggagagcctaccctaggcccgaaccctgcgtcctgcgacggagaaaagcctaccgcacacctaccggcaggtggccccaccctgcattataagccaacagaacgggtgacgtcacgacacgacgagggcgcgcgctcccaaaggtacgggtgcactgcccaacggcaccgccataactgccgcccccgcaacagacgacaaaccgagttctccagtcagtgacaaacttcacgtcagggtccccagatggtgccccagcccatctcacccgaataagagctttcccgcattagcgaaggcctcaagaccttgggttcttgccgcccaccatgccccccaccttgtttcaacgacctcacagcccgcctcacaagcgtcttccattcaagactcgggaacagccgccattttgctgcgctccccccaacccccagttcagggcaaccttgctcgcggacccagactacagcccttggcggtctctccacacgcttccgtcccaccgagcggcccggcggccacgaaagccccggccagcccagcagcccgctactcaccaagtgacgatcacagcgatccacaaacaagaaccgcgccaacttttttgtacaaagttggcttt

SEQ ID NO: 240272 - DNA, 461 bp, Homo Sapiens
ctttgtacaaaaaagttgggccaccctgcccctgaaagctccgtcttagaggtgggatgcagatcttcgtgaagaccctgactggtaagaccatcactctcgaagtggagccgagtgacaccattgagaatgtcaaggcaaagatccaagacaaggaaggcatccctcctgaccagcagaggttgatctttgctgggaaacagctggaagatggacgcaccctgtctgactacaacatccagaaagagtccaccctgcacctggtgctccgtctcagaggtgggatgcaaatcttcgtgaagaccctgactggtaagaccatcaccctctatttggagcccagtgacaccatcgagaatgtcaaggcaaagatccaacataaggaaggcatccctcctgatcagcagaggttgatctttgctgggaaacagctggaagatggacgcaccctgtctgactac

SEQ ID NO: 240273 - DNA, 931 bp, Homo Sapiens
attcaggattcaagtttattttaagatgatcagttcagcacaggttactgtagaatgtcttaccccaccatattgtaatggtatgcacaaaaggcctaaaatcagagctatatatctaggaacaagacagatatgttggatggctgttgtacatgcaccaataatattttaaaacaagacaaactattccagtgaccataattgcctaccatagactccagagaagatcagcattttagaattagaaacacacttgaatagatggaaaagaaacaagctgttctacctgtgacaagagcaccagtattgagtgatgaggacaaaaagaggaagaatatattcaaggaaatgtttagcacttttgttcaaagctagaacccactgttggaagagcagcgtatgggctggtgtcttgtcagttgttaagcagtttgtttgcattttgaaatgcttactgcagttgaggattccaagattgcttgaagattgattgactccggtcaaatcaagacttgaccagcaacatccctaaaggtctcttttccttcactttctggggataattaattgctggtcatcctcttgagcctttcacacctcgtttagtggctatagtgcccccaagacctgaggctgtccaccaacagctataccctgaagcatggctgcagaacactgcagggaaggcagccccatgcaggccatgtgtggatgcaggtggataggaggacaagaaattaggctaaaaaatctgagtttagcaaaaaagtatgtaacattgcttcagcacttgtagatgagtaaggatggctcataaattaggtcataatagtgttccagtagcagctataagaaaggcattaaacaaccctcatttgtgacattatggggcagcccatccaacttttttgtacaaagttggcttttatag

SEQ ID NO: 240274 - DNA, 1176 bp, Homo Sapiens
caccagcgggtccagcacgcagttggcgccggccagcagcaccatcaccatcagcaccccgcgcacgcgatcgcgggcaggcacgctggccgccaccagcttgctccgcagcagcccgtagaccgccagcgtgctgttgtagggcacgaagcacagcaggaagatgacgaggttagccagcaggaggcgcacggtcttccgccgccgctggctctgcgtggcgtcggggcgcgccagcgtccagaagactcggcccgacgagtagaccaccgccgccaggggcagcaggaagcccagcgcctcggccagcagcacgaggggcagcagcctgcctttccacagctcgtcgctgaagctctcgaagcataggcgcacctcgaggtcccggtagcggcaacgcgagggcctgtgcacgcgggcggcgggcacggcaaacaccaggatgagcgcccacacgcccaggcagagcagccgcgccacgcggggccgccgcaggtggcgcagtcgcagcgggtgcacgatggcggcgtagcggtccacgttgatgagcatcaggaagatgcagctgccgtacatgttcatctggaagatggcgcccgtcgtctggcacaggaggtcggggaagggccagtggtgcagtgcgtagtaggagagacgaacgggcagcgagagggtgaagagcaggtcgctggccgccaggttacacatgtacacgctcaccaccgagtgcacgcgcagcgcgcgcaggaagacccagagggctagcgcgttgagggggagcccggcagccagcaccaagctgtagaccaccaagtgcaggcggtgggtaggtcggtagtcaggacacgggagaacagaactgttggttgaggagctgttggctaacatcgtgccaaagtgggattgggagctaggctggggatgccatggagcacaccagaatcatggcatggcattcacctccggggctggggcctagaggctgtacagacatggtcccaaaacaagcagagggaggtcatgggaatgtgggctatggctgcagggacagatggctgccaagggttgggtgcgtttggtcacagcttcatcagcagcagagacctcctcagggcctctgggatctgtcccatttgccctctgagctgggctgggcactgctctttgctgagccaa

SEQ ID NO: 240275 - DNA, 1520 bp, Homo Sapiens
cctttattacaatcactctcaaagtgtaaaaaataaagggtgattaattaatatttaaaactcactcgggacttgctgtttggccctttcagtggatgtgccaaagggcagggatcttgcctgattctgaatcaattggccagatggagttcactggagaatgaggcaatcaacaaaaaagacaaatgatgccaactggagagagctcgtgtcttctccatgttggaaggacattacaaaatggcaactgtggtgggggcagagatgaagtaagacaaccttacagtcggagtaagatgtgaatacctctacctatacagagacaaaaacacacacatgcagagccatacacacacccaaacagtgaacacagttttgaaaataatttcctttttgtcctttctctgagcagactgacacattcatcggccaccaccatgcaccatggggctgaaatggaaaacctcgcttaatttccacaaagtattctagctggctgcccagttatgtgctggcaaatctgtccgcaccgaaaaatgtgcctgtggttttcccagcgttccacagactgatatctgctccccaggagggcaacatccggtggacaccagctggattaaaatctagagggcaaaactcgtccctcccacctaaagtgggggcaggagcggcagcaccaggaagtggtttcccactttgtgttacagagtacttgccccagttcaacgcattcccctccaaagtatttgtgctttgataccatcctgatggttagtctgcaataagagaactgaaggagctatggccatgcactattttctttttttaataaaagcaaactaaaactggaggaagaaaaagaaaccattagaagcttttgactgggtcaatgttgtttccaaattgggtttaattccattcaaagagaaagaaggggagggtgcagaaaaggccactcagatcgactctggaagagatcatcaagaccagggaagcatttggatggtacagctggtctcttcccagccagactgggaggacatgccacaacctcccaaggctgtgaacctaggaaataagtgctgaccaaataacatatttcaatgtttgtagaaaagctggcaggaaagggagatgatggattcagattcacaggtcatgcagattaagacttaatcaaaaattaatgcttgagctgagtaagaaaacactaaaatttaagtggaactgtatcatagctttcacctttggaagacgaaaaacaacaaacatacaaaacaaaatgacccagaatattccagagtttccaaaaatccaactgctaattttggcagggtgagaagaaggggatatttaactgatacctcttcattaacctcattttctccttgaatttcactgataaacaaagctcaggtctacttagaaaaacgatcagtcctgctaaaatacagcctcatgacgtcttccaatgcccttgctcggtgcacatgaaatacacccaacttttttgtacaaag

SEQ ID NO: 240276 - DNA, 1400 bp, Homo Sapiens
  misc_feature (170)..(185): n is a, c, g, or t
gaaatacgtaagcctggcattagctgatggcacattctaacattttatagcattaaaaaacatcgactcattccattggatgaaagccatggtgacatttttacaaaagctgtacccaggaatccactcaacgtcctctcttcaattgtcgtttttcatcaacaaagccnnnnnnnnnnnnnnnnaatgagttgctgtgctctcaccatggagcagtgttgatttgatgtaatgaagtattaaacgttctccttgctctctttgccttcaactaagtttctgttagtttttggcatgccagattctctgcttccatcttgatttcctatctcactgcatgaccatcttagagctgttactaattcaaagtctggggtttttttctcccaaaggtcagtctaaggaggcagccacctatatgacatgacgtcagagggattaggaaggacccacactcaccttccctaaggcttactgacttgtacataaggtttataatttaggtatacccaccctaagtaacatctgattgaaggcatgaacttgcttgagatccactctcagaaacaggtttagaggggaaaagaaaaagaatactgggagcttcaaggaggaagaaaagggccacagaacaaggggaagctgggcctatagcagtccagcatggtaaggggccaacagttggcttctaaaaggtaatgggttaacacagtcatcctaataccacctcctgagatgctgaattttctctcagctaagtacacatttctattttcagggacagcttacataaatcagaattatatttttaggaatctttaatcatgaattcctctctaaatttcaaaatattttatgacttctaaggaaactttttttacaataaataataaagaaagatttgggatttgcagaatcttcccaattaaaaacaaaagaagctgtaaatatccagaacttaatagatgtataaattataaacaaaacatgtccctgccccaaggtattgaaattacattactatagatacatcccatttatgaggtagtccgattcctcagatgtaatgggacgagcttttttcagtttctgtttcaccagtcgtagtcggcatgcaaccatgagaagcagcagagcagtgatagccaaacccagcgccaggggtagcactgcacctttgagaaggttagacatgaagagggcaagccagtgattagtcacagtgacagctactggtcactatatgatacgcgctttgcatgcactattttatttaatccaaacaaattgttattagtattatcactattttgcagattaactaaggtgtaccaaggttaagtaatttgcttatttgcctaggaggctgtaagttgtaggttcaggtcccaaacctagac

SEQ ID NO: 240277 - DNA, 1186 bp, Homo Sapiens
  misc_feature (897)..(912): n is a, c, g, or t
aataataaaaatacaatttattaaaggaatcagtttacattgatacagaacatcttggatatttcaacaccatagcaacacaaaattaatttcttcatgtataaaagatgtgctgaaagctgcatgcctcatcagtttttattttattggttatggctatagttgacatctttccatataaaaacaaactgcacagcatcacatatagagtacagacatcttaagttcattcacaaagttaatttttctaaactgcccttcaaaaatttacatctttgctcaattctaaacattcaacaaaattagcttcccaagaaacaaaaatgatacccaatttctttgcttttctagaagtaactttccatttgttcatgtattttgatatgttatattccccacccgaattaaaccctttgttaaaagaacaacctactttaggttcagtctaaaaataaagcgtactagattctggagtgtttttcaaatattttaaaatatttgccacttatggttaaaaaaaacgtgaataagaatatcatgtgagtgtagataggcaccatactatacactcctctcagaatcatttctagaatgtgtataatcccggcgttaagtgatggtgggaatgatttgcctttaaaagcctacaaattaaaaggggaaagatgctaagctagatgctggttttctgtaaagatgaatttgtgaaaaactgctttatggtctagaaatacgtaagcctggcattagctgatggcacattctaacattttatagcattaaaaaacatcgactcattccattggatgaaagccatggtgacatttttacaaaagctgtacccaggaatccactcaacgtcctctcttcaattgtcgtttttcatcaacaaagccnnnnnnnnnnnnnnnnaatgagttgctgtgctctcaccatggagcagtgttgatttgatgtaatgaagtattaaacgttctccttgctctctttgccttcaactaagtttctgttagtttttggcatgccagattctctgcttccatcttgatttcctatctcactgcatgaccatcttagagctgttactaattcaaagtctggggtttttttctcccaaaggtcagtctaaggaggcagccacctatatgacatgacgtcagagggattaggaaggacccacacccaa

SEQ ID NO: 240278 - DNA, 959 bp, Homo Sapiens
  misc_feature (189)..(204): n is a, c, g, or t
aaaaactgctttatggtctagaaatacgtaagcctggcattagctgatggcacattctaacattttatagcattaaaaacatcgactcattccattggatgaaagccatggtgacatttttacaaaagctgtacccaggaatccactcaacgtcctctcttcaattgtcgtttttcatcaacaaagccnnnnnnnnnnnnnnnnaatgagttgctgtgctctcaccatggagcagtgttgatttgatgtaatgaagtattaaacgttctccttgctctctttgccttcaactaagtttctgttagtttttggcatgccagattctctgcttccatcttgatttcctatctcactgcatgaccatcttagagctgttactaattcaaagtctggggtttttttctcccaaaggtcagtctaaggaggcagccacctatatgacatgacgtcagagggattaggaaggacccacactcaccttccctaaggcttactgacttgtacataaggtttataatttaggtatacccaccctaagtaacatctgattgaaggcatgaacttgcttgagatccactctcagaaacaggtttagaggggaaaagaaaaagaatactgggagcttcaaggaggaagaaaagggccacagaacaaggggaagctgggcctatagcagtccagcatggtaaggggccaacagttggcttctaaaaggtaatgggttaacacagtcatcctaataccacctcctgagatgctgaattttctctcagctaagtacacatttctattttcagggacagcttacataaatcagaattatatttttaggaatctttaatcatgaattcctctctaaatttcaaaatattttatgacttctaaggaaactttttttacaataaataataaagaaagatttgggatttgcagaatcttcccaacttttttgtacaaag

SEQ ID NO: 240279 - DNA, 1024 bp, Homo Sapiens
  misc_feature (253)..(268): n is a, c, g, or t
ccttcaaatttaaaggggaaagaggttaaggctagatgctggttttctgtaaagatgaatttgtgaaaactgctttatggtctagaaatacgtaagcctggcattagctgatgcacattttaacattttatagcattaaaaaacatcgactcattccattggatgaaagccatggtgacatttttacaaaagctgtacccaggaatccactcaacgtcctctcttcaattgtcgtttttcatcaacaaagccnnnnnnnnnnnnnnnnaatgagttgctgtgctctcaccatggagcagtgttgatttgatgtaatgaagtattaaacgttctccttgctctctttgccttcaactaagtttctgttagtttttggcatgccagattctctgcttccatcttgatttcctatctcactgcatgaccatcttagagctgttactaattcaaagtctggggtttttttctcccaaaggtcagtctaaggaggcagccacctatatgacatgacgtcagagggattaggaaggacccacactcaccttccctaaggcttactgacttgtacataaggtttataatttaggtatacccaccctaagtaacatctgattgaaggcatgaacttgcttgagatccactctcagaaacaggtttagaggggaaaagaaaaagaatactgggagcttcaaggaggaagaaaagggccacagaacaaggggaagctgggcctatagcagtccagcatggtaaggggccaacagttggcttctaaaaggtaatgggttaacacagtcatcctaataccacctcctgagatgctgaattttctctcagctaagtacacatttctattttcagggacagcttacataaatcagaattatatttttaggaatctttaatcatgaattcctctctaaatttcaaaatattttatgacttctaaggaaactttttttacaataaataataaagaaagatttgggatttgcagaatcttcccaacttttttgtacaaagt

SEQ ID NO: 240280 - DNA, 1184 bp, Homo Sapiens
  misc_feature (306)..(314): n is a, c, g, or t
  misc_feature (506)..(541): n is a, c, g, or t
atgagcaatgctttcttataatagccaactttgtacaaaaaagttggcgcagtcgagccaacgtgctgaacaaggtagaatatgcacagcagcgctggaagcttcaagtccaagagcagcgaaagtctgtctttgaccggcatgttgtcctcagctaattgggaattgaattcaaggtgactagaaagaaacaggcagacaactggaaagaactgactgggttttgctgggtttcattttaataccttgttgatttcaccaactgttgctggaagattcaaaactggaagcaaaaacttgcttgannnnnnnnncttgttaacgtaataatagagacatttttaaaagcacacagctcaaagtcagccaataagtcttttcctatttgtgacttttactaataaaaataaatctgcctgtaaattatcttgaagtcctttacctggaacaagcactctctttttcaccacatagttttaacttgactttcaagataattttcaggnnnnnnnnnnnnnnnnnnnnnnnnnnnnnnnnnnnngtgggagaggggagggatgcctgggaagtggttaacaacttttttcaagtcactttactaaacaaacttttgtaaatagaccttaccttctattttcgagtttcatttatattttgcagtgtagccagcctcatcaaagagctgacttactcatttgacttttgcactgactgtgttatctgggtatctgctgtgtctgcacttcatggtaaacgggatctaaaatgcctggtggcttttcacaaaaagcagattttcttcatgtactgtgatgtctgatgcaatgcatcctagaacaaactggccatttgctagtttactctaaagactaaacatagtcttggtgtgtgtggtcttactcatcttctagtacctttaaggacaaatcctaaggacttggacacttgcaataaagaaattttattttaaacccaagcctccctggattgataatatatacacatttgtcagcatttccggtcgtggtgagaggcagctgtttgagctccaatgtgtgcagctttgaactagggctggggttgtgggtgcctcttctgaaaggtctaaccattattggataactggcttttttcttcctctgtcctctttggaatgtaacaataaaaataatttttgaaacatc

SEQ ID NO: 240281 - DNA, 895 bp, Homo Sapiens
ttggctcccggggaaaagcaacggtgtcctcctaagcctgaggccaccgcgaccgagccgagccaggctaagggaccagtgtctccctgcccccccaccacctctaggagctctggagccttaggaccatggacgctctcaataggaaccaaataggccctggatgccagacccagaccatggtgcagaaaggacccttggacctgatcgagacaggcaaagggctgaaagtgcaaacggacaaaccccacctggtgagcctgggcagtgggcgactcagcacagccatcaccctcctgccgctggaggaagggaggacggtgattggctctgcagccagagacatctcactacagggcccaggcctggctccagagcactgctacatcgagaacctgcggggcaccctcaccctctacccctgtggcaatgcctgcactattgatgggctccctgtccggcagcctacccggctcactcagggctgcatgttgtgcctgggtcagtccaccttccttcgctttaaccacccggctgaagccaagtggatgaaaagcatgattccagcagggggccgagcccctgggcccccctacagccctgttcctgcagaatcagaaagtctggtaaatgggaaccacaccccacagactgcaacacggggaccctctgcctgtgccagccacagttccctggtgagctctattgagaaggacctgcaagagatcatggactcactggtgctagaggagcctggagctgctggcaagaagcctgccgcaacctctccactgtcaccgatggctaatggtgggcgctacctgctgtctcccccaaccagccccggcgccatgtctgtgggctccagctatgagaacacctctccagccttctc

SEQ ID NO: 240282 - DNA, 1470 bp, Homo Sapiens
aatgcaatacaagaaccactggctgagaatggtgcccgcagtcacctcattctgagcagcctggtgtctcctgggcagcactaaggagctgggccacagctggcaaagcccagccttggggcaccacatcacctgggaagctgctggaaatggtcttggggtgagtcccccgtgcagagaagtaaactaaggcacagagatcagtggcagagctgagagaggagccaggataccagggcccagtagagaaaggatggggctgcaggaccctacagcatgaggggtgctctagggaccacagggccatcctggtgctcatcacaggatcacaagactgggaaggtaggagaagtgaagacatctgcccagacctgggccaggtttccagattgccagctgaggtccctcttcttgggaatggtttgagtggcttccaaataaagagtgacaaggcagccagccctgactgcctcagcccttcaaagatgtttagagaaaaccaaaggtcccttcctcagggcatggtgtccagaaagctggtgaagggcaggaagggaggggagcagggccgttgggatagacaagcagcagaggaggctccaaggagggtgaggaaggagtggcagggctggcattggagagaagccctgagcaggagacttgggcccagcatcatgtcctcagtcccctcaggacttgggtctgtatattttgcaaactgcaaatgctgttgggttgggaggggtaaggcatagagttggggtgaactgtagattctgccaggacaagcagctctgagagtggtgaggtccagaggagaatggagaggatggttggatactgaatggacaaagagatggatcaatgaccagagacagggagagaagaacctgtcaggcagcacctgctttacagtcaaggccatctgggcctgggcagggcaggggaggaaaaaggagggatccaagccccccccacccaccaccacacacacgcccattgcaaagtgctggggctgctgctggcaggctgcttacagagaagacagtgtggcttaagggtggcaccggggggttgctggggcagggtgagcccagtgagaagggctggcagggctggtgcctcctgatgcattggaggaagaggcttttttttgtgtgtgtgagaaaacacaaaataaataaacacagaaccaggacaccaccacatttgagagcaaatatcagagttgggaaaccacagacgcggacaggaaggcttccctggtaggaagcagggggacaagaagccagttactgaggttacgggaaaatccgcacgaggcagcagtgctgggaagaacatcctgggaggactgagggctgaatactatagtgagctccggacccagaagaggaaaacctggcatggaccagggccactccatttgctggcaggaaccagccaaggagaagaggaggcaggagccaa

SEQ ID NO: 240283 - DNA, 1471 bp, Homo Sapiens
  misc_feature (444)..(452): n is a, c, g, or t
ttcctggccatatccgatggatacaaacaggcacatggccctcttagaattttttccaactggaattaagggaagacagctgctggcaactggagcttcagctcctacagaaagataggctgtgagaatgtagccactttagagacaggggatgggaggtggagacctcccagtgctgttcaaggactccaggagcactttcccggtgcttgcttcttcaattcacctgagctactccttccccttcatgtattttccccctcacttatgccaatttaggctgaggttctgtgacctgcaatcatgagtcttaaaatcatacagggcttaatctacctttttagtcttatctccaactactcacctttctgaattctgttttggacaagcatgactcatttcatcatgaaaagatcttttgttggccttttgcacattcatgannnnnnnnnactcttctctaaaatgccctcctctccttcctttttccagacctggtttaaatcttactttttctgtaaagtttttcctggacacactagttagttttttactacactggaacttaacctttatcataacaattgtctaaataatttgagaaggaatcatatagtactactttgtatcatctcttctattattttgaaagactgtttaatttttcatgtcttacattcccaactaaagcctaaaattgttttgtatcccactcaaaatgccttacagaaaatagaaaaatcaatttgatcgtttccttaattacaggagtcattgcaattagttacataatttgactcttggctatcagagttaaattatttgaacttaaataaccattttcctgtaactgaatataatttatattccctatttccagtaattaactggcataaaatacagaaataccaacaaaaagtagtgtagcccactggtaaagtgcatagactctgtggttagacagactatattggatttctgaatcagctactaaaatacctagtgtatgaccttaaacaattgtcttaagttctctaatcttcaatttcctcattgtcaaaaaattcctgaatcagctactaagatacctagtgtatgaccttcaacaatcgtcttaagttctctaatcctcaatttcctcattgtcaaaatggggaagataatagtatggtgtttggaaggcacacagtgcctgatggagagtatgtgcttgggaaaggggagctgcttctgctattcttatttaaacgaatggtcttgaaaagcttataaatattaccacttttttcttcctgcatcagcctctacatcatagcaaataagtgttcttccacaggacctacttgaagcattgtaaagattaccgaagttaaatattttcctggctgtccttgtcactccagttttgcaacttcatttatttgtggctgattaaataaatgtttactgggcctcgtgaggtggctcatac

SEQ ID NO: 240284 - DNA, 2904 bp, Homo Sapiens
  misc_feature (1568)..(1626): n is a, c, g, or t
atcattgagttggacagagaaattctactagtacatacattgcttaggaacataaatgtcaagtacattactagggcaagaaatatcaagtaagacaacagagtcgtatttttctttgtgaggttattttcacaagacatagctataatttgtaaaatattcagactattgaaagatcacattcaaattatatttctaagaatagagccatatatgaacagagagcaaaacaagctaatacattaatgaatattcactgaattcttcatactgcacaggacacaaatttggtatttttgcacatgttgtcaattataagcaaaaagcaggcctgtaaacatcaattttgtcataggctgaaacagagaaaggaaatggattttactcaaaaacagtgacataaggagcatataccattaatcttccacacatataaaggtcactcctaggataattgagagaaaacatcaacttacattttgtttacaaaaatctactggtgaattcaaggacttaggaaaaattgaaggaaaatcttcctccaagcatgctatttaaaccccagcccctcttccctggagagcacctcaggggcctcccctcccacccctgatcctgcaggttctttcctgtgagcctttccaaacccacgccacagcaggctcattcctgctctggacttttactcagtttcccaacctagattaacctctccactgtgtgtgttcagacctcctaaaccctcaggtagcttagggcaaggccttcaaaaccaaaggggaaaagggtgatggtggatggtctttatcaccacacatgatcataactaagccttgacggcatcactgtcccacctactggaacttgtccgtgaaaatccacacagatgctgcacatccccttatcccctacaaggaggctggagatcttccacaatgcaggctgcagcctgcttcttcatttgttaggagcagggaaggaaatgcagaagctgagaaatgagggccaagaaagccaggcagtaggatggagacccaagggacatcagggcagaaacaaaatagtacaaaggagaagagtgacctacaaaatgctaccctagaagcagtccaaggcccaaaaaagaatttccatctttagaaaagtggagtgaggctaagttttggttgcctttgctcacatcacaaaggcctttgcctttgacccgtcctgaacccatcactgtgaggcccttctctctctttccagcttctcaaactaaaaactcaagaaatacacaggttttggtagaatggatggggtaaaaagataaatatgtcaaaatctgcctaatttaacactgcctataactaaacaattaacctataggtctccctttgaaactttcagaccttgctaaaagaagtggggtggaggaataagggcaataagagatctggagcccatttaatcataacctttctctctgaacacaatcagggaaagagcaaattaaacaaaaagcctgctttgccagttttgttttctgttaataagctaaaactgcttcagagtgaaagggaagaaannnnnnnnnnnnnnnnnnnnnnnnnnnnnnnnnnnnnnnnnnnnnnnnnnnnnnnnnnncataacaagtctcacattccagaaatatctcttcctcaatgccccaactctggcaacttttgtcatgttcagagtgggtgcaggcggggaaaagaggaaatgcctaaagaagttgctcagattaaggatggtttgttggctaggagtcagaaagactaagctggaagggactgcgttccagccttgctttgggctctgtcacatattactgcccatcctggtggtagggggtgttgctgtgagctccctgggagctacgtctacagatagttcctgatgaggcagacaatggtggcctaagcaaagttcaaccagaaggtgagagtgagtaggggtgggctatagcacaggcttcatactcaccagcagctggtcatgacgtagagtaaccaaaggtacaggaaaaccaatgtgataacatagaacacttttcatctattacctcagtcacgcctagcagtcacccatcagccaccagcttgttctatcagataaccagtagggtggatggcacaagcccaggaaggcagctgggatccagttggtggtagtctggaatgtccaatttgggttgatggccgggttaagatatcagttttgtcttgcagtggtaatacccaaatagcttaccataagtacatgggtatcaggacacagccagcataaagtatgaagcccaatcagttatttgtgaaaatgtatcaagattctttgtggtacagaaccacttaaattgggagaagagcatggtcacagatagggtccaagccatgcaaagaaaggcagtatggtacactatatctatagtatcatacacttggcatagaagccgtagaaggccatgcacttgaaacatgttaacacaatgcagaaaagcatgaaggcccagaggaagaatggcacaggcaggtaagccaacaatcttgcaaccgattactgaagatttagaaccaaaggaaaagataatccacagtatgaagagaaagcagatggaagactgcatgctgttggccaagcataggtccaagaggaggtggtaaggaaacttgtgcagaaacttctcacaggacagagattagccagactggaacctgaaggatctggcgctctccactggctgccttggtgggcctcgaattcctctacggggcccttcacccatcaggtagtattgtaggggattgggccacagttctcctttgataatctctgcaattctgtcgaattctagaaggctgtggtctgaaaaccagttgaagaaactagggatagtgccaa

SEQ ID NO: 240285 - DNA, 829 bp, Homo Sapiens
gataatacaattttctttattaaaaataatttacagcatcagtaacatatacacaattgtcatcaactgaactttgcctccaatatatttctatacaatacttaacattattgaacttaaaactgttacactgttttgttggctttaaataatagacaatgatttttgtctattacttagtgatagacaaagtgattactttgttacttaagtgagatatatggtttcatagccacatattatgtgtaaaattgatagaaacgtcagcaatatcactctttaggggaaaaaacactgaaaagccaaagtccaccctcttcttctctcttattactccaaccaaactaagataggataaacatccagtatcttagtatctcctcctaaacctaaagacaaaagaaaggtgtcttctattcaaccacagaaaaatgtcaaataatttcttctcatcctctcactcatcactgtgaaagcaaatgcacacgaccttgttaccatatatgcaggcaactatgattctgatttaggtcctagctttactttcctttagtacaactgttgtttgattaccaacgaaaaactaagcaatctggctagagggatactagtaccttctttcaaatgtcagcatggagataaaacaaaatagtgataactgtcatcttagaaactttttagatataataatggcaattcagtggctggatgacatttccattgattccattgtataagagtagcaaaaccccaaaatatgaaaatggcaatgatatgtagcataaggtttttaaagccaacttttttgtacaaagttggctttcaaagg

SEQ ID NO: 240286 - DNA, 2154 bp, Homo Sapiens
  misc_feature (990)..(1197): n is a, c, g, or t
tacttttaaaataaagtgctagcttagatatttactataaaccatttcattgagtacctattaggtaaccaatattttaaaatatacactgaatctgaggcaacccaaaatgaacaatggaaagaaaactagtaaatctgaaatgtacttcacattctacttaatctaatttaaaatataaattcattgtgcaacccataagaaagatggtccaacctgtgggtatttttaaaaattctaacaggagaaatcatttaaaattttgctttttcacaatggcaaaaaggaaagaatttgaacataatatttaatttttaaaaaaattcagcctgactccgaccctgaagatttcagaaagaacatcgtcactattaaaatgatgacaggcccaaatgggggattgtttaaccagttttcctaagttaaaccaagaataagccacaagtattcaattgtgttacaacttagatctgagacatttacatcaaagcatacttccctgaacatgttcacatttaaaatgcttaaggtcttattattaaatccaaaataccaaaagtattagaggagctagttatacaatattggcacagcatttttaagcaataataaaagtttcattttgtcaccttaagtcaagatccatttatctattaataggttaagtctgaaattctgtaacatattctagaagcacctacatccattatttccaggagactagtttactactatcatgcaatcgctgaggtcatatgagtctaaaatgaagggaattgctgaacaggcccttttgctgttgagatatgaagcccaaatctttgcctctgaagacggaattcaatgtggtgtgtgtaatcacaagcaaaaacttgagctagggaggaaccttggatattcagtctacatctcaaacagcatagctgccaaaaatgaggcctgtccattaaagtggaggagatatccttgctgatggcaaaaactgctttnnnnnnnnnnnnnnnnnnnnnnnnnnnnnnnnnnnnnnnnnnnnnnnnnnnnnnnnnnnnnnnnnnnnnnnnnnnnnnnnnnnnnnnnnnnnnnnnnnnnnnnnnnnnnnnnnnnnnnnnnnnnnnnnnnnnnnnnnnnnnnnnnnnnnnnnnnnnnnnnnnnnnnnnnnnnnnnnnnnnnnnnnnnnnnnnnnnnnnnnnnnnnnnnaaagttaatagaaatcttaatcaaaatataaatatacattcataactgccatctacaatattctgttttggtcctatatcttaatttgcctttatccactttattattctaattgtcaactgattttaataaaactgatacatctttacagttgatgcacatattagcacattcacaacataaaaacaaaaatttagaggtaaagtttgggagtatttaggttaagttacacatgttcaaaagttaacacagacctatctgaaaagtaactaagttacaaaacaatgcacgtctatatatcagaataatccaagactttaccatcaagcaagactaacaatcttctattatcagtcatttagacttatttgtaaaagagaatccaacaggaaaagtatctttaacttggtcgtgggggacttctagtaagagacacattattataccacagaaaaactgtttaatatagctctctaactcctttaagaactgctttaggaatttttattttggctttaagtggaatcacttacatctagacatcctttgaagcaaaaccacttagaaaccagtattttgtgctaaggaagggaagaaatactacaaaatgttgcaaaacagaacaaaaagcttaaaggtttaagaaatttaaaggcacagatatttcacatcaattcagattttatagtatgcaaacatgaaataaaccaccgtattacaacaaatatgtgctagcgattggttagatttcacacttctctccaaatgtaacactgtcacattgcatttcctctctagatgtatactgatagcactgggaaagatgttcagatgcagggacaatcccaatgtttaccaaacttctgaaagatgagtatacgctacaaacttagttccaaatatgaaatgaaaaggaaagtccagctatttaggggggtactcaaagtgtcaacccaa

SEQ ID NO: 240287 - DNA, 835 bp, Homo Sapiens
ggcaagcacttcctcagatttcatgtctaatagttcatctatgggtcgtgagcatgcagtatgtgtagagcctttgtctaaggcagataaaatactttttccatcttcagtcttaaaactagaggattccttgcgctggttttcttcctctaatgaaattaattggctcggctcctgcacggctgcatctgtactttcctgctggttgattttcttcttctcttctttctcaactaattttttcatagggtcttgtaagctctttaaagtagtaaattcatatggttgataacctttgaaactctcatggatggctgccatagtgtgagaagttttctcccaaaaatgaagcagagtggtctgcaaagaaagacagtaaagctattaatgttttgaatgcccagttctagtcctggtccccagggaagtatgactctctgtagctttgaagattctttaaagcatgattctaactcatttccatgcttcccattatgcccccatttacactctctatttcagccaaactaaatgcctccctgtttccccaaatgctgcctcccagaactcatgctgctcccaccacctgggacattctcctctccattctctttttctcatctgatccatcctccaaaacccagggtaaataattaacgctctactgttgcaatccctcagctgattctatttctccctctttaagctgtcactggctttcttagaacttatttcacttagcacactctgctctgtcctagaggtatagaaaaatagacttcactatctccagattcttcctaaactttgagctctttgaagacaaggaacccaa
